United States Patent Application Publication US 2007/0054278 A1 - sequence listing, part 61

SEQ ID NO: 95383 - DNA, 116472 bp, Homo sapiens
  misc_feature (1)...(116472): n = A,T,C or G
caacagggttgagtagtagcctgagacagcatggcccacaaagatgaaaatatttactgtgttgccttttacaaaaaaagttgcagaccccagttctattggattataaattggaggttattattcattatcagcagctaggtattgcctaactttgtaaggtgttttatttgaagcaggcattttctggcttaaagaaataaagaagcactcgtatgggctcgggtcatggagaattattttaaggctatccaggggagtaagtctcatagcccatctgtcatggttctgaatatagcagtagtaccagtgatattgttaataaccaacatatattgaatatttcctttgcgccaggcactgtcctaagttattttcatgtattgattcatttatttcttcttataaccctaagagaaaggttcagtgcttatctacgctgtaaagatgaggataccaaggagcagagatgggaagtagcttgccaaaagccatgtgactcagaagaactaaagtcaagatttggtacccagcgtgtctgcagagcctgtgctctaaaccaccacacagtaccacttagcagcatacctagctcaaatcttttttctccctctctgcttctctcctctactggggctatggactaccagggaggttctttgacaggtgcttgtcagaaagggacaatataagcattgggaattccctcagttaccagatatttgcaaatgtcaattatattgtagaccgtagcagccccctagtgtggtgtgtctagtacaagcgtacatgtcttgttgtttgtgtttctctaggaagaatgaaacccactctccgacctgtgtcattcctgggacacatcacaggcacttaaatcttttcttgatcactgtgggaaaggctagggactgcggatcgtaatttagttttttcttggtctgatttggtcctgtctgtgcttttgaaaccagacttttagaaagggtggtatacattctctgcctccacatcccttgccactgatcccttctcacctgctgccatctggtttctgcccctatgactccactaaaattgaccttgctaaagtaattggtgaactcctggttgccaaaagaaaggtacacttttcagctgtgtcacactccatttctctgtaccttgtgctgcttctgacttcactttatttccctttcttcactgctgggacattgctctatcttgggctccctgtaggcacatctaaatttggaaagtccttagggctctatcctcaacccttgtctccttgtctatagccttgattccagcaaaatttcacccgtagccatggagtcccaagcctttatcccagaaaacccttcctcctgaacatcacatctctttaagtgtctgttatccagctcctcttggatgtcctacagggacttaaaacattacatctccaaagctgatttgatcatctcccctccaaatctgctgcttgtcctttgctccctatttctgagacatcactttccatccaaataactaaaccagaaactccagatttgtcctaaaccctacttttattttaccccaatcaccaatttctggactctaccctcttgatacctctcctatcagtcctctcctctctgagccctactgtcccagttttggtacctaattctcttgcctaaatttctgtaaatgcttccttattggtttctctgcttccactctcaccctttccagtacatctttcatactactgtcaatttttttcttccatcaaccaagtctgatcatgttattgttgttcaaaatgtttcaatgaatcccagctgcttacagaataataaactcctttaccaggcagacaagtccttgataatctggttcttatccctctttcagtctcatctcccaatgcaccttcattaatattaaactttgtgtattaatttgaaggacttccttgttccttcttggaatcccccatccctcttcctggtgtgtcttgtgaacttctgctcacccctcaagtttcaactcaaatactcccttcccctggaagctgggcctctgatgtcacaccactctgctcatcatgttgcacccatagtgtttgattgactcctgagatatttgaactcaggaggatgttacaagcacctagcaggattagaacctcaagtgcaaaggggcaaacacattcaagcttcatcacaaactgtaaacaatttttccaagttgataggctagaaattgtgaattcacaatgctgcaatttatttttatgggttctctagtggttccacaatagcatattcctcacaaaagtaatctctgaattctcaggtagagcttttactggtctcctctccaaaatgcttttcacattgcagccttggtaatcttttcaaaacacacatctgatcaactctctccctctatctcaaatacactacatgctgcttaaaaccctttatggcttctcaatattctgaagttaacatgaagcaaaaaacacctcttaaaaggacctacactacccggccattcctttgactcctactgcaccttgtcccactgtctgcattgcagccacttttctgggttactcgtatgcctcccctgccccactgcagtgcctttgcacgtgcttctctatgtaacgcgttccattctccttctcctcgtccgttcatcatcacttccagtgctgcttcctcagggtaatgtttctcatccttctggtgtagatcaaattccccatgtgcctgtcctccacagtgtttgtcaccctgcattttggtcctgaaccatctgatgatttggttaatacctcccttcctagggctggctggtgaactctctgagagtaggagccctgtctttcctgttcctagctgaatccccatgcatcccagttcactcacagtggtcggcataaaggagttcaatatatacttgctgaatgaatgagtgaataaatgaaggtcaaaaatcaaggggttttcgtagggcttttcacctttaccactaccctgtatttgcacgttccttaacaatttcctaaaatgctttcagataagcttttttaatattaacaactgactttaagagcagaaagggcaacccatgcaggtgacttgtccaatgctacatgactagtaagcaacaatttgggactatttcactttgtcacttttcagatcaggcctatggccattaaacagccaaaacaggaagcaaaagaagataacgtagaacttactagggaatagatacacaaagacaataaaatagaaatatccaaacaaattaaaataaaaacacaaattttattttagnnnnnnnnnnnnnnnnnnnnnnnnnnnnnnnnnnnnnnnnnnnnnnnnnnnnnnnnnnnnnnnnnnnnnnnnnnnnnnnnnnnnnnnnnnnnnnnnnnnnnnnnnnnnnnnnnnnnnnnnnnnnnnnnnnnnnnnnnnnnnnnnnnnnnnnnnnnnnnnnnnnnnnnnnnnnnnnnnnnnnnnnnnnnnnnnnnnnnnnnnnnnnnnnnnnnnnnnnnnnnnnnnnnnnnnnnnnnnnnnnnnnnnnnnnnnnnnnnnnnnnnnnnnnnnnnnnnnnnnnnnnnnnnnnnnnnnnnnnnnnnnnnnnnnnnnnnnnnnnnnnnnnnnnnnnnnnnnnnnnnnnnnnnnnnnnnnnnnnnnnnnnnnnnnnnnnnnnnnnnnnnnnnnnnnnnnnnnnnnnnnnnnnnnnnnnnnnnnnnnnnnnnnnnnnnnnnnnnnnnnnnnnnnnnnnnnnnnnnnnnnnnnnnnnnnnnnnnnnnnnnnnnnnnnnnnnnnnnnnnnnnnnnnnnnnnnnnnnnnnnnnnnnnnnnnnnnnnnnnnnnnnnnnnnnnnnnnnnnnnnnnnnnnnnnnnnnnnnnnnnnnnnnnnnnnnnnnnnnnnnnnnnnnnnnnnnnnnnnnnnnnnnnnnnnnnnnnnnnnnnnnnnnnnnnnnnnnnnnnnnnnnnnnnnnnnnnnnnnnnnnnnnnnnnnnnnnnnnnnnnnnnnnnnnnnnnnnnnnnnnnnnnnnnnnnnnnnnnnnnnnnnnnnnnnnnnnnnnnnnnnnnnnnnnnnnnnnnnnnnnnnnnnnnnnnnnnnnnnnnnnnnnnnnnnnnnnnnnnnnnnnnnnnnnnnnnnnnnnnnnnnnnnnnnnnnnnnnnnnnnnnnnnnnnnnnnnnnnnnnnnnnnnnnnnnnnnnnnnnnnnnnnnnnnnnnnnnnnnnnnnnnnnnnnnnnnnnnnnnnnnnnnnnnnnnnnnnnnnnnnnnnnnnnnnnnnnnnnnnnnnnnnnnnnnnnnnnnnnnnnnnnnnnnnnnnnnnnnntcacattctcggattcccgcggccgcagaagccggaggcgggacgtgaagggcaatgagcaaggtaggctgtgtcactgccgccgcgggctcactcgcagcgccagccgaggagcgccacgggctgctgaacccctcggcccgacccacgcgccgagggctaggataatgcgcctgcgcggccgtcacgtggtgagggctccgcgcaaagcgggttaaaagtcacraccgcggagagcccgcgagcgtcctgctggtcggtgcggcgctttccgcgtcctttaagacgagtttgaccgaggccgctccgcagttcccgcccctcggcccagctcagctccatgaacctagcggagccgcctagtaccctttctcgccgaccgcacaggcgcgcgaaaccgcgtctttcaactgacaatgaagccgtagccgcgcagctcggccactccgggcgaatcggcgcgaggccgggatggtgggggggagggggagacggttgggtcaagctccgccccagctcgcgcccctattggtgggcgcagcggttctgggcccgccccctaacggacctgtnnnnnnnnnnnnnnnnnnnnnnnnnnnnnnnnnnnnnnnnnnnnnnnnnnnnnnnnnnnnnnnnnnnnnnnnnnnnnnnnnnnnnnnnnnnnnnnnnnnnnnnnnnnnnnnnnnnnnnnnnnnnnnnnnnnnnnnnnnnnnnnnnnnnnnnnnnnnnnnnnnnnnnnnnnnnnnnnnnnnnnnnnnnnnnnnnnnnnnnnnnnnnnnnnnnnnnnnnnnnnnnnnnnnnnnnnnnnnnnnnnnnnnnnnnnnnnnnnnnnnnnnnnnnnnnnnnnnnnnnnnnnnnnnnnnnnnnnnnnnnnnnnnnnnnnnnnnnnnnnnnnnnnnnnnnnnnnnnnnnnnnnnnnnnnnnnnnnnnnnnnnnnnnnnnnnnnnnnnnnnnnnnnnnnnnnnnnnnnnnnnnnnnnnnnnnnnnnnnnnnnnnnnnnnnnnnnnnnnnnnnnnnnnnnnnnnnnnnnnnnnnnnnnnnnnnnnnnnnnnnnnnnnnnnnnnnnnnnnnnnnnnnnnnnnnnnnnnnnnnnnnnnnnnnnnnnnnnnnnnnnnnnnnnnnnnnnnnnnnnnnnnnnnnnnnnnnnnnnnnnnnnnnnnnnnnnnnnnnnnnnnnnnnnnnnnnnnnnnnnnnnnnnnnnnnnnnnnnnnnnnnnnnnnnnnnnnnnnnnnnnnnnnnnnnnnnnnnnnnnnnnnnnnnnnnnnnnnnnnnnnnnnnnnnnnnnnnnnnnnnnnnnnnnnnnnnnnnnnnnnnnnnnnnnnnnnnnnnnnnnnnnnnnnnnnnnnnnnnnnnnnnnnnnnnnnnnnnnnnnnnnnnnnnnnnnnnnnnnnnnnnnnnnnnnnnnnnnnnnnnnnnnnnnnnnnnnnnnnnnnnnnnnnnnnnnnnnnnnnnnnnnnnnnnnnnnnnnnnnnnnnnnnnnnnnnnnnnnnnnnnnnnnnnnnnnnnnnnnnnnnnnnnnnnnnnnnnnnnnnnnnnnnnnnnnnnnnnnnnnnnnnnnnnnnnnnnnnnnnnnnnncccctgcactggggatacggatggctagtggggcgccggggccatctgggttgagagagcggcgattgcggccgctgctgaggcggagactccccgccgccgcttcctccaccccsagtccgccggcctcgcggcgctgagggcgggagcgcgcagagctcttccctcctcctttttcttcctcctcctcctcctcctccgggtccccgcccagcacccctcgcaccaggcggcggcggcggaggaggagagctagacccgccgccggggcacaacatggcggagccctcggccccggagagcaagcacaagtcgtccctcaactcgtccccgtggagtggcctcatggccctgggaaacagccggcacggccaccacgggcccggggcccagtgcgcgcacaaggcggcgggcggcgcggcgccgccgaagccggccccggcggggctgtccggggggctgtcgcagccggctgggtggcagtcgcttctctccttcaccatcctcttcctggcctggcttgccggcttcagctcgcgcctcttcgccgtcatccgcttcgaaagcatcatccacgagttcgacccgtggtaagtgcctcgccgcccctcccccgcccgtggcccgcggggaaccgggacccgctcctccgcccgcctgcagctctcctcgacttggccccgcgccgccgcggagccccgctcgcgtcctggctgaggccggcgcggatcccggagctccgggcgcgccccctgcccgtgggcgaagtttgccccgtgcagcctgaggcggggcgtcggggtccaggagcgaaaccttgattctcggccgggctagtgtgaggactgccaggagtgtggatgcagccgccgggagtgtgggtgcagccgccgggagtgtgggtgcagtccctcgcagcccgctttggtcgctgagtccggacccgccacgccaggagccggcaggtagctcctccgcggactgtcggtcgattccccgccctcctcgcccgctgctttcgcgttctttcatatttgcgggcgcgtttttgctagttcagacggaatcggccaggggggctgccctgttgccgctggagnnnnnnnnnnnnnnnnnnnnnnnnnnnnnnnnnnnnnnnnnnnnnnnnnnnnnnnnnnnnnnnnnnnnnnnnnnnnnnnnnnnnnnnnnnnnnnnnnnnnnnnnnnnnnnnnnnnnnnnnnnnnnnnnnnnnnnnnnnnnnnnnnnnnnnnnnnnnnnnnnnnnnnnnnnnnnnnnnnnnnnnnnnnnnnnnnnnnnnnnnnnnnnnnnnnnnnnnnnnnnnnnnnnnnnnnnnnnnnnnnnnnnnnnnnnnnnnnnnnnnnnnnnnnnnnnnnnnnnnnnnnnnnnnnnnnnnnnnnnnnnnnnnnnnnnnnnnnnnnnnnnnnnnnnnnnnnnnnnnnnnnnnnnnnnnnncattgcattagttcctttattggtctgcaggaaggtttgtggataagagcaaacagtaccacgggtgatgggagtcctagattgtaataccgaagttgcacatggtgtaagggactgacctgaatgttttaggaaattaccccactcttaacaacactagctaacttagacactacattggtctgtgaattatctagatggaaagattgctttaacttttttttcgcaacttgcccaacccgagttaggatttttccccctgagttaggattttcccctctgagagtatgccttttaaactagtgttatcttattgacctgtcaaccttgagttaatcttacttcctcacagttagacctaattaaatttcaggatatttgtttcatcatttgagattcaaagagagagagtcttttttgagagttactaactatatagataataagtgttcgggtggaggggggcagtaacttacctgtatagtaatataccagatttaagttctgcattatggagagaaaaattggtactgcaacatctattgaacaccagaggggcccactcatggacaattcaatttagatcagttaattactgtgacagtcttccatgaaatgttttcattccattttagaagttttgattttgttttctaacactagtttttttaaaaaataacctttttgttaacgtgcaatcacagaagaaaatatgttagtgtagactatttatgagcctaagaatacctgtgaaggcttattgacacaatattattaggtggtcttgttttgaaacacttaagcaagttagataaaaatgaaattggaaccagaaaatgaaaactagtatttactggacaatatgaaaagagaaagttctcttttcagattaaaatagcagaaatgcatggttgaccaaacatttcaggtaacaaaattgtgaatatttccatagtaacatttttacaaatggaaggctaacgactgtttaatagtaactctggggctgaaattaaagattgcagaaaaattcactactgaatgatgagattttggtcatttttccttaagattagaaatctgcatcaagtcagccaaagatccccactaaaattgagtaatgcaataatgaaaaggctcaacaagtaaagtggctaatatttttattttttattttttatttttattatttttttttttttagtgtagctaagtattaaaagttttctttttccagcttcagtagtgtggttggagggcataattctttttcatgcacatgaaaatatgttttggtcgggcgcggtggctcacgcctgtaatcccagcacttcggaaagccgaggcaggtggatcacctgaggtcaggagttcgagaccagcctggccaacatggtgaaaccccctctctactaaaaatacaaaaattagccgggagtggtgtcgggcgcctgtaatccagctacttgggaggctgaggcaggagaatctctcgaacccgggaggcgaaggttgcagtgagccgagatcgcgccactgcactccagcctgggcaacaaagagcgaaactccgactcaaaaaagaaaatatgttttgcttcattttttatatatatgaaaacgcatttctgacacattatcatttagctaaatttgtaccatttgaaagtatacatctctgttttaaagagctacttaatttaggtattctgcatatagttttaatgttgacatttcttaattaaatgtttatattcataatgttagataatcttgcttagtagtaaggagatttgtataataatggactgtctcctgtgccttaccgtgaatggagatttgtcagtatgaatctaatataatgtctaattcaggtgacttaatgagagaatcaggtttcagacaaaaaaaataccttgttcttgttttttttccatgtcttttgaagatctcacgtagttaggcatctcattcattcttatctgattcttacagtcattctttttgaaaaggttaaaaggagggggatgtgtagattgcctgccattattactttgggcttttaaagcttttcggggcttttaaatctagttttcttctatagctactaatagtcgcaacactttaactggtctgtagctgaacactctagtgtttctagtttgggagttgctcagatcaccatcatatcatatagcaatggcacagacctttaataatatttaaatgttactctcaggctgtgcatccacaaaccgatttattctggcctgctcataccttccctgacctctttttccatatctctatcaatggtttcatttctgcaagtcgttttagtgaagggtttactttctctgtgagctatttctttaaattttacagtagttcttaaattgtgtaaaagactcaagttagctgctgaaagtgacgtcacagagttatacttgttttttaaatttgtcacccaagttatttatcttaccagttgtcataaggggtgatgtgtgatttatttattgaagtacactgcacttttttaacatttagcaacatttttggtaacaatttgacttcactttagtaattcctcccttatcagctgagttgaacagataggaggaagcagtttgaaaatatattgtctgtacttgccaaacgtttggttaatcagccactttaacagcacttaactatacctttttatctggaacaaaatgtgttttctacatatttttattgtaagagataatacttttactttatattagccagataccttctccatatccattatcttgttcaattgtggtagcctttcccatagaagcaatgaagttccctatgtgagagctcttttttccctgccttagcaggttataaagtgggttctccctagagagaattctctgagccttaggttttggctgtagttagcaaaaatgcagcagatgcctttttgctgggcagaaagttgcaagttagagttggaacttagaatgcaatttttccgaagaaactatggtataaattggttaattagtacagatgtgttttcaaaggaatgataaacctttggaacataagctgttagaagttggggactacttcctgtactttgaggtctccatgttttccttcactttgcagatgacaaaaagaggctgttgacctcagttctgaagaagacaaattggtagccaaaccagttttagaacacaaacgtccccaaatcttaaaaagtcactttgtgggatcattagcatcagcagtccagctgcacttcagaccaggtatcactgttactgattgcattgacaattaaattgtatgaatttatgataagattggtgctactcccatttcggttgagtgtgatggcttccataagtagtaatcatagatttcatgatgtataggccctacggtagttagggtctgtcatgaatgcccttgggacttttccttccccctttatggttttcatatcgtaaaggttaacttgggtaggactgcatgccccttactgccatgagtagtttgcataaagacaacattggttataaacattagaagctcaatataaggatttacatcataatctctgacccagttgttaatgaatatgggctaacttaactagcccttctgtacctaatcaatttttatactctctataagttttgagtgtttgagaaaatgttaacatttatctttattgttatatcttagtattcgkctgtgcacacgtgctctccgaaatgaaggatggaaaggttaatattattctcaagtgaccaaatcatgtttttcccctcaatttgtttacttttaaaacttaatgatcttagggagtgaaaatactgcagttaacttgaattataaagaccccacaattcaacagacctattgctaaactattataaaaattttcaaatgcacaagaaagttgaattttatagtgaacactcatatactctaaccacctagattctacaattaatattttgctttagcatatcttcctatccattactacttttaaatcctgcttgtagacagacattgttactatgatatgaagaatgccatctttgttccccaacaccatgataaagaggatttatttctacatagtgtttgttttctatattatttgaacatatgtatatacatgctgtttcagtatcctcagagtgaagttaggatcagattccatcattccaggttttggttagcaacttacctgagtgcattgtaaatcagtgcattagccccacatctgttaaatgacttgagtttgctgaatctggtgtctcagaagaaactctaaagtggttagatggatattgatgttgatgttggttttgttaggtgtaatttatgtgaaactcctaaattccttgaattattagaaggcttttataggtcagcctgttgtctctgccatctttcatccagaggtaatggtttagctttagtgtgattgcaacagtgacttctgtaaatccctgcaataaataggaaaaaagaaaaacatttccaaatagtataggacccactgatatactatatgggccaaattaatactgttgaaaggggaaaacctgtaaatggttaacctgctactctgtcttcaaccgtctatctacctgattctggtggatgctttttgtatttaaaccagtaactcttctgagaaggcttctgttgtcctcttcttacctacttctgaccatgagtaatttctgggaatttagaaattgatagaaagtggaatactgtagggttttttgtttgtttttaaagtcgaatatattaggaggtgaggattagcgttgggggagataggatcagttgcccagaggctcccatatttaggtaaatgtatgttaatctgcatttgtaggcttgccaggaaatctaaccattatttagaattttatgtctttggaaaaatacttccatagtttcagatgaaaaacatctaaacatgttttggaatataatgtgtacataaattagtgaatgcctctttatgttgttcaaggttgtactatttgtagacaaacaaatctctaaacaattgtgactgttggcactaattgaccactctcaaccatgtctatttcttttctttctgtggaatttaatgttgcaagataactttaatatatgttctaaatgatagtagatgcttagtttttacagtgttttacaatccagtgacatcttagaattgaggagatgaggtaacatcttttatttccatagacaaaagataattcaattcagtatttcccacaagaattgaaggatacagatctgccagattccaaagtctgttcctcttaccacaccctctgcctccagggccagcttaaataaaagtgtcctctgtttaatttatgttttttattcaggtgccccaacttaagtcttaaaatactggtctatcagaatacctcttcacaatccgggctgtagctaactaagcttactagttggataatagctgattactttgattgttttgatggagcgaagagatgagttgatggttaagacttttaaccttcaattactatgggattttcggaaactctgaagagagtagctgaatgagaggaaaagatgatcaaatccaactgaatattgttcttatttagatttattttgtctataaaaagttcataataatgagattggaagtcttaagccatgccagttaagrgaattgggagatggagagctgaactttcagagtagactcagaattctataacccacaggatttttagtgtatgtgttggccccctgtttctattttctaagaagctaaggaccagaaggataatactttttctaaggtgatacaattatagcttggctagattcttttccattttctttgcacctatgtttgctgtagaagggaatattttgagaagtcgtttgaaattgttacttcagaagatgaggggaagttactttctaccacttagtttaaatttacaatatcgtaaatgttgacaattcaggcttagatttggaaacaaatagagcttttgtgtgaagcttgactcatttggaattatttaaaaaaattgtgtgtactggttgtctgtaatctccataaattagcagtataaattttaaaactttattcttttttaccttgtttgctcattcctattaaaagggaaatgttactgcatgaagacatgtaaaggaattttgtttatattagtaaagtgttaaagtattaatgattagttgataaccaagttgataatattttcttttggggttttcttttcttttttgtttcatgccttacagatttattagctgttctcaagtaaagacttttctccccagtatggtattcttttctttggtgatatctagctatccctgcaacctataaaatccttcaaatgcattgttttaaactttaaatattggtgctttgtttcactttctgtcccctgcctccccgccccacaatagatagataatgttgtagcgtataagatatacatatatatacaaatactaatgttgaaggtaaaattttatgttgttgcccatactggtaaaaaaattaaaatgtagtgtgatttttcaaaattctagtatatccacagcttaaattattgtttgttgctgaccaaatttatctttaggagaacacaggccataaggagttggagaaaaggatcataactggaaactcacttgtgaccaccatgcctaccacacgtttattatttgatgcctattcttaaaataccagtaacacctgtagactatacccagtttaagaaggtttattattaaagtaaattattatacatcttatttatgtaacccacatcagaaatggagtacagaactatgggaggcagcactcttgtccagttatattctttgaaaataagtcttaaatgtttctataaacaagagcaaagaaatgagttctgcaaaggatttcattagaggagaaaagataattcagtttcagtttttaaagcaattttcttttatgatgaagtatgacgcatcctgaaaaatataaatctaaagtatagtgaacacccatgtgactattacccagatcaagatcattgccactaccttagacgacctggtgtgtttctcaatcccttccaccccctgactttatagtgatgacatccttcctttttctcataggtggtaaactctgtgtgcattgctaaacaatacaatttagttttgcctatttttaaacttcagataaatggaattgtggcttttgtgtctttttttttctttttttgtttttttttttttttggctgagcattttctttaagattcatccttgttggtcaaaggattgttgacaatatgtacgtaagtaataaagttcagcaataatttttttgtttgtttgtttgttttagatggagtttctctctgttgcccgggctggattgcagtggcgcgatctcagctcactgcaagctccacctcttgggttcatgtcattctcctgcctcagccttctgagtagctgggactacaggcgcccgcgaccatgcccggctaattttttgtgtttttagcagagacgaggtttcaccgtgttagccaggatggtctcgaactcctgacctcgtgatgcaccctcctcggcctcccaaagtgctgggattacaggcgtgagccaccacgcccggcatttcagcaataatttggctaaccaggtgtcttattcacctgacggggttgcctgttcttttatagcgggaggtgcctctaggaaagagaaagggaaggtatttttcttttcacttgagatttaaaaaaattatctcaaggctgaacccttgaggtggagtcatccttgactagagtaactttgacaactttgttttaaggtactaattgtccagagatttaatttttctacagaaaccaaaaatacaagaaagtgggtgggagagaagagagagacatcgtctttaaggagacaaatgataatcagataaatgcaaaatgactggttttaaactatggctttttgtcaactattaaagtattgtatattaaaattggcataaagaaggcattggttgcttgatacttcttgaaagcaggaaagagaatactggaactggaggtctgagctgaggaatttaggaaaaccctgggcatggactgtttgctgtattgatatatttgtagagattgtcaatcctggttttgaggtattttgttgtttatttgtgtagatgtagcaattttgcatatattgcatttctgtcatagttaattctttgttgaagaaaaatttaaatctaggactgtctttcttcaaactctgtttagtcagccagtatttctacagaattcaaacttaatatttaaaccaagtgtcttagggtgggtatacgtactgtatcccatcttcacaaaatcccatgtgtacctgccagagagtaatataaatggctcaaattaggctctatttggatgatggtccaactgagtgatttaagctatttttaacgcctctagtgtatttcttgtagaattcctcaaatggagattcttttctgagatatattgactgttaagaaaaattccaggctggctgggtgtggtggctcacgcctgtaaccccagcactttgggttacacgagggtggatcatgaggtcaggagttcaagactagcctggccaacatggtgaaaccctgtctctactaaactacaaaaattagctgggcatggtggtaggcacctgtawtcccagctgctcgagaggctggggcaggagaattgtttgagcccgggtggcagaggttgcagtgagccgagattgcgccactgcactccagactgggcaacagagtgagactccrtctcacaaaaaaaaaaaaaaaaaaaaagagaaagaaataaattccaggcctacttctctcagaaatcacaattgatcatctgtgtcttacgtgagaggtctaggtacaggttttattaatacaaaacaaactaaattttacttaggactgtttatttggctaactaggccagagccattttgaagattttaacacctgtgcatgtaaaaacactcaaggagacttaagttatttgttctttgccaaagttggtaaggtactgttatgattatttaaattttggtgctcatttttcctctaatgaatataataataacttactactattattgtagggaggcaaaagattctttaaggcaagaacatttttctaatctttctagaatatcctacacagtattaggaacatagtgagtgcacagtgaatattaagacagatcctttatctttaatggtaaccacattttatgttttggtcataatagtaatagtacagtaagtctctgttgtgcaatactttgaaattttggatttgactgtgatgtcagtaagatcacatgtgcagtgaacatcataatcccagtttcaatacacatgtcatattattctttatagaagaagggaagagttgatgaagaaaagggataatgcttatggaagaaatggtatatgtgagcatcatgacagccatcaacaattgggagatgaatggctggatggataacttaggaagaactttgaggaagattttagtttcttgagtatttcttccaagtacaagtaactcttacagaggtctgtctccagtgttaactcactagttagggaacattgaataagagaagacagaccagttaatatacaaaaaccatatgagttatgaaagttttattatttttcaaatgagaaatgaaaaaagacagatgacagcaatagaagtaaaattcacaagatgccattttaattgaacttgagaaatatattctgatacgaaggaatagtaagaattgaaattatcattgcatacataggcattagttagaatatactaaattcatgcacatgatgaatttgggtggggttggattaatgattcatttggtttcatggctcttgatttaactttatgattatagttaattaatatgcaaattaagcaacactttaggaaaccatcacagctctgactgatctcatttaaactttcccataagaggttaaaggatactaaataaaaatactcattagggataaaataagttgcttgtcttcattaaagtgtctttgcaatggaaatagctttgttcttgtctaattactggagaggatcattgaatattgtagatattgtgggttaaataaaccagataaagtctttattttcttttattatgcattgaatcctgacaaaatggtcagctctttagttatagaatcattccatgtaataatggcagtattcctgtgaatcctaaaacagtatgctgtaatgatctcacaagatgtttttgcttttaaaaatgtgtgctgttttaaaaacaaatctttgtccatcagtgtgcctttaaaaaaatctattacagtgagcagggtttgttgaagacattgacacttaaagcatttgcacggggcgcggtggcttatgcctataatcccagcacttgggaggccgagataggcggatcatgaggtcaagagttccagactagccagtttgagaccagcctggccaacatgatgaaaccctatctctactagaaatacaaaaattagacgggctgaggcaggagaattgcttaaacccaggaggcagaggttgcagtgagccgagattgcaccaccgcactccagcctgggtgacagagcaagactctgtctcagggagcggggggggaacattgcatatgctcttaatttttaaaatttaataaccttgttccatataagtttaattgcaatcccaagatgatttttactctagaccatcgctaaagaaggcttttattttaatatgctaagcagctttatggcatttgaaggaacaggataatgaaactgtgaagtagatgaaataaatctaatcttaaaactgtaaaggccagtcataagtcatgagtttgaggagcaactaaaatctttttaaataaggatttttttctaaagttgttaaaatgaatcagtcacttcattagaaaggaagatcttttcacctgtttaaatactttattttggctgttaaaataatttactgcatttcaatgaagtgtcaaatagaaacagctgttatatgaaaggttttccttttggaataatcattctggacatttgaaaagagtatataacattaagtgatgttataactgtgtaagaatcacaacataatatacagttataaataaattttaaataaattgaagtatatttaacatacaacttgcatatataatgggctgtcatattctatatataattataaaacttaatgataaatacttgtgaacctcctagccaaccacaaaaccagaacattaccaattttacatctggctgtgtttcttctttagcctgtcccctacattatgctgaattttgtttaacgtttcccattgctatcttttaataaaactctcatatgtatatatctgtaaaccaagcttgtccaccctgcagcccagagcggctttgaatgtggctcaacacaaatttgtaaactttcttaaaacattaggagtggttttttttttttttttttaagctcatcagctatcgttagtgtattttatgtgtggcctaaggcaattcttcttccactgtggcccagggaagccgaaagattggacacccctgctgtgaaaacaatatattgctaatttttgctttgtttggagcttaaaaaatggtattagcttatttatcctcctctttgactttcatttatacatctgttagttgacagacatttgaatatccagttttttttctattgtgaaacatgctactatgaacattaaaactgttttctgatgcatatgtgtggatgtttgctggggtatatacctgggagtgggattttgtcaaaatatgcttcagttatttatgaaaatataccactccaaaacttagtgacaaaacagcattttattatttcacaattttgtgggttgagtggggagtccttcagcttcatgtgtcagctgaggtgctgagatgattgtagtcacctggaggctcaataggctgtagtcagctgggactagaatgtttgggatgcctggacagctgagagtcatctggaatcttgttccattgggacctcagctggggcttttggctcctccatgtgactgcttagtctgcctcagcattgcagcggggttctgagaaagaacatttcaaagggggagaaagctgccaggtcaactaagggttaagcttggaatagacacaagtaacttcagctatattttgttgttctcaaaatacacacagacctagctcaatgttgagaggagatgcatatacaggtaggggcagaattgtttaaggtcatctttggaaacacttaccacaatgtgtttatcatttttatctcccgtaaaatatctgttcatgtctctcccaaagttttagactgggttgtttagtctcactaatttagtaggaggttatatgtatatgtattttgcatcctaagtctgggttaaatttgttgcagatatcttattccagtttgtgcctaattggtccttaaagcaatcctattagatattttattgcccccattttacagatgagagagtactgcttagtatgttaaaaggaaaggccttgaagtcagcctccagggtgacatttttgttacaaagaatagcatttgcaaaggtgtacaattatgaatcagcatgatgctttgctcaacctacctgttgtaccccttcccctccaaataattgaggcttggaagaatttacaagtatttttatttacttataaatttttatgtaactgtgacttttgctatgagtggactgaggacgtttgatgtgagaggacttgcctggagtgacagagtaggcagtaagttcagccccaagttctttctagtcttatctgccctccttattcctcaattttttttccctaaattattcgtttggatcaaccaggttctgccagcatattcaaaatccatcttaaatgtagtggcgaaatattttgcaaaattataatagaagccagagatttataattaatattcaaatgtttgcattatatactttaaaaagaacattgcaggtcgggtgcggtggctcacacctgtcatttccacactttgggaggatcacttgaggtcaggagttcgagaccagtctggccaatatggtgaaaccccgtctctactaaaaatacaaaaaatcagccgggcatggtggtgcatgcctgtaatcccagctactcgagaggctgagtcacaataattgcatgaaccctggaggcggaagttgcagtgagctgagatcgtgccactgcactccaacctgcatgacagaacgagagtccatctcagaagaacgctgtaggcacgcatcaagtacaactcagttggtttaaactgaaatgccacagaacaattctgaattccaaaatgcaaagctttggataaaacagcctgaacaagtacaaaaagacaataaatttgtagacacttcttcccaaccttcaaattaggaagatttgttctgtgtaaaagtatagtttctgatccttaaaattctatgtgttgaaggcacctcagcatatctctgcagtgtaaaagcagtgcttcaggcagcatgacttattttcatgtcacctcagatttcttggatctaatattcaaagacagagtggaaataataatacttagtggaaggattcttggacatgtaatgaaatgcagagcatcttgagacttttgaccaagtaatgtttggtcatttaccttcctgtttggttggaacaggagtggtgattccagccattgcatgattgagcctcatttgtttttattctttcctgccccgaattcttccattttaagtgtcttaaagaggtagttattcttgcctaagaagtaaactaaagtataacatatttgctataataatgctgatataatgttactgtgataaagtataagtgtcaagtagtttggcaaaaagatttcaccaggttgagcatagtaacacagggaaaatgagccatttaaaacagggaaaaaaaatgtttctgtgaaaccggggagaaaaaaacagccatttttttccctgttttacaaatgactcatttgtaaaatagggaacaaaatgagcccatttaaaatttaataaatgtatttttaacatttgtattctcaaaataaattttaaaatagagtataccaaacatgctattctctgaggagtttaatgcatgttattattttacagaaatttaagttattttaaatatgtaaaggatggtaaagcttccctatagttcagtattgaccacctctcctcaacctgtctctaaaggtaggagaaaactgatttattctccttgtattctcttctttctctgctccgtcattagtttgctgatattttctgttcggaaagggggtgaagaaccttcccccctttgagggagataagttttggtttccctgtaatatggaacaaacttcatacctggcgagcacaaagaaattattattttgccaaagtatgttctgcagaccacatattccagaaattacacttctaagcaaaataatstttgataatttgaatttgggaaaaaaactgcttactacattctttgatactgatatgcaatacacattaccatgttacagtcttaagaagttgttcagttaactgttaattttatttaatctggtatttaccgtatttaatttatgaatcactgtaagattttaatttttttttaattaatgttccatgcaattcatggaaaagactgatgtagatgttttatttgatagatgaggagcctgaggcctaaggctaagtaactttaccaaagtcgtagagataataaaactaggactgactttcttcagtgttttaaatctttttatttgtttatttgaattactgcattaggaacaagtatatccacattaggaacatactttttttttcaaatgggacagttgagtatctgctcattgatagcatcccccctgattctcctgatttgtcttggtgactaagttgagtattataccactaacttctatgatagttaagttctcaggcctgtatacattgcttattttgagtgattgttttattttagtttaccttgtgctgttgctttccaccgagactgtcctcagaaagttggtcattttgcttatgagtttattagttgtccaaccactttggctctttcatcacaccaacttgtgggccatgggatattattactatggataatgcttgttagttatacattttatatttatagtatatgactatgggtctgacttaaacgtgtattatgtatttctatatctaataattgttagaaatcctctttatatagtataatgcataatcatatgtctaatttagataatatctagtaacaataaagaaatgtaaatataacatgtttacatataatatttattggagatttgtttctataatatatgaatagttatgccggacttaaatatatgttatacacgttgtgcgtgcgttatataaagagaaagaacacttgtgcccatcccttctgcctacattatttagatttccatctctattgggcttagctgagcaaagtgtcaccggatagttttaattgatcaaatatactattttgtatgtgatcttagatttttttttcagatttttttagtgccattaaaatgctctaacagcctcttattttgttgtaattttttttgttgtcagttgctttttcttttttccaattagtttagtaaatgtcctttataaatcagaatagaccctcctttttcaaatggatactgataaaaattgacagctgtcactgccagttaaggcagaaattaagagatggtactaaaataggaatcctgttttcagttaatgtgtgtttaaaagttttgccctgtgtgttcttttttgatttgcacatgcatctgactttaaattggaagatgcagagtagctctaaggagtcttcaagacatttttgcagcctttaaacaacctttggttttctctctgtgttgctcaaagtagagagacaggtactttgttatctgaagcttatgacatgctctctgcttcaatcaaaatgaccacccatcagttgcaagagcagagagagaggtttgtgagagtagtctgagatccagttgcaactgtacagtgtcacatttatggtggtatgacatttgtgagtctttcccttcagagttaacctagtaaaaaaagttattctcatatatcattagtaatccttatgaatttctatcattgttttcctgctgttacttaaacactgataggaatttatgtaatcatattaggcttgagcataactctctcatgagtttccatattttaagttataaaattggctatgtttaatgtgattatctagacagtgctcgtgtgtatcacttggtgagattgaatttaggctgtttttttcgttctattgaagggggattttttttttccatgtgttacttttaatagagttcatcagtctggcatccttttgtttttgatcctgccactagatggcaggagcaataaaaggtagattgaaatgccaactttagttggccttagctgctttgtactttaccttggttgttctctgtccctattagtgctgaattttgggtatatatgaagtgttgcaaatagtggtacttagtcctataagaaagatctggtaccttatatagcctgagagggcctactaatagggtaaaggagaaagaatagaataatccttgaggtgttctaacactttgtcttttgccttttacttttctatttttcttctccctttgttgaattgtactcctttcctttatttcctgattgtggtttttgggtgttttttgtttgtttgtttgtttgtttgtttggtttttgatagggtcttgttctgtcgcccacggtggagtgcagtggtgtcatctcggctcactacaacctccgcctcccaggctcaaatgatcctcccaccttagcctctcaagtagctggcactacatgcgcatgccaccacgcctggctaattttgaaaaatttctggtagagacaggttttgccatgttgcccaggctggtcttgaactcctgggctcaagtgatccacccaccttggcctctcagagtgctgggattacctgcatgagccactgtgcctggcctctttcctgattcttttatgcttacgttagcatccataattggtcatttctgttggtggtactagtcgctttctcatttaccgttcccacgaatacatgttaacttggccagttttggtagtcgtatgtgtaacaacaaactgttataggtggctttgtaaatctttacagaaagggttattttcaagagagcctgttaattgatagtctttgaagaacagagtgatagacagagtctagggtgatgggatgttgcttccgtgattatgtgacgttgtgtaaaactttgtcttaccagtagacttgcaccagagactccttgctggcattataagataagcagccctgttagggaagcctatgtggcaaggaactactaacagcctctatgatgtttccaccaacagccaggaagaaaccagggcccctcagtcctataacctcaaggaaatgaattctgctagaagcctgagtgagcttggaagcagattatttccctaatttagcctccacataagaacccaaccctggtgacatcctgatgtcaaccttgtgcgaccctaaacagaagatccagctaaactgtgcctagattcctgacccatgaagctatgatagaattagtatatgttggtttaagccactgagtttgtttaaaattgctgtataagcaataggaaactaatacaaatacccttcgtaaacctttctttccatctctgaatgttactacctaacttctctctgatctcatgtaatcaaaaaatattgattgaatacctcttacttgccagggactatggctacagtattgtgaacccaaatagacatgattctagtttagtgagggagttagacttgaaccagtaagaatgaccaatgctgtcaaggaacatgatacaatgagagcttataatagggagataaactaaacacattgtctttttaggaatccttatttgacttttaaaaacttatacttactacattgctttcttacctttttttttaaagcatatttctgccatcacaaaacttgttctatctttattttctgttagcattatgaaaactacctatgtgtattttttaacccttacgagtgttctttcctctctcaagaacacttctcctcttttcctgcctttttgctcaataattcatccaggtttaagttagatgtcagttgtagaagccatccacgagtcctttggacagtaagctttgtgaggacaggtccgtcctgtttgctagtatctttagcacccagtgtgatacataagataggctcttaaaaccaaataaggccgggcacggtggctcacgcctgtaatcccagcactttgggaggccgagacgggcggatcacgaggtcaggagatcgagaccatcctggctaacacggtgaaaccccgtctctactaaaaatacaaaaattagccgggcatggtggcgcgtgcctgtagtcccagctacacgggaggctgaggcaggagaatggcgtgaacccgggaggcggagcttgcagtgagtcgagatcgcgccactgcactccagcctgggcgacagagcgaaactccgtctcaaaaaaaaaaaaaaaaaaccaaataaaacttgatagggaggaactggaactcctgtacattgctgatgggagtgtaaatggtaactattttggagaactgtttagtatttcttaaatacgtgtctactatataactttggagtggaattgctaagtattcacccaaagaagtgaaaacctgtgtccttaaaaaaggcttttacaagaatgcttgttcatattttataagaatgaatgtacagccttattatttcctcccccggaaacaacccaaatgcccttcagaaggggaatggattgtagtatgcattaaatggaatactactcagcagtaaaaaagaataaactgttggtatatgaatatatctcaaaaacatgttaaatgaaagaagcctgattcacctttttaaaaagtagaattacgattattccatttatctgaaatccgagaacaaacataatgaatctatggtgaaagaagtcaaagtatgcttggaaagaagtgcctaaaggtgcatgtgggaactttcatcatgagggtgatgttatgcatacagttgtcaaacctcatctaatgaaacatgtcaattggtgtattttaaagcatctaaattatactttagattttaaaaatgaaaaaaaatgagcgaagaaggtatcctttagtaccccctgggttctctgcttaattatattttcttgttgcctcttcctcctgtgagattgtcagctctgtgaggtcagggaccaagtttgcctgtggttcttagaattgtgtacttgtatgcagaatgcccaagtttattggccctgaagtgaatagttatttgagatctataatctattcatagattatatccatattttatggctgcatttttaagaaaaatatttgcattattacagaatcttacattcagtgtttttctttatgtagcttctagctttttctgttctaggattcacaaaagacatctgtttaagtgttggtagagtagtcttgctccaactacaattttgccaaccacagtttgagatagcacagtgctatatttgtaaaccaaagtttaaaaatcagattttaagaaacaaattgtggtttattttattctccttaaaaaaatgaaaactcaatattaatcttgttttcttgtgaatcccttcctgccagttcttaactttttgagccaatggaaaaaatgagccttggtcatttaatctttttgatcaaaagcccttaaacaccagagtaatttgaaaaagaaccaggtggttacatagctttttgtctaactagtactatctctcgttgttgttgtttgtttttgttttgctgttttgttttccctgatgaaaataatactaaattttaaatgatttaatggccgtgtcaaaaacttgaaagataagtgtgtagatagtctgaatttcccaaaaccgcgtcagcagctccaaggtgtaatttctctgaaactttaagaaggtaactcagagcagatttttcagtgctggtgagttttaatttattcatcaagtagatggctttttattgtgatttatgttggaggtcttctaaaaaataattttgaaattctgcaaaacttttatgcacwcttttctggtaagagaatccatattttcatcagattcttacagaccctcacccagaaagattaaaaaccctgcctttacctctattttctctaagatttttattttgccagctgctggttttgccaactttaagaaacataacagccctaaagtcaacaagaatttattctatagtgattgtttacctatattgaccatcagtatgtatttgatatgtttgttgggtctgttttcttcatgattgtttttactctctttttgaccttcttgggtgcagaactggatcataattactggattccactgactggcctctctgcctctgtgttccaaaccattccagacatataagaatgatgaaaaagaaatattcccatcagcatacctggtttttgttttgcaacctctggttagaatatacttgttctcaattatagtaccaattttgtggggaatatatatccttcttggcaagatgtttaggaatgccaaaatctaaaactgtgtggctgcatgcatatcctgtcacctgctcacttactctgtgctgcctctatttcaaatcctcttgttattcttgaggtggttcctagctataaaaacctatgaaaagataaaaataacatgattcttgcaaaaaattgttaggataagctttatatttaaagaaaattcatgagtctgcattttgatatctgtattctattttaagaacactgttagatgttgatacacttaatcaaaacttaatttgattaaggaaatagcgttnnnnnnnnnnnnnnnnnnnnnnnnnnnnnnnnnnnnnnnnnnnnnnnnnnnnnnnnnnnnnnnnnnnnnnnnnnnnnnnnnnnnnnnnnnnnnnnnnnnnnnnnnnnnnnnnnnnnnnnnnnnnnnnnnnnnnnnnnnnnnnnnnnnnnnnnnnnnnnnnnnnnnnnnnnnnnnnnnnnnnnnnnnnnnnnnnnnnnnnnnnnnnnnnnnnnnnnnnnnnnnnnnnnnnnnnnttattttattgatatataatattttacatatttaatggtgtacatatcatattttgtagcatacatagaatgtgtaatgatccagtcaagttatttaggggtatccatcttgagtatttattatttctacgtgttgggaacatttcaagttctctcttttagctactttgaaatacatagtarattgttgctagctatggtcaccctactctgctatacaacattagaatttatgccttgtatctaacagtatttttgtacccattgaccaatctctcttcatctctgcttctctcctatccaccatactttgcctagcctctggtatctgtctacctcactgagatcaactttttttttttttccgttcccacgaatgagtgagaactgtgaaatttgtctttcagtgtctggcttattttacttaacataatgactccagttccatccatgttgctgcagatgacatacttttattctttttatggccaaataatattccattgtgcttatataccacacttcctttattcatttgtctgttgatggactcctaggttgattctgcatcttcgctgttgtgaatagtgctgtagtaaacgtgtgaacgcacgtgtccctttgatgtactaatttcttctcctttggataaatacccagtagtggggttgctggattatatggtagttctatttttagtttttggagaaatctccacactcttttccaagtggccatataatttatgttcccaaagcaatgtataagagttctgttttctctgcacccttgtcagcatttgttattgtctttttcaataatagccattctaacttgggtaagatgatacctaattgtgatttttatttgcatttctctgatgattagtgacgttgaacattttttcatatgcttcttggccatttgtatgtcttcttttgagaaatatctgttcatgtcctttgcttattaatgtgatgatgatgatgatttactgttgtgtgagttctttctaggttctgcatattagtcccttgttgaatgaatagtttacagtatattctgtctttcagtaggttgtgtcttcactctgttgattatttcctttgctgtgcagagttttttggtttaatacagtgccatttgtctctttttgtttttgttttctgtgcatttaaggtcttagcataaaatctttgccttgaccattatcctaaagtggttttttattgttttcttctacttttatagtttgggatcttatgtttaagcctttaatccatcttgagttaattttgcataaagggagagagatagaggtccagtttcatttttctacatatcgatatnnnnnnnnnnnnnnnnnnnnnnnnnnnacatatcgatatccaattttccccagccccatgtattgaagactatgtcctttccccagtgttcgttcttgaagccttcgttgaaaatcagttggctgtaaatatgtggatttacttttggattctctgttctgtgccattggtctgtgtctttttatactaaaaccatgctgtttgggttactgtagtcttataaaatcaggtagtttggcctccagctttgttctttttgctcatggttgctttggctattctcactcttccttggttctttattaatttcaggactgttttttctatttctgtaacaaatgacattggtattttgatagggcttgtgttcaatctgtatgtatactgctttgggcagtatgctcattttaacaatactaatatttccgatccatgggcatgggatgtctttccatttgtttgtgtccctttaattcttttatcattgttgcgtagttttccttatagagatctttcacttcctttgttaaatttatttctaggtatatatatttttatttttatttgtttatttatttttttgagacggagtcttgctctgttgcccaggctggagtgcagtggcgcagtctcggctcactgcaagctccgcctcccgggttcacaccattgtcctgcctcggcctcccgagtagctgggaccacaggcgcccgctaccatgcctggctaatttttcgcatttttagtagagacagggtttcactgttagctaggatggtcttgatctcctgacctcgtgatccgcccgcctcagcctcccaaagtgttgggattacaggcgtgagccactgtattttttatatctattgtaaatgggattgctttcctgatttctttctcagctagtttgtcattgacatataaaaatgaatcagtacatgatttttatatgtcgatttcgtatcctgcaactttactgaatttgcttattagctctaagagttttttggcagagtcttttggtttttccaaatataagatcaggtgatatgcaaagtgggacagtttagctttctctttttcaatttggatgccttttacttttgtcctcttacctgattgctctggctaggatatccagtagtatgttgaataggaatggtgaaagtagatatccttgttttctagttctttgtggaaaggctttcaacttttcttaattcagcatgatgttagctctgggtttgtcatatatggcgtttattattttgaggtgtgttttatgcatagtctgagagcttttatcatgaagggatcttgcaaattcaagattaagttcaaaattaaaaaatcaaatgttttctccttattgagatgatcatagggtttttgtcttcattttcttgaagtgatgtatcatatttattgatttgtgtctgtcgaatcatccttgcttccctggtataaacccatttcatcatggtgtattatctttttgatgtactgttggattttgttgagaaattttgcatctgtgttcatcaaggatattggcttttagccagttgtagtatccttgtctagttttggtatctgggtaatgcctcatagaaaaagttaaggagaattccctccccttcagttgtttggaatagtttgaggagaatagatgtgtgtttttccttgaaagtttggtaaaatttgacagtgaagccatcaattcctggacattttttgttgggagaacttctattactaattctgtatcattactcatttattggtctgttcaggtttttttttttttaatttattcttgattcaatcttgataggttatgcttatccagaaatttatcagtttcctgtaggttctctagatagttgttcgtagtagtctctgatgatcttttgtatttctgtggtactaatttgtagtgtctttgttttcatttctgattatagttgggtctttctcttttttcttggttagtctaggaagtgccttattggtttttttttttttaaatcttttcaaaagaaccaactttttgtttttgtttcattgattcttggggtgtgtgtgtgtgtgtgtgtgtgtgtgtgtgtgtgtgttgtctctttcatttagttctgctctgattttcatgatttctttgcttctgatttggggtttggtttgttcttttctagctccttgaggtgcattattagattgcttatttggagtctttgtatttttttttttatgtaggtgttgtttattgctataaacttagcatggtttttgctgtttcttataggtttgggtatgtcatgtttagatttttgtttgttccaagaaattttttttattttctcctttaaaattttttccttcacccagtggccatttgggagcatgttgtttaagttccatgtatttgtacagttttcaaggttcctcttgttattgatttctcattttattttgttgtggtctgagaagatacttgatattgtttcttttttaattcgttaagacttgttttgttttctattgtatggtctatcctggagaatgtttcttgtgctaatcagaataatgtgtattctgtagctgttgaatgaaatgttcatgtcaagtacattttgtctaatgtgcagtttaaatccagtgtttctttggtaactttgtctacatgatctatctgatggtgagagtggattgttaaaagtccccaactattattgtattggaatatatctcttccattaaatctagtaatatttgctttatatatctgggtgttccagtgttgggtgcgtatatgtttagaattgttatttcttctagttgaatccacttatcattatataattaccttctttgtctctttttactgttttttgacttaaagcctgctttatctaagtgtaggtactcgtgctcacttttggtttccatttgcattgaatatctgaatttatttccctttactttcagtctatatgtgtcttcacaggtgagataagtttcttgtaggcagcatatagttgggtcttttatttttttaattcattcagccagtgtatatcttttaagtggaaagtttaatccatttacattcaggattattattaatatgtgggggtttattcctgtcattttattaattgatttctggttattttgttctgttctttctctcataatttatctttgtggtttggtggttttctgtagtagtggtaacatttgagtcttttctttgtatgtgtgttgctttgccagtggtttttatatttttgtgtgttttcatggtagtagatattgtcctttcacttccagattaagtactcccttgagcatttcttgtaggctagtgtagtgattatgaatttccttagcttttgcttgtctggaaaatattttatttctccttcatttatgaaggataatttgctggatatagtatcattagcaatttttttttctttcagcactttcaatacattatccctttctttcctggcctataagtttctgctaagaaatcttttattagtcttatgggggtttctttataagtgactagactcttttctcttgctgtttgtggaattctctccttatgtttgacttttgacagtttgactgtaatgtattgtggatagaacattttgcattgtatctgtttgcagatttctgagccttgtgtctctggatgtccaaatctcttgctagacttgggaagttttcatctattactttgttacataggcttttaaaatcttttgttttctcttcaccttctaggacactgaaaattttaatatttgttcactttctgttgtcttttatgaagactttgttcatgtttttaaaatttatttctttatttttgtctgactaggttatttcaaaagacttgtctaagttctgagagttttcttctgccccatctagtctgtcattgaaggtttcatatatattttttatttcattcaatgaattcttatgttctagaatttctgtttggttcttttttatgatatctacctcttgagtaaatttctcattcatatcctgaattgtttttctgatttctttatattgtttttcagaattctcttgtatcctactgagtttttttagaataaataatttgagttctttttctgggattttgtgaatttctttttttttcaaaattttttattttttaaaaaaattttatgggtacatgataagtatgtatatttatgggatacgtgagatattttgatatagacttacaatgtgaaataagcacatcatggagaatggggtatctgtcccctcaagcatttatcatttaagttacaaacaatccaattacattcttttttttaaaatatacagttaggttattattgaccatagtcaccctattgtgctatcaaataggtcttattcattcgtgctggaatttttttgtgtgtgcccatttaaccatccccacctccccaccaaacccccaannnnnnnnnnnnnnnnnnnnccaccaaacccccaactactcttcccagcccctgttaaccatctttctactccctgtgtccatgagtttgttgtgaatttatttttttgattgggatctgttgctggataattactgtgttcttttggaggtgtatcatattttcttttttatgtttcctgtgtttttactttggtatctgcacatctggtgtaatggcattttttgacattgcttttgttggagagaattttttcctgaagatatatgtatggtgttggttggatatggcactttggtattgattctgtgtgtgtgtggtagtgtgtagtctccatatgattttctttttttctgtaaacagcattagtgtgtctgtgatttccccaggggcttaagatgtggttgttagtggaggctgtggtgaagttttgatggggtcagggataccaggtgtaacagtcttttggacccagtggtggcagcagtgaactgagcatcccctcagtgttttggcccgagggcagcttatgccagtgacagcgttcgtgcatccaggctgattttaggcctccaggtggcctgcttaggtgctgggattccagtggtgggtcatgcaggggagggcagcttctcgagcccctgggcagcaggtgtagcatgggtgattgcagtagcagcggtggacaactccctggaacctaagtgtctgtgctggtattgtggtggctgcaatgagttgtgtgggctggtccccagacctgcaggtgatgcatgagtatgggtcctagctctgctggtagtggcaggttaagtgggcctgacctcagaccctgggagtagtgttcaggtgtcactggtggtggacttagtgaggtgatcaccagagatcatccacaccttggattgtgtgtttgggtacttgctttggtgggggtatggagctagctgggtggaccggctggcagtggtaggcaagggaggggtgatccccagtttgtgggtggaatgctcaggaggggccagcagcaactgcattgcaaccctgctctactagggaaggtggggttgctttccttcagagtagctgtaggctggcaacttgggggcggggcatgggtttcctgccttggctctgcagcagcctgcagccctcaagtggctgtaagcaatggaatttgtccttagcgcaggtaaaaattcacagtcgccctctgctggggtgggcagtatcgctgccttgtagtggccctggcagcaggatgcagtttaatggggcctgtgttctcaaaatggcaccatgttgtagctgcttaggttcgagtgattcgtgggatccagcatgagctgtctctctggagcagtgctttcgcgtggacttcaggcagctccctgttagtcttgggacctgagagggtcaaggagctctcctgtggctaggattttaggagtcctagtggttccagtgggaatgtagaccttagggggtctctcaccctttttctgcattataagccactccagcctcctacctgatcccagccgaacaggcttgtttccctctttttccttgcttttgatgcttcccatcactactctcttgaatttcattgttctctctcaggtgatcttttttactcgctattgtggttcctctccatagatgagacaagtaccagatacatytagtcaactatcttcagcattgatttttattggttttgattgcttatctaaactagtagagcaaattattttagtatgcatggtgagtgcctttaacattcagtcatttaacaaatatttattgtgtgataactatgtgccagacacagtactaagcatttgggatatatacaaggatctttgttgtgatggagcttatttttcagataggcaagcaaacaagtaaataaaaagatcaagataattttagttagtgataaaggctattaaaaaagtaatatgctaactagtgtttgatgtgtttgtagaccatggctatggggccactactgtagattgagaagtgaaagaaggcctttctgagataatatttgaactaaaatcagaatgacaaggaattagggccctgcaaagatctgggttaagagcattcctcttagcagataaaaagttgatatgttgaaggaacagatataatgcccctgtggccaggatagagttagaaaagtggtgtgaatagtgttaggatagagccagaacaagtgctgaaattggtaattgtggaaattagacccttattcagacgttttttttgagatggagtcttgctctgtcacccaggctggagtgtagtgggcgcgatcttggctcactgcaacctccacctcccgggttcaagcaattcttctgcctcagcctcccgagtagctgactgcagcaggtgttttccgtttctgtatacaatactaaatggttctgtgagtgactgttgatgaaagacttcagaggccagaacatgaaccgggacccaaacagcattgaatatcaagtatacgggagtattccctgaatgaaaatttaattaaaccagttacactattttagtgccctctatctgaatagtatatttctatataaaaaaaatagtttaccttagtaaagtgggaatgtttaaacatttcacatcatttacaacctcacactggcactaaatcactttgctcgggcgacagttgtgtaaaaatgctttaaaattgggtcatatataaaatagttcagaggagctttaacacatattttattaactttactatatataccaggcaccgtccttggtgctaggagttggaagattgattccttcatatttgcccagaggcaaaatgatgtgaaatagacccctggctttgctgctttgacttgtctaaccttgagtaagagcaggttacttaacctctttgtgcttccatcttctcatctgtaaatagggaatgacaataatatacatctcaataagttgtcataaagatcaaattattaataacaaaggtatttaaggcataataaccactcataaaatgttaacratttattgattttgttgttttcattattctcttaggctgggggtttcttttctcaaggaccttccaatccagtggaggagacaaatctgtaaatcaatgctatttcgtatattagattggaaaaggtagaatgcaaggtgcaaagttcatcagggttacgtataaaggaaggattgccaataaaaagtaaaatgagattttttaatttcagtgaaagaagagaaacaatcatactttaaattcctgggggattagaaagtacctgatgaccagaaagaggaagagattccgaaccaattgttaaactttaaatcccataaataatttattcaaatcaaaataccaatatataataattatggtgataataatggaagttctgtatctcttggaagatgttgcaaataatggacaatagaaacaataggcttaaccttttaacatgcctgcctgtcttctttccttccttgcattctctcattctttctttttcatgagaaattggtactttgctttctctcagattagttgttgatccatgtataacgtgtattacaaagatgaactggcctttttagaccaaatagaaattcctgtttcttgtttttatatctcagagttgtaaaagcaggaaggaaaaattatgtgagaacaaatgcttttccatttcttcattctttttgttacacttagtattcaaatgatagcaggcagacattatatttctcattggacaatctcccaagtagttgtgtaacattatgtgacaaacttggctgtgatcagaggagggattgagataaaataagcatttgttggttgaaagaggaaggaggtgttgtacatttttttgataatgaagtgtacacatacttactcataaccttgtaagaactaaacttcggagaagtaaagatgacaaattatagcttactgagaagagttcagttatctgaagattgacagtggttgaattggttaatataagaagtatgagaaaggtgccaaaaaggagagaaatgtgagctagagatagggactacttggctttgtttctttgtgatagtcacacttattggaggatttgtttggtaaaaccaacaattatgtatgacccttgtaaggtggtgagtgaggatggttgttactggtcaagcagtacttaataaaggtttctggccatgattttttaagacatacctataccaaagaattgaaatctgaaatggtacagtcagacatatattagacttctctgtccttttatttccaaagtaactttagaaagggcataagctttaaggttcaaagttgcatcttaacagatcttaagagaactacaccagtggtttttgttttagatattttaaacatatatagatatagatctatagatacgcatgccattgttttcaaatacttgtttagcatttgaatcctttcttcaaatgagtttgtacaaaagccccatatataaatagacaaataggtaaggttatataagatggtaccatatgtcattcaaaactgtgtgtccattctggtaccccactcttgtctggaatccctgagatactgggaacagtttgaaatctttaaggttcgcagtgcccagaaggtgatacaaatgatttacctgcattaattgccctgttgctgtttggaatcaccttgtgatcatgcttaagaatgtgggcaccagagtcaaagctaccttgatcaaatcccatcttgaccacttcatggctgtgtgactttggacaacttatgttacatattgtgccttagtctaatcatatgtgtagtgtcctgccgcaaaggagtgtgtatgtgtgtgatgattaaatgaaaaataggatcatagtgtctgacatgtttttttaaaacaataattgtgcagaagtagtgtacacaacataaattaccactccccttcttgaacatctttttcttccttcagcacaccatttctccacctcaaggcctttgcacttgatagtttctttgcctaggacagctctttaactctttgaattgctggttacccccatccttaaagacttcacagatgttttaagataggacctcatttataccctgcttacagcaatctctaccccttcctccttcccttcttcccattttactcttttatttatctgaatcttttctcctctactccccccagctcttgtttcaaactgtaattacctggtttgtgtttattgtatttaagttccaaaagagcagaatttgcctgtctttccagtgctctatttccagtgcctaacagaaacctggtacactatggttgctcaaggagttttttgaaaacatgattattaccttgtaaaaatgaaaacaaatcaatgtcagatatagaataaccacctttagaggcacatttttctaatatcttgtcatgcaagacttcctgggattctcttaaagctgtgctgtcaaactgtcattatgctctctctatccatgggagacaaccctgagccctcacttggagtctatgtgtggttattttgatagatagaaactttagttaacctgtttctcaactcagagcaaattaggaccctggctttgcctggccttaagggggcactgtgttgaaatgtaatacttggtacagtgctccacctcgctgccttttgctgcacctctttaccctcctttactactaatatttgctgttcttttatcaccatcattgatcaaagcttctttcctcccttttcttattttctttctgttcctgattgattcttttctgtttgttggatttaatttgcaaaggttaaactaaaccagatttgtgttgtcttgttaaaattacatttgtgaactgaacatttttggaatgtgggacatgtttgtcgctcattgtggccacagcattatggctaacaatatattgttcttccacttaatttattcttaggcatttctaattattaatatttctttctgatacggtgtcacttttaatgaggactgaaaatgttaattaaacatacgaaaccctttgccacctcaaaatttgttttgaagatataaaagccttaggttaattttaaggctgagatataatttttaattttttataattatgggtacrtaatagatttatctatttatgggttatatgtgatgttttggtacaggcatacaatgtgtagaagtcaaatccaggtaattggcatagtcatcacctcacgcatttatcatttctttgttttagaaacatttcaattccaatcttttagttattttaaaatatgtgctaaattatttgttgtgctatcaaataccagatcttttttcttaaatactagatcttattcatcctaagtatatttttgtatccgttacccctccccacattttgcccccctctctaccacccttcccagcctctggtaatcatcattctgctctctatctccatgagttcaattgtgttaatttttagctctcacatatgagatataacatgtaaaattcktccttccatgcctggcttattttacttaacataatgacctctccagttccatccatgttgttgtaaatgactgagtctcattcttttctttatggctaaatagtactttattgaatacaagtaccacattttctttattcattcatctgatgatagacacttaggttgcttccaaatcttggctattatgaataatgctgcaataaacatgagagtgcaggtgtctctttggtacactgattttctttctttggatatgtaccaagcagtgggattgctggattatatggtagttctatttgttttcttgaggaacctccatactgttcttcgtagtggctgtgctaatttacatttccaccaacagtataggactgttcccccttccccacatcttaaccagcatttgttactgcctgtcttttgaatacaaaccattttaactgaggtgagatgttatctgattatagttttgatttgcatttttctgatgactaatgatgttgaacatcttttcatatacctgttggccatttatagagatataattttttttaacctaagattaaaagtatattgtggtattttgcttcaggacataatcatgagatttctttgttgttgttttgagtgtaaattaggtgtttcaatataagatgaaataaatctgaaaccaaatgtatcaaatgattggatctctgacaagatctatggaaggaaaatgcaaaggcagctccttgtgacttcccctttttatttgtaaaagccctggtttacaaataggttgatattcctagtgtttgtttatgtaaggaaataatgcagtatttactggatacacctaccagctcataaagttctatttaagctgagttttcttttctttactttctttctttctttttgtttcttttaaagacgggatcttgctctgtaacccaggctggagaacagtggtgcgattatagctcactgcagcctcaaacttctgggctcaagtgatccgcctgccttagcctcctgagttgttggactacaggcatgtgccaccatgcctggctaattaaaaaacttttttttctttccccaagctgttctcgaactcctgggctcaagcaatcctcctgcctcaggctcccaagtagctgagtttacagacctaagccactacatcggccatatgctttaatgtttttgaataccgtattgtactaactgtgctagaacccaaaaaacataaccatttttttccataaattgaattccaaaatttaatatcttcttgctaccttaggagacggtctctttttccctaaatgccccttgcagaaaaagttcattagctctaaaaatcaggttaagagaagttggaggaggtgtgtttttgtttttgttgttaacttttatgaaaatttcaaataaaccaaaagtaaaagaccataatgaattaaactaccaccaaatatacttagcaattttttgtcacacttgcttcaaaacagattcttttattatagttaaaatagtaaaacttgcattgacagtattaaaagaaggaggatatatgtgagattggacatcgttttttactccttgatttctcttttatttttattttggtgactgctaatttttaaaacattatttctaagccagttcacctagctttattgggggaaaactataattgtgtgtgagagtatgtgtgagtgtgtgaaattttccataatagagtttgcatatatatgtattatgttactcatatgtgtcattatgtatgtaaatcatataaattttataagtacatatttataaatatatgtatagataataagctatatctacgtatatatacccttcattatggaaaatttcaaacatacagcaaagtagagctaatactgtaatgaacctccatgaatacatcactcagcttcaacagttttcagtttatgattcatctataacactctcctttcagctatttaaatatttaaaaaaatatgtaagtagggcatgccaaaattgaagactacctttgtacatacaggtgtttgagtttaatgaagaagggaatagaagacaaaaattaaagtaagtgttgatactagtatgctaaaaaggagtaattagctaagcaagcattaattgaacctcatgagtgaactgccaggaactatgagataactccaagatacaaaaattactaagaaaatgtagttcattgtgaggtgaacttcagtagaggtttcaacatgttttaagagcagaaattaaggtagactgggaggaggaggatgaaacattagagaagacttcttataaaatgattaggaacttcaggtctgagatgatcgtatgaagaagtgagaataaagtacttggctatggcacgtttctatgtagacagagccaagggctgaggaaaagaccatgctgaaacatctcaaaaagcaggtgtgataaatacattcagtttttagttatctaaaaatggaatggaaaagagtagttataggatcaatatggtcaatccaagtacctttttttaaaaagtgataaaaacagattttattcaggaactaatgcaatagggaagagacatctaagtatggaactgggctcaattcygaatacaacgaaaatggaagatttgtagtcaaggagcagggatagggtcagtgggtggaaaacacggatgtaaggaaaggagtagggggattctggctaaactagctttacagggattcttgctgaaggcagaccagggtgaccagataccctgggggatcctggggataaggaatttgatcatattgaggtgatcagaaatggagggtagggattctttctgaactgacttaacaggattcttgctgtaactgggcagtccaggcccaacaggaacagacactgaagcccaaggtcaaagcctagttgagaagagggtttagagaaacctaatgtttggtcaagaggagagtatttgtcaactaggaagaaaaaaattacataggtattgctatgtcttctgacatgaacaggcagctctaatcctgtgtagactgcactgtccagagataatcacactataggttttattaagtggattttaagggtagtcttaaggggggaaaagggagaaaaagtgttactggaaagcctcatgcatttttttttttttttggaagaggaggtgtaaaaaagagaagcaaataagccagttatgccttcaatactttggtgaagcmctaagtatccaagtattttcagcatcactaagggctttattttattctaggaaaatgaattatagtgcctactacattcacaacccttgcacaattctcatgcccatcatcttctactcacagcacatgcaaagaagccaaaacagccatgttttatatcatatgaccctgctcttttggctacaggtattggattacaagcatgggatctcatggcagccaacacatagattgtctgttacctgtgatgtgtgactttgtacgaaatgatttgagccaatcatattcttactcatatttacatgaacagaggaaaagaaaatcaggcagctaaagctggaggaaacagagaagtccttgagatagatttggagccatgtattaggctcagatgccttatatttgctttggattgaattgctaatgttccaactgaggtatcctgggaatttgcatgaatgaaaataatcagactatgctttgtttagtaacaactcaatctgtaacataagttcatgatatgttataaatttaggttaggtgcttcctttttgagattatatatcatatatattaattatatataatattaaatatatattaaaatattaaatatatcaatattaaatatattaatacataattattttattaaacatattaatatatcatatattaatatattaaatatattaatatataagtattaaaatattaaatatatatattatatatctcaaaaaggaagcacctgatctaaatttatatataatataatatatagctaattatatatgagatatataatatataattaattatatatattatattatatatatatatgatgaggaatgcaagcagttcttatatgtaattactcaaccttgaaccagaattttctcttaggccccaaacaaacttctgtattatttaattgtagaatttaacagtaaggaaaactttttttaaaaaatttagtctttgacacttatctctatgagtcaaaatttttgcaattttgtgaaccaaaacaaaatacagaagtagattcatgacatggttggcatcattgcagctatgatctctaacctcaagtttaagatttttgtgttcattgaaacaatgtaattgttcttactattgactaagtgttgtaagtttgaacttacatttatatttttaaaaatattcttggcctggtgcgatggctcacgccagtaatcccaacactttgagaggctgaagtgagaggattgcttgagcccaagagttggagaccagtctgggcaacaaagcaagacctcatctctacaaagcataaaacattagctgagtgtgatggcacacacctgtaatcctagctacttgggaggctgtggtcagagaatcacttgagacttggaggctgaagctgcagctgtgatcgcaccactgcactgcagaagcatgggcaaccgaaacaaaattctcatatgtcctttgagtttgtgaagtaccagatgctgtgcttggtgttggagacacagtgatgtcttcttaggagtatttatctatttgaatagatattaaggaaacagatgtgaaattttatctatgtcaagatggaaaaatgacagaatctcttagaaatgtgttgaagtttgcaggatgagttaactgggatagggagggagacatcagtgatacaggcagaggggattagcagtcttaacaatcctgtaacaggaaggaatgaggtgagcttggaggactgaaagatggaaagaagagaggtaatacggtgtgagatgagactagagttatgtatgaggtagactgtgtggttttgaccattatgttaagaagtggaggtttttctgctttaattttaaagtgatgaagtctttgaataattcagagagttgcaatatgatcacatttacattttgaaaagaacttccttcttgtggcagagtgcacagattggggaactagaagtgggcagaatggatgtaaagagaccagttagaggctatttcagtagtctagttaaaagatgatagcttggattacagtgctagtagcagaataagaaaatagtatacagatttcagagatatttaggaagtgacaaccttgttatgatttttgtataggatgtgagagagaaggaactttcaaaaatgacacctagatttcttcaacttaggtggcggtaagagaatactgaaagcagatatagtgcatatgtttgttttgggagtggatggtaggtgtctgatcaggagtttagttgaatgtggagtctgagatgcatttgtgacattcaagaaaaacattccacatgggtagtcacataacactggtttggacatgagaagaaagatctagttagggagatgatattagtgaattgtgggcatactggtaataattgaagacttgggtgaatgacatcctttcggcagagattttagagtgaattaataagagtatcttaggtagaggaggctacctatacagaaaacagagaagattagagaggtgggggtaaaaaaatcaagagactgttgtagtcattaaagccaaaggaagaatgatttgataaagagggagaggccaagaattatataaaatggaaagtgaaaaaatacttgtcaggaaaactttatgaggttggactctcatggttcctggtttttaaaatgtgttattagcagtcccttgaagtcagttttttaaaatgaaaaattaggttgaaaatttaaaaccttggtattcttgctaaaatactaggcctcttccattaaaatatttccagaagtttcgggggggtgttactctttctggggtatactcaactttgtgtggtgaatctcttagtttaactgttgtttatgagcttatctgggtagagctatttttagtttttgcttctattgctaatccaggtgtttggatcttgttttcaatgttaatttcttgtcttgggaattctttgtaaatttagacccttgatgcttagcacagtgtttaatttagctttttttattggagccttttaagcctttagatagagaagaactttgtcacttccatggtggtggttagattgttttccatcttttactagacagcctttccataatcctcgctttgtaaatacaatcactactttgtttctggcatttgaagatatccctttttaaattctgatctggtaaatacttcttggaagaggaagggagcagggtagcatttctagcattagcttagctttccatgttgttggcacacaaagttattacttaaaattctgattttaaaattcccctcagaaatttggatatattactcctttgccttattagcaatccagtggttccactgagaaggtattaatctaattttgtcattcctttgtagaaaacctttctctctgaattaatgattttaagttgtacttcagtattttgaaatgtattgggatgtgtatgctctgcggaaaaaaaatttttgttttatatcagtgtaagaactagactacttaaatttttttatactttttatcttgttctaatttgctcttcatttttgtcctttatgctatttagcctatcttttattttatcttggcaattacaattttgccattcaaaatcttaaatggatcctttatcataagtctgtttcattaactatagactttaagtgcttcagagatgctgtattgtttgcttatagctacactagtactatcataggtactgttgttaatccctgttttacaaatgaagaaactagaatgcagagaacataagtaacttgcccaaccaaggtcacatagctggtcagtgtggaactaacattcaaacctatgcagtatgatgctagaacctgacctctcaacctctaggttatacttcctttcaggtctgaaagtttaatattaataactctttcagagttaatataactctgggttatattaaccatctgaatatattctcgcttctgtttctacagtattaatttttctatttgttgattttgatatttagctgtcatggtgattgcttttgtcaaatgcttgatttttttgggggggggatatgttgcttattttagtattggaaaagactgtaaaaatgctacaaagcttgcatctagtgattgttggagttgagatcataacttgctgctggaaaggatgtatcaaactgatctggggtataaggatttcctgttcatcttgtatccagcatcgttctgcttcttgactcacttgtctatgtgtagtgcttctacctcaggcagacacctctgatgcccacttccctgcttcgaaatagtagggggaaggggattgacctgactgagtatacctaatggcattaccctgaggattgctccaggcttttcccctgcccatgacagctgctttatactaaacatggaatatccctggaattgccctctatggtttgtggttttcttctgcctttcattttgggccctggtttcttcaatttcattttttctcatttgtctcagaaattataatttctttttctataaggccatattcttgttttatagtgctgctatggtttattctctttatatttttagtgctattatagtttaaagccaatgtttttagggttgcaggattttgggcaattctggtgagtgtaccgtttcttccattttgatgttatcttctgtcagcagttcttaatcttttgagatttatgaacttctttatagccctctaccacctggaccccaagcaatggctaaatgttattttgaacattactagttttgtaggtgtgggtttgaagttgggggcgtttttatttatrtagaggtataagcatgttcttttgatatcttcagattatgttatataagtttgatgaaaacgctctgaaagatacatttatgtagccacagagtttaatataaagaaggagctatttctattaagcagttttataacatttctttttatctcttttctctaggtttaactatagatcaacacatcatcttgcatctcatgggttctatgaatttttaaattggtttgatgaaagagcatggtatccactaggaagaatagtaggtggtactgtaagtatattagcagttctttatgttaattataacatttattgttacttgagtaaatcattaattgccaaggtggtagggattcttgaaagctttgtatagttaacaaatttttctgtggcttattatccagtattcagtttacttaggctcttttcttgatacctcctccccttaatccccaacctgtttttgggttgtctcacactagccactctttttgacaagtggtggaggctgggtggggatctgctgtcacagtgtatctgaatgaagttcagtttatttgtgtatttgctcttatagcaatttggttgaaaaagcaatttggaaggagatagaaacgtagaataatcatgataattatatatctagaataatcagataattaggatttttcaggccctgaatatggagacattccaaattattccaggtaattgactaaagattatagttcatgcagacttctgatatccagaaagatgacacaaaggcaaatatttttaggatttgggacataaggagaaatgaaggtgaaagacaaagcaacattgtcttgtatcggnnnnnnnnnnnnnnnnnnnnnnnnnnnnnnnnnnnnnnnnnnnnnnnnnnnnnnnnnnnnnnnnnnnnnnnnnnnnnnnnnnnnnnnnnnnnnnnnnnnnnnnnnnnnnnnnnnnnnnnnnnnnnnnnnnnnnnnnnnnnnnnnnnnnnnnnnnnnnnnnnnnnnnnnnnnnnnnnnnnnnnnnnnnnnnnnnnnnnnnnnnnnnnnnnnnnnnnnnnnnnnnnnnnnnnnnnnnnnnnnnnnnnnnnnnnnnnnnnnnnnnnnnnnnnnnnnnnnnnnnnnnnnnnnnnnnnnnnnnnnnnnnnnnnnnnnnnnnnnnnnnnnnnnnnnnnnnnnnnnnnnnnnnnnnnnnnnnnnnnnnnnnnnnnnnnnnnnnnnnnnnnnnnnnnnnnnnnnnnnnnnnnnnnnnnnnnnnnnnnnnnnnnnnnnnnnnnnnnnnnnnnnnnnnnnnnnnnnnnnnnnnnnnnnnnnnnnnnnnnnnnnnnnnnnnnnnnnnnnnnnnnnnnnnnnnnnnnnnnnnnnnnnnnnnnnnnnnnnnnnnnnnnnnnnnnnnnnnnnnnnnnnnnnnnnnnnnnnnnnnnnnnnnnnnnnnnnnnnnnnnnnnnnnnnnnnnnnnnnnnnnnnnnnnnnnnnnnnnnnnnnnnnnnnnnnnnnnnnnnnnnnnnnnnnnnnnnnnnnnnnnnnnnnnnnnnnnnnnnnnnnnnnnnnnnnnnnnnnnnnnnnnnnnnnnnnnnnnnnnnnnnnnnnnnnnnnnnnnnnnnnnnnnnnnnnnnnnnnnnnnnnnnnnnnnnnnnnnnnnnnnnnnnnnnnnnnnnnnnnnnnnnnnnnnnnnnnnnnnnnnnnnnnnnnnnntttataactttatcttaaaattaatcctcagtggaagcctgttttctctaagagtcctgatgtcctgagatttgggatcatccctgtaataatctttcttatttgcctttgctggagaattttaggggtttcactggttttaggacagttttacttagtttgaggtttcttatacttaaggttattataaatgtagaacccacattgacacatttgaatgagtttcatattctcctttaggactttgtttctgctctgagcattggaaggcttgatggatgaatagaatttgtctagtttcataagcaggtcctgactttttgctggtaattaggtcttcactctgatccctgtgttgggtgaaaccccctcattttcattccttaaggcctgtatcaggcctggttatgtttggcttttttcttctctcctgtgggctcccatgacatcagcacctactttgaatttcctcttcatttttggcatctggagaataccctatcttgagcttgattatgctttttttgttgttggggttttatttgttgatttatttttggttctttcatttagtacttctatgaatcttggctgtttttgtgtgtgtcagttcagtctaccgtattatatggatatattgtcttatcttgaaaaatattttaaattcactttgtttttttttcccccccagtattgctgacaaaattacacactggtacctagtattgaatctgaagtagaacaaaatttttatgtgttgagaatgtggatgaattatcatgcttttttttcctccccctccccctttctccttccatgcatgcagtaggtattgagcatccactttgtgccagttatttttctggatgctggggaaaaatttcctgctattctggagcttatattcttgtgagcgtaggcagttaataaatagaaagtaaataaataaaataaatagtacgtcaaatgatgataagtattatggagaaaaagcaagagagttaaagacgggagtgtgggggagagaggttgcagttgcaaattgtatagccaggaaaggaaatgtataacctttgtagtttctgttatggagtaaaaaaagagtcttttaggacttacctaagggagcagatgtaaatgcatgttttagtcactgaataataactcaggaagaatgtcctgttcactgttcttgaatccttttaatatttgatgttcctcttttagagtgagggtacgtataactgttaactggcctcttctagtttattatttcccttttatccctaagtactttatgtggtataaaaaatttaatttttcaggagtcccaaaacattatctctggattcaccaactgactcttccctcttttcctagctagactgttccctcttttccttgcttactttccaaatctagggcttgaaaggagggaacatttttttataaatatgacttaaataattttgtgtgtaatttttctttatcttccttttctcattttcttatgtacacacaagtatgggcaaaattggagtatgttagaactccaaactcaaggataagctagactaagaccctgttttgataaaaaaaaaaaaaaaaaaaaaaaaaaggttagtgggatcagtaagaaagttacctacagttaacattgttaaacattttgaattttaatcattcttgtttcatattctccctgatctttttatgtattcctccagatatgagctagttctttgtatgcaacacaaaaaggtgtgggtttttttttgtagtttataaagaaggcaaattgttttgagatgttgctttcaaacttatgtaaggtaaacaaaatgtaatgataaagaagagtacatacattaatatttttgtgtctcattttatatgtaattaaattttccatttttttcttcctaggtttacccagggttgatgataaccgctggccttattcattggattttaaatacattgaacataactgttcacataagagacgtatgtgtgttccttgcaccaacttttagcggccttacatctatatctactttcctgcttacaagagaactttggaaccaaggagcaggacttttagctgcttgttttattgctattgtaccaggctacatatctcggtcagtagctggatcctttgataatgaaggcattgctatttttgcacttcagttcacatactatttatgggtaagtgacatttaatgttttgctgccattattactcgtgacctttctcctgaaacactttaggctgtacgcagatttgtcttttacaaattatgtagttgcgtacagagatctgtattactgttcataatcaatttaataatggataacattttaaaatatgttaggcatctctcaagttatgtgtaaatatcctttttaaataagtcagaactccaaaagaagagctatcataaaacaatctgttgatatttttgtttctttgttttggggagataggtaagaaatagttacccaggaaagttgaagcatggtttgatggctaagaattttaaattgtttctgaaactagcattatttattttgctgctgccaggctatttaaacttaatgattttttcccctgtgtatgaaatatgatgctacttgggttcactttagagcttgcatttatttatgtatttattattttagctttagcttgtaattttccagtgatagaaattaccaaaatttgtgtgtgtcaatatgtttttgtatattttattaagtatatttttaggtagctaggtgaatggcagcataaattttctctttaataattattttatattgttcaaaactacttggctaatgagtatttttgctctagcatggaattctggaggagaaggttgcaatgtgatcagtatagacagtgtcttaatcttgagtttaaaagagaagaaagaaaaatacccattcaagtgaagatgataccaagcagtaggatgttgccagtgctgctgtacttatcaaaaagtgtttttaaaaactctttgtttattgtgtgcagctgaggagaaaaaaaaaaaaacaccttaaaatcgagaacctctgttgaatgccttttaataaactatataatattttaaatcataaaaataatacatgcgtatgtggctagatcctgataatataatgcttagtggaaaaataagttgtgataaaatatgtgcagtatgagaaatccttgatgtaagtttttaagcagtacaaatcatactatgtctgttaatagcagtttataaagaaagtataaaaatgtgatagataagctgcatgtacgccagctttgtgataatgggttttcctgagggtgggtgggtgatactgaggtgggcaatattaagggagcttcacctagctcagctaaaaaaattttaaatcaaatattctgaagcaaatgtataatttttgaatttgaaagtctgaatagctaggttcataactattttaatattctctacacttgtgtatgtttcaaatactttataataaatttaaaaaataaaatattctattttgtggacatttatgcaacagaaaaatacaaagaaaaaaatcacccacagtgaactaccatttgcattttttaattttgagcacattacattcatgaataagtcccagttggtcatggtatataatctttttcatatgctgctgaatttggtttgctagtattttcctaaggatttatgcatctgtgttcataaggtgatattggtttataatattctttacttgcagtgtctgtctgtcttaggattagggtaatgctggcatcatagaatgagttagaaggtgttcccttctcttcagtttttggaaaagattgaggaggattagtgttggttcagttctttaaacgttttagtagaattcaccagtgaagccatcaggaccaggacttctcttttttgggagatttctgattgctgattcagtctccttgcaagttgtctctgcagattctctatttcatcatgacttagtcttggtaggtttttgtgtttctattaataggactttgttgatgtaagctattcaatttgttggcatacaagacttgataatactctcttaaaattcttcttgttccctatggaatcagtagtaatgtcccgctttctgattttagtgatttgagtcttctctcttttttacttaatctagccaaagatttgtcaatcgtgttgctctttttaaagaaccaacttttggtttcattgatttttttctgtgttctttttcttttctctcttttagtgtatatgctgctgaagcaagcactctattttatctctgttatagtctttattatttattcaattttgtctttctggaagctttgggtttagtttgttctttttctttccttctttttttttttttttggagacggagtcttgctctgttgcccaggctggagtgcagtggcgcagtcggctcgctgcaacctctgcctcccaggttcaagcgattctctgcctcagcctcccgagtagctgggactacaggcgcctgccactacgtgtggctaatttttgtatttttagtagagatggattttcacgatgttggtcaggctggtcttgaactcctgaactcgtgatccacccacctcggcctcccaaagtgctaggtttacaggcatgagccaccgcgcccagccctagtttgttctttttctagttcacaacgtagtttgtgaagtcaggtttttgacttgagatttttttttttgtttttgaatgtaggcatttatagctataaagttttcccttagtactactttgacggtgtctcataagttctgatacattgtggttttgttttcattcatctctgagtattttctcatttttattttttgatctgttggtaagtatcttgtttaacttccacaaatttatttcccagttttccttctgttattgatttctgacttcatcctgttgtagttggagaagatactttgtatggtatctgtctttttaaatctattgaaattaatatttggctttaatctgcggcccaacatattgtctgtcctggaaaatgtcccatgtgtacttgagaagaattgtgtatgctgtcgttattcaataatgtgttttgtgcatgtcttttagacctagttggtttgttgtgttaagttctatatcatctcctgtctggttgttctatccattattgagaatagagtattgatgtcaccagctattattgtagaactgtttatttcttcaattctgtcaagtgttttcttcctatattttgatggtctgttatcaggtacataaatgtttgcaattgctataccttcttgctgtattgaactgttttattgctgtatatattgggttctttctcttttgtaaccttttttttaaaaaaaaaattcaaagtctgttttttcttttttaattttgtagagatgaggtttcaccatgttgcccaggctggtcttgaactcctgggctcaagcaatcctccctcctcacttcccaaagtgttggagttacaggtttgaaccaccacaccctgcctttttttgtttcattttgttttgttttgaattttatagagttaaagtctgtcttttctcatattagtatagccatccctgctctcttttggttactatttgcatggaataactttctgtcctttcagtctctttgtctttggatttaaagtgcatctcttacataactgcatgtagttggatcatgtgtttattctttctgccaatctctgtttttggagagtttaatacacattggaagtaattactcgtaaagaggtactgatttctgtggttgtgctgttttctacatgccttatagctttttttttgtccctcatttctccattagtcttcttttgtgtttagtggattcttttggtagtgaaacatttgaatccctttacttttgagcatatttgtggattgccttttcactctggatagtgtcctttgcatgaattttaaatttttatgaagtctaattaatttttgttgttgttgttgcttgtgcttttagtgtcatatttaaggaaactgttggcctaattgaagctcatgaagacttacacctctgtttccttctaaagattttatatgtcaagttcctccacttaggtctttgatccatttcgagttaatttttgtatatggtgtgagagaggaattccaacttcattcttttgcatgtggatatccacttatcttagcactgttaaagaaaaatactcttttttgttgaatggttttagcacttttgtcaaaaatcaattgattataaatgtatgagtttatttctggactctcaattctgttccattcccttgccatctgtatgttgtgtctttatgccactaccgcacagttttggttactgtagctttgtaatgagttttgaaatccaaaagcataagtccttcaactttgttgttctttttcaagattgctttggctatatggggtgccttgcattttcataagttttaagattagcttgttcattacatctttttttttaagtggcatgatattgttttgttaattcaacagaaatttttgtagaatacaatatggagcaggtgctgttttatgtgttgattacacaaggttatatgaagttgataatctagtagaagaaattatagatatcattgctttgaaggatcatattaacagaaggatggaatggtaaaacattctcacccagaaactgggaggttatctagtgagtttttcctttgttttctttttaaaaacaatatatttaaataaattaggtttacggtggaaatagattcagtatttgaaaattagaacacttgtgtttgagttctggcataaaatactctctgactcttgacaaattgacacttttgaatctcattcagttttctcttaagatacagaaaacgttttgcctacagaattataatagatgatgacattcatttaaaatttcattattactaattgaaagtggaaataattacagttctaactactatgaaaagttgtttgtagcccaaatgaagttataaaaaggtgaaaacattttttgtaatctctaatatataaatgttaagttgtctaattcctcacccagtgtttttatttttaaaccaactcttttaaaaggtacatgtttttaaaatttaaaagataagtactttgtcatagcattattatttgttgatgccctattactgttacaagctggtgttgatagacatttttggatacacttttggatttgtgttctacagagattaaaacattttcatcgtgattgagtgattgagagtaaagtctatagcataattgccagggtttggttttctcttggtttgatttccagctctgtcactggaggttgtttaaatccccaccctgtgcctgttccatcaactataatatggaagtaataattgtaccttccttatataacttaaaaattaatacatgtaaaggtatagaatattgtgagaacatagtaagaaatgagtacatgtttgttattatttacgagcaccagagtatatgattcagaaaagtaattaacacagataaagtagtacaaggagcagtgtttatcatattgcctcttacaggttttgttttgttttgttttttgttttgttttgttttgtttctttaaggttccctcctgtacctttgtagtcagtcttctccctaccccatttctggcaaccactggtctgatttctgtttctctgtctatatagctttgggagtttcttttttagaatgccatataaatacagacagtaggcgtgaccctgtatatccgtcttccttcacttagcataatatttttgagaatgtcatccatgttgttgatgttttagtagtttgttactttttattgctgaakagtactccattatatggatgtactacaatttcttttccagtttttggcaatgatgaattaagtggctataaaatgtttgcttgtgggtctttgtttggacatatattattatttcacttaggtaaatgcataagcacagattggtggtttgtgtgataagtataggtttaactttataaaaagctgccaagcagtttgccaaagttgctgtattcattttgcattccctccacaaatacatgacagtaatatttactctacttttccatcagatggcatggtcacatttttaaattttacccattcttgtaggtaggtagtagtatcttatggctttcgtttgcttttccccaatgactggtgagcatcttttcacgtatttatttgccatcccagttctttgatgaaatgtctgttcatatcttgcccatgttttgattaagttgttttcttactcttgaggtgtgagagttctttgtatattttggaaataaatactttatcagatgtgtgctctacaaacattttctctagtctcttcctaagagcagaaaattttgatttttatggaatgtatcagcttttttttcaatagatcttgctcttggtatcttctctaagagatctttgcctaccytaaatcacaaagattgtctcatgtatttacttatagaaattaaatagttttaggtttaacagtcaggtctgtcatctattttaagttgattatggtctggtgcaatataagggttgttgggtttgaatgttaggtttttccaacatcatgtgttgaaaagattgttctttctccactgaattatctgctttggtaaccttgtcaaaatcaattgaatatatacatatgggtctgttttgggactcttctgtttatctgtgtctgtctatataacaataccttatgttgttttcattagtttctagaaactcttgaaatcaggtagcatgagtaatctaatgttatttctctttttcagaattaatttggcttttyttagctgtttgcatcatgtaaattttagaatcacattattaacttctttaacggaaaagccttctgggatgttgattggaagtgcattgaatgtataggtcagtttggaatagaattgttatcttaatatgtagtcttctgatctgtgaatatggtatttctttccatttatttagatcttcttcatttttgctttaatttttctgggcgatcaggttagtgacttgatctattttaagcaccgaaagctataatttttcctttacgtactttagctgtaccccataaatttttttattgaaaaataatttgcatattataaaatttatcctcttagggaatggaattcagtgacttttagtatattaaccaagttgtaccattaccactatccagttacagaacattttaacactccaaaaagaaagcctcgcccatgatcagtgactttccattttcacatccccccagcccttagcaaccggtattgctttctgcctctctgatttgcctattctggaattccatataaaaggaattatataatatgttgccttttgtatctttttttaaaattttcaaattagatgggttctccttatattgctcaggctggtcttaaactcctggcctcaagctaccctcccacctcagcctcccaaagtgtgagcgaccttacctgttttacatctggcttctttcacttacaatagtattttcaaggtttgtctatgttgaagtatttataaatactttatttttttattgctgaataatattccagtgtatggttatcacattgtatttctccattttttcagttgattaaacatttgggttctaatttctgtctatgatgaataacgcttctgtgaacatctgtgtgcatttttattacattttaaacatttataaacatctgtgtacaaattactataagaattgcacagagtttttatgctctattttaattttctagctcagatattttctaatttcccatgtgactgacagtgtcaccaaggatgctgaacttctatcctactccaaatctttttcatgactacttggtagggcttatgaaaagagcttgtgaatgtaaattcctcttatgtctggtttccttagctgttttaacacttgcttatttgccttgtgactttagctctctgataagcctaagaaaacttactattttgtagatcatctagaatttttcccttattgttgaggtgaaaataacattctcttgcagctttccacatcccaagcacaagtggaattcagtgcatctcctaatactgtgaaccaaaacacaagatggcccatgtttgtaggcctagagcaatactactttccaatagaactttcgactctgtttaataagatagtcactggccgcatgtatatggactttttttttgtgcaggtactaggtgcttcactataatataggtaatagaattgagttttacccttaaaatatttgtctcaaatatttatttcttttaaatcagttaggaaatgttaacttattctagaaacagaggacctcataatttgtgagaattatgtaaagttaattccctaagcctaatccattaaaaaaatccttttacaaaaatgtctctttagtcatctggatgcactacatttctgctagatttgctcagtatagaggaagaaagccatttgtaaattctgttggaatacagttttcatgccatgtttgggctaccactagatttttgccttttattccaatgtagatttttccagtgttgttttctagaaagtgttgcactttacattcatgtctgtgattcattttgagttattttcatgaaaagtataagatctgtgtctagattgatttttttttgtatgtggttgtccagctgttacagcattatttgttaaaaaaattattctttttctatgtattgccttttgtcaaaggtcagtttatatttatggggctctatttctgtgctctgttctgttctgctgatctgtttgttcttttcccacactgtcttgattactgtagttgtatgataagtcttgaagtcaggtgtagtatcagtcttgtttcaatatcatgttagctagtctcagtcttttgcctttccatataaacattcaaattgatttgttgatgtccacaaagtcacttgctgagataaggtttgttatcttaacaacattgtcttcctatcataaacatggaatatctctctgtttatttacatctttgatttctttcatcagagtttggtagttttccatatagggattccacacatattctgttggttttatacttaagtaattcattttgtgtgtgtgctaatacgtactgggtgctaaatggtattatgtttttaattttaaatttcagttcattactggtatataggaacaagtttaactttcatgtattaaccttgtatcctccagtgttgtctgtaatcatttattgattccagtaattttctttctgattctttggggtcttttacgtagacaatcatgtcatgcacgaaaaaaagtcagcttcatttcttccttttcagtctgtgtacttcttttcttttcttgtcttattgcatttgctaggacttccattacaatgcaaataggagtgatgagagagaacaactgtatcttgtcctgatctcagggggcatgattatgaatttatttctggattctgttctgttccattgatctagatgtctatgcctacctcataaacatagatctagttgtctgtactgacccaattactataacttcattgtacatttttaaattgggaagtattgtagatttttatgtattgatcatatattctgtgaccttgctaaatttgcatgttaaaatttactttttagattccttaggattttctacatacaagatcatgttatcttcagagacagagggtctttgctacttttttcccaaactgtatacctttaattttttttccttgcctggttgtactgactggaacctctaacatcacgttggacagggtactttttcctgccctatttcctgaaataattctcgtaggattggtattacttcttctttaactgtttgtttggcagtatttaccattgaagccatgtggaccagggaagatttttaatatgaattaagctttttaatgacatcgtattattcagattttcttttttcatgagtaatttggtaatatgtatctttttaaaagtttttttattttatctaaatgacctaatttgtcggcagaaattgttcataatatttctttataagtctttggatttctgtacaatctgtagtgatgtcaccttccttattcctggtactgataatttgtatcttctctcctttcttcattagtctagataaagcttatccaactttgggtttcactgatttttttttcctttatattttcaattgcattgatttcttcgtcttcattatttccttctaattcacacttggtttactcttttctagcttcttaaagttgaagcttaagttattttctccatttctacttttctagtataactatttatactagaatatactgtatttacttctttagctgtagtctctgtgttttaatatgtggtgttttcattgtcatgtggttgaatattcttcgaattcatagtttctttgactcatgggttttttctaagcatggtgtttaatttccaaatatttggggttttcttagcatacttttttttgttgatttctaattctgttgttgaagaccatactttgtataatttgtctttttaagtatatggagacttgttttatggtctagcacagaagtctgtgaagtatggcccatatgtaggttacctgctttagtaaataaaattttactggaacacagccctggccattcataaacatatactgtctttggcttcttttacaccagaattacagagttgcatagttgtgacagatctggctcctaagtgtaaatatttactatcttgactgttcaaaacaagattgctggatcctggtcaagcatgctctccatcctggacagtgatccacatatgcttgaaaagaacatgtattctgctgtttggaggttgcatattgtaaattaatggtcaggtcaagttggttgatattgtccaaatcttctatatgctcatcgtttttcttttcaagttctatcttcaacaatatggttggagatttcaataactgcctctcagaaactgtttcttcttttagttctgttagttcctgctttatatattttaaggatttgttttaggtccctgtatacttaaaatttttacattttcctggtatattgacccttttattatagtgaagtagttctctttatctctaggaatgttgtcttaaaatctgctttgtttgattgatttcatatgattcctgtttccatggcttatctttttctgtccttaaaatcaaactatttgtatctctggattttaaaagtttcattgactgcgtatggttagatcttgcttttttatccagactgaccatctctgcctttttattggagttttaagtattgtttgatttgcacctgccatttactgtcctcttttgtgttgaaatgcatttttaagtataccattttaattcccctgattgtttagcctgttattgctatttatttatagcgcttgatgcagagaacgaattatgcatcttaatattacaatctacttctacttaacataattctggtaaaatatagcagctttgctccaacacagccttattttttctctcctctcctctgtgctgttattgtcgtatgtattatatctatgtatgttatctacctaacaatacagattatatttatattcatataacttacacttattaaattaagaaaacaatcaagagagtcttctatatactccatatttaccatttccagtattctttattctgtcccatgatctgagtttccattttttataatttccttttagcctgaaggactttctttaatattttttctagagcaaatctgctgtaatgggatttttcaattttgccttcatttttcccccagtttttttaaactatggtaaaattgacataacacaaaatttatgttttaatcattaagtatatactttattggcattaagtacattgattatgcaaccaccatcaccaccatccatctccagagctctttattttgcaaaactgaaactatacccattaaacaatatctctcctttccaccttcccctccgcccctggcaccaccattcaaatttttgtctctatgattttgactaaatacttcacataggtggaatcatatagtagttgtctttttgtgactggcttctttcacttagcataatgtcttcaaggtttatccatgttgtagcatgtcaggattttcttcctttttaaggtggaataatattccgttgtatgtacatgccatatttggcttattgattcatctgcagctggacacttttatggtctagctactttgaaagtggttatacaaatctctctccaagaccttgctttcaattattgtgagtatataccttggaagtggaattgttgggtcatatgtcaattctattttnnnnnnnnnnnnnnnnnnnnccaaactgttttcccaacagcagtatcattttacattcccaccgacactgcacaaaggtttaatttttccctgtccttgtcaacacatgttattttctggttcttttgatagtagtcatcccaatgggtgtgaggtggcatcttggagttttatttgtagttccctaatgagtagtaatgttgagcatattttcatgtgcttattgcccatttgtaaaggcctacaccttctccagggtattcacggtgactttctaatttcccgtcatatatttctttgtatatgtggttgattttgaatgtcatagtctttagtatttggtttccaaagtggggaaaagcagaaaaatgaaggggaaaaaagtgccagccctttaaatcccctgtcagtcacttcagccagaggaggagggacttgcaacattggggccaaagtgcaaaggtgatcacttctgtctgctcttctatgacaaaaagcagcaatcagtgatcagagtgcagaacctcagtacttggaggacaagcttcctcacatcarattgattctgcccgtgcaattattgtctaggtggggagctgatttctgttgcttcttctttcagtatcttcccagaatcctcacctgccttcctttttgaaggatagttatgtaagaatatattaggttggtgcaaaagtaattgcggttattcccattacttttaatgatactttgctctttcattgaacacttgataattttctctttcatttaacgctgtgagtatgtcattccactgccttctgtcaaaatttttttttctgatgcaaagtcaatcatatcgttacttccttgtgggtttttttttctttctcttttcaacttttcctctttgtctttatctgccagtactttgactacagtttgtctaggtgtagttctctgtatttattgtatttggtggcttcttgggtttcatggatctgtagattagtgcttaccttagaatttgggaagttgtaattgtttctttaaatgtttttatctgtctgtctttgtagcctctccttttttgaactttgtttttctctgttctttgggttggatacttcctgttgacctatcttcatgctcactgattcttctgccatctcaaatttgccattaagcctacttagtgaattttttattccatttattatgcttttcagctctaaaatttctagttcattcttatttctcacatgtataggagaatatgtatmttctgtttctttatggaaattttgtgttatatcattatatttttctttaattttcttaatatagtattctttaattccttgaacatataacagctgttttagagtctttgtcctctaactccaacatctgggcccactcagaagtagtttttatcaaccatgtccccttccccagcctatacctgtccaaatttgggtcacactttcttgtttctttgcatgtcttatagttttgggttgaagcttacccttgttatttttaaaaatagcttatccgaacatgcaattttctatttcaaagcctctgctactggactccttaatatgtgtaaatgaagaccaaatggtgagcatgacttattgtctgggaaaaaactcaatccatattttttctctgctttcacaccaaaacaataatcatcaatacagaagacttatgtgacctcaaaatatttggcgatttctccccactgccaagcagttaattctgctgcggacaccagctggtgtcctccctatcatttctgacactgtctgtctggagatagcacgagatcccacaggttgagggcctgtccccaagacactgtcccagcttatgcccccagacaccagttgaaagtctgggcctctagaacttctgatagcccagcttaaattagggattcccatcaccccctcaaggtttttttttttttggatggagtctcgctctgtccacaggctggaatgcagtggtgtgacctcaggtcactgcaacctccacctcccgggttcaagtgattctcctgcctcagcctcctgagtagctgggattatagtcgtgcaccaccacgctcagctaatttttgtatttttagtagagacggggtttcatcatgttgtccaggatggtctcgacctcgtgatccacctgactcggcctcccaaagtgctggaattacaggcatgagccactgggcccagccccccttcacaggtttgattaatgtgctagatcggctaacagaactcaaggaaacacttagttcaatttgttggcttattatgaaagataccctaaattatacagataaacagccagatgaagagatacgtaggacaagatctggaagagtcccaagtgcaggagcttctgttgccatggagttggggtgcaccaccatcctggtacatggatgagttcttgatcaccttcctgtcagcctccttgtattcagctgtccagaagttcaccagaccctgtccttgggccttttatggagactttattggttgtccatgattgaagcatggacaaccttgtcaaaatgtgactggacaaaaagagtgtgacctaaacccagcaaagtctatctgttcagattcttcttggcctctctgtgcagcattccttcctccaggtatggggcagaaccctctctgaaatgagggtcttatgacccaaaatcaaattagagccctgccaagtggagaagtgaaaagtgagtaggagaagttcagagacagagattctgtaacaaggggagttaagagccacgaactgtggatgaaagtccatatatcataataccatacttacaaagtcctaacttttctcctaaagtcttttcagttccttctgagtagctcagctgttttctgttttggcaggtgttgttgttttccccttttcgttattgatccctctctccttgtttataattcttcagtgcctgctttgacattttgaccattcttttacatagattttgttactctcatttctgttttcatgcagttagtttctgatacctacctctattataacactttgtatatagtacctttcatcaatcctaaaatgtatactttctccccagattttgacatctctgaaattaggatgtatgttatgagtgatggtcatagtttctatgaaatatggtatattggttacttgcttttcagtttacttcctcctctagattgtgagctttttgtgggcttaaaaattttaaattccacacctatacttcttccatctgtgcctgctactgaatccactgtgggtgattgattggatgccttgcatctttcctgcctcattgccctcaaagttctgcccaaaaccaccacctcagtaaagcttctggtaattttatcccagccagaactgctttcctgcctttggcattcaggctctataaggaccttttggtactcagtgtttatactcaccgtagagtctcttttatattgtgtttgactcaagttcttgcctttgtatcttatctccacagtacaggactgagttatagtttgtgtccaacatagcctagcaaagttttctgtgtattagtaaatactgaaaaatatgtttcatttacttttctctttcagccaattggattgagtctggggaagttccaagatatgaactgtagttagtggttgtaaaatataccttggttttattgtaatagattatagcagtctgggttcagttaggagagagaaagaagtattaattatgataaaagagtaactaaaatagaaggaaactctatatggtatcctgaggctgagggagagtacccaggaaagggcaaacttggaaggttttcacacctcattgcgtagggtgtggttcagcccattgaactggtttggcactgctgaacaagcaaaagacctctctggagtgtagacacctaaggagaaggggtaggaggtggccatggtgacctgtggcatggtgtgtggatatcagtgagggcaagagactttgcagaaaatgagaaaaatgtaatttgttatttaaaagatgattctttttactgaaaactacataacagagaatgagagctattcttaaaatgtctcagtgtgctgctcagtgttataaatgcatatatgaagtatgtctgcatatctgaataaccacagtattttttagaataaccttgactttttgtagcctgtggttaccaaacatttaacttttaaaaattccgcaagaacatttgtaaacatttttattatatcagttgcttttgttttttaggtaaaatctgtaaaaactgggtcagttttttggacaatgtgctgctgcttatcctatttctatatggtaagatttcatatttgagactacatgaagtctagtagstctctggaggttaaaacagttcttttctcctgaagtctgtaggatttttattttgtttaatgtaatctttcattactaccatcctctttccttctcctactcacaggtcctgtatacacctgctttggtggagagggctaacatttaacccctcaaatatttgcagcaagtaaaacaaaatgttttcaagtgtaccacttcaaaatacttaaatgttttattaagaattttttttaattttttaagattatattcattatttatttatttattttgagacggagttttgccctgttgcccaggctggagtgcagtggcacgatctcagctcactgcagcttctgcctcctgggttcaagcaattctcctgcctcagccttctgagtagctgggattacaggcrcccgccaccacgcctggctaatttttgtatttttagtagagacggggtttcaccatgttggccaggctggtcttgtacacctgacctcatgatctgctggcctcggcctcccaaagtgctgggattacaggcatgagccaccatgcctggcctgtcatttcttttttcagagatagtgtctttctctgttagccaatctggagtgcagtggtgcaatcatagctcactataaccttgaattcctgggcttaagtgattctcccacttcagcttcctgagcagccaggactacaagcatgtgccaccacgcctggctaattttaaaaaatattttgtagagacagatcctcactctgttgcccagactggtcttaagctcctggcctcaagcaatcctcctacgttagcctcccaaagcactgggattataggcaagagctgccgtgcctgttttttaactttttaatgacttaaatttaaatattatttttctattcttcctagctttattcattttatttcattattattattattttttttttttttgagacagagtctggctctgttgcctaggctggagtgcagtggtacgatctcggctcacggcaacctcggcctcctgggttcaagctattctcgcgcctcagcctcccaagtggctgagattgcagatgtgtgccactatgcccggctaatttttgtatttttagtagagacagggttttaccatgttgatcagactggtctcaaactcctgacctcaagtgatctgcctgtctcagcctcccaaagtgctgggattacaggtgtgagccacggcacctggcccctagctttattttttaaatagctctgacaagtaaaatattttccaagttagattgcatactcaaaaagaacaggaaattttgcctgtcatatatcaagcatggaaccatgtttagatgaaataagtttttacttaacactcaattttaaatatggtattaaaaattagtttttcgtattggagttgactagataactgcttaatgttaaaatctgagtttttaaacagtcattatctaaacagtttagtgaagtgaacttagaacagagaaataagagtacttggaagttttggtgaaaaagataacccaagtaaagagttaactaaaaagagagacggattgagaaaaagctgtagaaagactgttcttctggcccatttgctttcatttcactccttaaagtaaatgaaggaaaactcttaaaatgaatttatgtgggtccgagaagaaataaatccctgtagttaaagatcatgcataagatcagcaagtacttttcagaacatcagattcactgtcagactggtttcagcttttctttgttcttaagtgaagagagtagataaggtagcatattgatattatgctcaattttcaaccttaatgtagtagatacctagagtcattaccgaaataatggtcatatcctctaggttaacctgtaaatttacttacttttttttttttttgagatggagtttcgctcttgttgcccaggctggagtgcaatggcatgatctcagctcactgcagtctctgcctcctgggttcaagcgattctcctgcctcagcctcccgagtagctgggattacaggcatgtgccaccatgcctggctgatttttgtatttttagtagagacaggatttctccatgtggtcagactggtctcgaactcctgatctcaggtgatccgcctgcctcggcctcccaaagtgctgggattacaggcgtgagccaatgtgcccggccacctacatatttttttaaacaggtttcttaagattggggttcagtattacctttttattcttctttctctttttttctacaccatagcctgtatagtagtcttgttttgaaaattaatgacaatttgagctaatcttttttttctttttaaacaaatgtcatggaatatgtgcatccaagttatctgagttaaagtggttagagcctggggcacattctgggtagttgtacttagcaatatcaaacttgttctctttcaaatttagacttaaatttttaaagtaatcagaagtctttcagataggactggcgctccattagaataacattgttttttgtgaaaaatagcatgtgaccaaggcagaaaactgatgtatgtattgaaaactgatggcagttctccacaaggggttctgaaatattttacgtaagagaagcattattggaatagatatgctagcatatagtctgctaacatgactgttgatacaaatgagcctttcaagctctgattattagaggacatctaagaactttgatattgacaggagcttattacctattatttagtgtaccaaaaaattaattaattctattggttgagaatggagattctctttagaatattcattaatgtagaccaagaacatcctcagttattctggctaaatagtgtatattgtataagccaaagattaaaatgggatcttgctttgtaatccatttttaagaaaaaaattcatgcccaactagcacttttagttttgagaatctcaaagcgtattcatgtcatctgaattttttttagttgtcagtgagtcctttcattgctcttactctcagtgacctttcttacaacaaatttgtcataaaaagtgggtgaggtaaaacccgtttttttattttcaaaatttatgatctatatcctaaaactccttgtctctatgacagtctgtttactgacaattcacaaattataatactctcagcttttctattaaatctaatttaatttgaacatttctccagtgcgtttggaaaagcatattggatttgtgggatcgtgttattttaatgatcaataaaaatgagraatacgttcttcataggttagtaagttcttatttaagcatttctcaaaattgctaaaatcttaatgtttatatttgctcattgtatgtttagattcctaaatatacttattttaaaaagtaaaaatatatatttaacttagmacttcttttcctataggtctctgcttggggtggttatgtatttatcatcaatcttattccactgcatgtatttgtgttgttactgatgcagagatacagcaaaagagtctacataggtaagtaatttgatttttgacatctgtcaactaagagatgttttgtattcattcattttattgaagagatatttctatttggtcawtattatgcatgaaaaggtaaaaataattttgtgttcattttgctgtttatattgataaggtcaggcatttttatataagtgctttgtcatcaacttttccttgacaagtttttttttcgtttttgtagaaattagtctgggtttaatatttgtctacactttttcctcctcttaattttggggaatgggaatttttatcatgaaaatcgttcacattttttatatcgaattcaacttactgtaagagattgacatcctcaaagtaagcagcttaataagctttcagaagctcttttttggataatgtactaatagactgagtctctgttgtctctagaaaaatgttcatttttctctacaggttttaaaacaatattnnnnnnnnnnnnnnnnnnnnnnnnnnnnnnnnnnnnnnnnnnnnnnnnnnnnnnnnnnnnnnnnnnnnnnnnnnnnnnnnnnnnnnnnnnnnnnnnnnnnnnnnnnnnnnnnnnnnnnnnnnnnnnnnnnnnnnnnnnnnnnnnnnatacaattctattataataatgtttttggaaaacaataacacaaagttaaatcttaattaaattcattttcaaaagcatagtagcttggcaatttctcagtaagttaaccatagattcgtcatatgaccaagcagttccactcctaggtatttacccaagagaaccgaaaacatatattcatacaaaagcttctatgtgaatgtttatagcagcatttattgtgcataatggccaaaaatgaagacaacccaaatgtctatcagctttatgaaaccataaaatatggtatattcatacaatggtgtattattaagccatgaaaaggaataaaatactgatatatgctacaacatgaaccttgaaaactttataccattatgtaaaaaagccagacataaaaggccacatagtatatgattctgttagtgtgaaatgtccagaataggcaaatccatagaaacagaaagtagagtttgtgggaaatgtccagaatgggtaaatccatagcaacagaaagtagattagtggttgcctggggatttaggaggaggagaatgtggagaggagaggagaggtgtgactgttgaatggatatggggtctctttcaaggatgaggaaatattttagaattatatagtagtgatggtcgcacaaccttgtgaatacaccaaaaaccattacatgataggttattaaaagataaattttatagtatattaattgtatctcaacaaaataaaaaagcatagtatattacatttatagccatttcagcatactttttcatttgatactgtgagggtaggtactattctcattttacaggtgaggaaacaagaggagacataataatttgctaaagatcatgtagctaataacggggctgaggcttgaactcagattttggctttaaagcctgtaatgagccagctgtagtagctcacacctcttatcccagctactcaggaggctgaggctggagttccacttgagtccaggagttcaagactgcagtgtgctgtgatcttgccactgcactccagcctgggtgacagaaggagacctgtctctgattgcatgaatgactgaatgaatggcccatgatgctaaaaaccaccaaatctgtgtgcctctcgtttaaacaaataaccgtactgttgaaatacatacacctatgtatttctctaccccaaaaacactataaacagtagttgggatccagaaaggagaataataaataacagattaaactttttttttttaagttaaatggttacagtgaaggaactaagagggtgttttgttgttgctgctgttgttgttgttttgtgtaaatttaaaaattggggatcttggaaatttaatggtcagaggaatacaagagagagaagattgagaaatacactttatgaaatgccatgattcaggaagaagagccaaaggagatgtcagaagtagtcaaataagtatattgttaaaatggtcagatggaagtatattctacataaaagtttaaaattcaagcagtgtccaactcccctttaaccttagcaccaagatttcaaaggattagaatttgagaaaggcctttgtatttggtagctgggattttttttttttttttttttttggtcactctagaaaaatatgaaattcatactactttggttgattcttgagagtattttaagaagaaagaataataaaatgggttagggatgtatgtgtgtataaagctaatgttcataatgttcaaattctccactctacccaacttgtttcttttacttataattatccaggagtattttgatgatttctagtctgctttcwtagggtttacttctaaatgkatggaaagtagtatgatagagcaagtgttgctcttccttcatccagagtgtgtcaggatttaagttcaatttctcttaacttaatggtcctaaaaactatggaagcattgtaaagtgtttgtatataaagttctttgattttggcacgtaacatcctttgtcttttgttctctctccccttgagcagaaatgtttaggtaaaaaaaaataaggattgataaatgtcagactcataattatattaactaaaagtttagttgtgttgttctaagtgttgaattaaatgacttgaattattttaaataattatgaaaaagttgtgtcctctttgagtagattttttcatgtgtccttaaaatcaattgtagcacaaccacagaaaactgtcaaagtttattcacatgtggaaaaggaggcacatgggaggtaatgtggatgtatagtggtagaagagtggcatgggaattgagcaagggaggtgtaagaaaagctgagatgggaggccgtctctacttgaaattttgggaggaaaaatttaattttctgttaagagatatttttgacttggtgaatttcactatattgggaagtaaatgtttaaaaattatgttatgcataggattctactgttttaaaaggaacacccaaaccttatgttgcatttgtagaaagaatggcttgcaggaaatcacagtaaaactgatgggatgtgaagtgatttaagctttctaatttgattaaagcttatcatactttgtgttcatgtcataaggaaattattaaagatatgaagtcaaatttagggatatttactgtggtataacttgtaattgtgaaaatatggaactaacttaaatgaccaataggggaatgattttttaattgcagtgttgccatatggaatattatgcagcctttaaatttaatctttttgagtatttgatgacacaggaaaatgttaattaaaagcagacagtaaggattaccagtgattttttttcatacttatttctgctttccagatacatacaatgagtatgtgttaagtttataataaataagacttggtttttagtttatagaaataggaattgtacctcaagggctgcattaactagattaggttagtaatttaagcacagaaaagaaatcaatttctaatattgatgaatgcttttgaaatgtcactagaacagcttgtttatggcattgtctatgttttctgcagtgagttgagtaaggagagtaacagttgtttttcatattatatctaaaatgtattttttrgatgatatttgctgggaaccgtcattaaagttttwtgaacatactacctactttagttctgtacaaattattatgggcattatatattttgtgaataaagaaaagataatccaattattgagtacattaaaagtaaagccaaattattaggagtcacatttatacttggcagctgtaaacagaacacagctaatgctagtttaacttagaaaaaacaaacttaaaaagattgcatgtaaaaaatccagcattaaaaaaagaaaagttcccggatacaagggctggaagctctggagtttattttgtctaattctaccatactactgaggaaattaaagcaaatttcactcaccatacatttattaagtgttgaaaaaataaatactgttttgtgctagccattatgatacaaagatgaataaaaaccttcgtgtaaggagtgtatattatacagtgtaatcaatttaatagcatatgatcaaaatggaaatagggaaaaatttgtgaaaatcagtttggactttaaccatgttcttttaaaagttttggagataagtcttgatcttgagaagagagaatagtacagaagcagacttagaatttgtggtaatgtaaccataaataaaaggtgccatgacattgagggtaagagtacatactccagagccaatctaccagggttcaattcttgctcccttactactgtgtaactttggacaaattaatgtcctttgatgtccttaggccttaatgtcctcatgggtcaaataaagataataatagttaccttacagattgttaaggattaatgagttacaggttaatatatgaaaggtgcttaataatagatgaacacaaaaaaatactatttaagtgtttgcttttgttgttgatgttaaagttatgaaggaatagccagatagacaaaagagttcaagaggctaagagaggtgattactgtattaagactgaaaggataaaaccccagtgtgaatctaaggagtgttccttcttttttttttaagtgaaaataaactttcactcaactatttttggttgtgagaaacataatggagaaataacacttgtgtgttataaagtacaaaatagcaattaaaatataacctgtaataggtgtttttttttataattttaaaatttgataataaatgttgatatggtttggctgtgtccccacccaaatttcatcttgaattgtagctcccataattcccatgtgttgtgggaggaacccagtgggagataattgaatcatgggggtggtttatctcatactgttctcatggtgdtaagtctcacaagatctgatggttttataaggggaaatccttttctcttggttttcatttccctcttgcctgctgccatgtaagatgtgcctttcaccttctgccaagattgtgaggcctcccagccacgtggaactgtgaatccattaaacctctttttctttataaattacccagtttcaggtatgtctttatcagcagcatgagaacagactaatacagtaaattggtactggtagagtggaaggctgctgaaaagatacccgaaaatgtggaagcacctttggaactgggtaacagacagatagatattggaacagttaaagggctcaggagaaggcaggaaaatgtgggaaagtttggaacttcctagagacttgttgagtggctttgaccaaaatgctcataatgatatggacaatgaaatctaggctgagatggtctcagatggagatgaggaactttttgggaaatggagtaaaggtgactcttggtatgttttaacaaagagatgggtggcattttgcccctgccctagagatttgtggaactttgaaatcgaggtagatgatttaggctatctggtggaagaaatttttaagcagcaaagcattcaaaaggtgacttgggtactgttaaaaagcattccatttttaaaagggaaacagagcataaaagtttgggaagtttgcagcctgacaatgcaatagaaaagcagaacccattctctgaggagaaattgaagcaggctgcagaaatatgtgtaagtaacaaagagccaactgttaatgccaagacagtgggggaaatgtctccagggcatgtcagagacctttgcagcagcccctcccatcataggtccagaggcctaaaggaaaacatggtttcatgggccaggcccaggaccctccctgctgagttttgcctagggacttggtgccctgtgtcccagctgctctagccatggctaaaaggggttaaggtacagttcagacaatggcttcagaggttgcaacctgtaagtctcggcagcttccacatggtgttgagcttgcaggtgcacagaagtcaagaattgaggtttgggagcctccacctagatttcaaagaacgtatggaaatgcctggatgtccaggcagaagtttgctggagaggtggggccctcaaagagaacctttgctagggcagtgtggaagggaaatgtgggcttgaagcccccatacaaagtycccactggggcactgccaagtggagctgtgagaagagagctaccgtcttccagacctcagaatggtagattcactgacagcttgcaccatgcgcctagaaaagctgcagacactcaatgctagcccatgaaagcaaccaggagggaggctgtaccctgtaaagccacaggggcagagctgcccaagaccatggaaacccacctcttgtatcagcgtgacctggatgtgagacatggagtcaagggagatcattttggagctttaagatttgactgccctgctggattttggacttgcatgggaccttcagcgcctttattttggcccatttctcccatttgggctgggtgtatttatcgagtgcctgtacccccattgtatctaggaagtaactaacttgcttttgattttacaggctcataggcagaagggatttgccttgtcttggatgagactttggactgtgggtttttgtgttaatgctgaaatgagttaagacttgggactattgggggactattgggaaggcatgattggttttgaaatgtgaggacatgagatttgggaggtgccagggcataatgtatggtttggctgtgtccccacccaaatctcatcttgaattgtagttctcataatttccacatgttgtgggagagacccggtgggaaatgatgcatgggagtggttttccccatactgttctcctggtggtgcataataactctcacaagatcnnnnnnnnnnnnnnnnnnnnccagtatttacagtggtattcagtatgtaattaaacaagtagttttgatggttttgatcctaaggtattgaaaacaataagaggctgtacagttttatgtttgtggcagataaagttttatcaagacaagattccatcttctacagatgcaatattattatttgcattaattgttttgcctttactgtttattgtaccttcaaggtaggtgagccaagagcagacaggcaaacgggactacaataactacactcctccrcccctattttttccataggttttcatttaaaattagaagtttcagtgttgattacataaagtgagttttcaagatgagtgttgtaacaggcactgaagctagttattgggggaaagagatgggattttccttagatcggtttacaatatttatggatcttctttgcagctttgccagtggatattttagaggttattggggttgggggaaactgaaagttcaaacacaaagggaagatggtattgcttgcaccacctatgctgctaatatgactcattgtgtagttcacaaggattagtcctccagtatctccttatattaaaactcgggatatttagagcaaggatctcacctgtgttgtagcaataatcattggcctgatcaaaaaggctttcagtgaatagaaacagtcttcatgttctacaggccaaccattatctagaagaatagacctgagtgagatttcctttaaaggtctattcttctcattgagaaatgtgtgtttcatagtccagaagaattaactcctgcatagaagtagttatggattcttcatggtatcagttaaatgaatttaggagcytactacagtagtagtcgacaataagaaaaggatgtgttggccaggtgcagtggctcacgcctgtaatcccagcactttgggaggctgagttgggtggatcacgaggtcaagagatcgagaccatcctggccaacatggtgaaaccccatctctactaaaaatacaaaaattagctgggcttggtggcatgcacctgtagtcccagctactcwggaggccgaggcaggagagttgcttgaacctgggaggcggaggtcgcagtgagccgagatcatgccactgcactccagcctggcgacagaaaaagactctgtctcaagaaaagaaagaaaaggatgtgttaagaagaaccaaaacgtttttagtggcaacatgacttgtggtaacaggatttgtgatttcctgtagtttaaatctttttttattttttgtttgttttactctcttctttatgagtgaattaaatttgctggtatttgtcttttactacttcttgatatgttaggtatagtcactacttagctctagaagctactgaggatcattacctaacacctcttaagttacataaaaattatatattccatgagtttttcatagtctccaaacacaccacacatacagtacctttgtaatttcactatattttaatattatttcattaaacattgccagaattaaatgaattgttcccacagggtagaacttaaaccaagatgtactttgtttagatttgttttttcattttagttatcagtaccagatacacttgctgagtttgtttttttgtttttttgttttgttttgttttgttttgagacagaatctcactctgtcactcaggctggagtgcagtggtgccatctcggttcactgcaacctctgcctcctgggttcaagcaattctcctgcctcagcctcctgagtggctgggactacaggcatgtgccaccacacctggctaatttttgtatttttagtggagatggggtttcaccgtgttgggcaggctggtctttaactcccaaagttctgggattacaggcatgaaccaccacacccggccacacttgctgttttaaaaatgttgtgattaagtatctctactgaagtgttttgaacacgtaagtaatttcttgctgcttttacaagtctggagtttgtaaaatataagtttcagtgattcattctcaacatagtttataatgagcattgtccttggaaaagagaaatgatttttatcattatgtatgcctgttaagttaatcatatatttctctgctggtcaagaagaatcagtgttttgtgtttttttgttgttttattctttaatccatgtttcttactattctttatcctgcatatctaccagggttcacagtaaccagaagtgattacaaagaaataaaatatctttagtattcaaagccttcataagcctttaatcatatttgtttataataaagcaaaattggttggattttaaagtatctacccgttgtgtgtgttttggctaatactattttggttgagagagagcaaagcaattcaaaaatgctaatgtgatttaacatgggttaaagttaatgggaatatagtatttgcataaccttttctaactttatttacataaaaagaagtataacaataacttaaaagtgtaaagagcactgtcaatgtaagctgcaatgcaatgccttatcagagagaaggtacttaaagattgctttggggaacagcaaacttcttcaatacttaaaatttcatttgaatttgagtcagacttttcagtgccttttcttttctagaataattcacttgagcacattaagtcaaggactatggtatatttcttctctatatctgtctcgtcccacccttggatataaaatatttccaagaatgtagacatctttaggttctgttgagattattacttatctgtcccagatgagagattttctttggttaagaataaacagaataataatatatgtgtgtgtatatgtatatacatatctttctaatggtaattttttgtggaatttttctcacacattggaattatcatctccagtaatgaatgccagtaactgtgcatccacaggatggcagtgtggtaacattttcatgatgtaataaatgatttacaacactattggtatcatgtatttccttagagctcaccactttgatggaatgctttattcttctaacttaaagggtaagaaaagtaggtttacatggatggatagaaaattgtaatagatgggtatagtagtttagttagggttcttaaagagttcattggaaggagaattggtagagaatgatggctatgggtttgtcttgttgaggtcttctgaaaacactagagaacagtaccagacattaattacctcttcgaagtccatgtcaagaaaagaagagatcttaagttttatagagcctttcccccaccaaatgtcacatgacctttcttcctaatattatggttatttgtttacatctctgatttttagcaatttatctgactcttagagggtaggattgatcttaatgggattttctgtttttagaatatattgaccatactcaagttaatgtttaaatgcataaattgaagaggtaatttctaaacatatattagatgctgtagtacaaagtctggcaaaaagcgtatgttttcattttacagtggagattgtgtttctttatttattttgagatggagtttcgcttttgttgcccaggctggagtgcagtgcgatttcagctcactgcaacctctgcctccccagttcaaacgattctcctgcctcagcctcccaagtagctgggattacaggcacgcgccaccacacccagctaatttttgtaattttagtagagacggggtttctccatgttggtcaggctggtctcaaattcccaacctcaagtgatgcatccgcctcagcctcctaaagtgctaggattacaggtgtgagccatcatgcctggccaagattgtgtttatttttaagaattgagttacttcaccattttttttactcagatgtatctaatttcttattttctatgtcttaaaatgtagatttgtaaatgagatttaaattgagatatagcaatatatgtgtaattttacaaattcaagcagagcagtcagtattaagcaaggtatttgttgtatttgacatattatctggcaagcaatcttcaactttatttaatggaagtacaagttgagtactcctaatttgaaaattcaaaactttctgagcaccaatatgattctcaaaggaaatattcactggagcgtttcctgttttgcattaccagtttgggtatgctcagctattaagtataatgcaaatattccaaaaatccaaaaaacttctagtcccaagcattttagataagggatattcaaattgtgtctatccgtgcactgaagagtgttatgacataaaacacatacctccaatatgtaaacatctcaggttcagtgatccaaaaaatgtgaaaaataggtacttgggtccagttctcttaaaagtaaatgcttatgtttggattgttgtagataccacgtttatcagatttgtaccattggtgctggtaagtgggtatgaatgagactaattgggatagaggaagtttcaaggtaaaatactgttgaaaacttgtctgtttctattagtttatctttagcattaacctatgtttaccaaataatacaaattaaagtcccgcctgggctttttcatttcctattttctttttcttgaactctccatcactcttattattaacttaaactctagtgcatctgcttctgtataaaatgttttctactttactaatgatagtaaatatctctgagaagttgcagggaagtgctgaattgagagtattatcgggtctcctcttttcaaatacgcctggaaatgaatttgagcaaatgtctaagatgaaacttcatctgtagttaccaaacatgattgctaaaatttttacattgtcaagcaaagtgtggctccatttgaagagaaagtatgaatatgactatgaatatgtatttgtgtacccatatacctgctagtgattatttctggagaatgtgacttagagggaaataaatagggtggaaactttttcactttttactttaagacaaaaacaacatctattacctttgcaattgaaccaattatccatacagacagatgcagatttgtggttaccatgggctggaaataggacagaatgtggagtagtaagagcttagtgagtgtagggttttgttttggggtaatgaaaattctttaggactatagagkggtagtggttgcacaaccttatgcgtgtactcaatatccctgaatttgttctctttaaaatggttatgtcatgtgactttcacctcaatttttttaagaaggctttttcattcagtttgtatcatttcttatattaaacctaaattctgtggcagtgttacagcattcagtgtttatttgtacttagaagaaagaaatccagcttcagaagtgattgtcgtgtttcaacataagtggacttagctataataaaaacataaatgacataaggttttctcaggcctagtcagtttctagttgtgcctttgtgtgttcagtgtttgtctaggatttgacttctcagctctggatatctgaaaggcctgttgatcatagaatcttagtttataattgttgggagggatctacaaatcttgtccaacccacattctatagtgaggaaactgaagcttttgctgttaagtagttgtaagattacatagtgatcttgttctcagtttttaattttctttatactttagtatgcatggttctttttttttctctctctttcctgcctctgtgactctcctttatcagggcttcaacaggctgatttgtttaaaaaaataatttgtagacatttcgggtcatgtgacggggaaatttttgtttaactttgattacatttgggtttgggtacgtcatagagggtaattccattccaacattaatgtgtttggaaagaacgttatctgatggattatgtctgttgtcttctagacatctggtcctccattagcttgaggtcaatggaaactttacttactttggtccttcctattaaatttatgagcttcttactgtcttcctaacactgtggtcatctcttatcatatagattgtgaggcaacttaatatttgaaccagtagcccctaacttccttctctagatggatttcttttaaaagcaaatgaatattctttctcatctaagttgggtgaggaggaaagtgtgtagtacactatgctacacagtatataggatacacaaatacgtgtattcctaaatataccccccaatctttgtttttgatagagtagtttatttgccaaaaactattaaatgatgtgtaatctgtataaatggggtagtttttacgttaacttatttcagatgggctttatttctaatgaatttttagtttcagtgacttcaaatactttctctctaatcaattgcgtaacagtggtctgtgaatataaagcaggtatttgacacaaattgtaaatccctccccagtttccttgtccatttagattgacaaacttaatttagattgatgagaatactataacatacttagtgtgaaaagaagtgagtttcttttattagatgctaaattcagtagctggtctgtataatggcttgacttctgtgtacttagttctttaattacagaaaacttggtggacatatgaatttatttaactcatagtactatacaaaggtattatgggataataaaaaggtatgaactacttcagagcttttgagacagtagcaggtattcacacatgctggcagtggtgatgagtattaagtcatgtgtattttggattaatgccaataggactgatatttacttaattttatgtatgtattacttagcttcttgagtcgtatgaatgattgctaatggtagatcaaaacaaacttgattccatttctgggaaaggaatgcaacacaagtctcacaaactgttgtaatgatctgcaaaatatagtacttagtatttttgaaaaatggatagaatattcagaatctgtaacatatggttaacaaatggacatctaataaaagtcatttcaagattctgttcttaaattcagttaatactttgctaaaaacaggatttacatatacatttatgttttaggtacttaatggtagtagtaaattatccttgtttcctattttgtctttatagcatatagcactttctacattgtgggtttaatattatcaatgcagataccttttgtgggattccagccaatcagaacaagtgaacacatggcagctgcaggtatgaaaaatatatattttccttcttctaaagaatatgtggacgtgtgattggcagtcttccaagagatgacagtttttgatcattttggttgttgcaatgacaaccaaagtaatctgactcacaattatgggaaatctgtagataaaaattttatcagagattctcattgcaaggttcatgacccattggaagtctgtgggtagttattttatttgtaacatctgtacactgatactatatagatagcaatatataactttcagaggtggtgtttctatagagtttattatcagattctcagtrgagtctgacttaatctccatcttcccagaatagttaagaatcactatcttactgttatatagcactttaaaatttatgaaatgcttttacttagatttctgaatggatgttgtcactttaccaagtagtaatttgagacgcagagagatgtatatttagtgttgtgtacacaataatgaatagaatgtctatgtaattacrcagtcacctgtctttacacgtatgcattacaacatttcctaaactctaaatctttgataatacttacttaaccattgtaaaatggacttttaaaaacaacccttaaaattgaatttatttttaaaaattaatattctagatgcttgaggattcttacatcctctttgtttaaagttttatgtttaatgtttttgtatcatgttttgtactttttgagaatccgtttttgcgactactcctttagttttgtatatcttagcactcacctttatatttactaatgtaggggagaaaagattgttatctctaacaaaagacagattaacaagagaaaagcataaattttacatgacacaagagtcttcagaagtgaaaattttaaaaaggcagggaaactgtatttttatgcttaggtttgatgaagagtggacagtcatgtagaaataagattggacaaagagaagtacgatctaatggcaacagactgggaagaacttaaggcctatttgttcatattcttcttggtgtctctgtgtcttcatcttttcctctgggtgttagaaggacccctctggaatgaggatcttataacctacttacaggaaggtcagagaattattttatgacctgcctcaggggagaacaaacagaaaagatgagagagacttcccagtttctgctggtttctcaaatgccaagatgccataatttggcatgagccctgatacaaatttagaatcttgtctaaatgtgtaattaaggtcacatcttattactcagttataaatagtaactatatatcaagattatcctgatcctaagtctttgtatccttcagcaaaacaaatcggagaattgtttttcagtgattttgaaaaattacttccctccaccccagaaaacccccctaaaatatagaggaaagggaggaacttaatgtgttaaataggcttgttattcaaatgggattttttttcccctttggtctggtacatgtgtaaggagtctgatcatttaggaaaaaaaaaaaaagtcacagaattttttggatgtattaattaggcaactgtcatttgacaaaggaaatgttggctagatgaaataagtagtctttgatatgaatggtgcaggacattctaagaagctctttcaaatgaaagtttttaaatgaccttggaaaactgctttgttgattatgtgacccttttctttaattaggtgtctttgcattgctgcaagcttatgctttcttgcagtatctgagagaccgattaacaaaacaagagttccagacccttttctttttgggtgtatcactagctgcaggtgctgtgttccttagtgtcatctatttgacttatacaggtacgtgttatcacctgtagggtgtgaatattgtctatacaaacaatataagaaaaatagccaaagtttctaaaatctgaataacagcatgactacaaagtgatttttttctttttttttttttttttgaatagtatatcttaattttgtggcatcaagctctgataaatctacttttaagcgtccttctcttgctggatgaatagtcccaaactataaaaagaaaaaaaaaatcagagcttctgttatttacctgttatatgctcaccttctcttgcatgcacacacactccctctttctcccctacttttcagcagtttactaacagaatcagtttcagtctgcttctggattctaagttaccctctaacctttatttaccagtccttagaaacaaattgaattctttctaaatttattctgtcaaattaatgtaaaagccgtgagtgtttaaaatcatctttgaatttatctggtgggatatggcatactggactagatcatttagaaactccctttcccctgccccccgtttattttattttttttaaatgatctggtcttgtttaatgccttagccttattagtcaactaaaagcttaagagaattggaaaactttctacaactttatctcaaatgtgtttctctggaagtgggttctccatggatattgtttttatttgatcactaccttattttttctgactgccaactgtctgaaataggttgacacctataaatgaaaactgaaattctttgaacattagtttgtctatctataattagcaataaacataaaggcaataaaagatttacaaaataataaaaaggcagattaatttcatccatgtttttccttccaaggttacattgcaccatggagtggcaggttttattcattgtgggatactgggtaagtacagttacattatttgrcatcatatttattgaaatactgcttttcctttgtttttatctgttttgtcagtgtttcactcagttcttgggcaacacttctaagtaccaaagatgctagtttagtaaatgttaaattccttttactttatcttgttatgatacctgttctgaatgcatctttagtatgaaatgtacgttgtgtattactgttctgcatgggcaactccttgtttccgttttgtttgtaagaatatttaggttacctttgcgcaatttaaagattgatttgtcttttacctaacatataacattttcatctttagtaataattttttattcttaagaattcttaaggatactgtttaattgccatagataggaagaaaatttaattttttctaataccatctgatctaagtttttttgtttttttaaatctgtgaaacacaagagaatatatatctgttgtggtttttttttttaaagtgctgttataaaatgagttaatacatttggttttgaattagactagttcaataaaactttttttctctaaaatgttttcctggagattagaaaatatctattgattataatttatgcccctcctctgttcctgctgttctgtcttgttactccccaggtggctcaataaaaaacaatttattgaacagacatgctttctgatgtgataccagaaggacttgtgtccaggtctaattaaaggacataagcaaattatgcatgaatgactggaactaacaattagacacatacttcaagagttcagcctgtggatcactaacgaatttgaaggataacccaagttgtagaatgttattctgattaggttaaattactaggttaacttgtgcagttatattataaagtaataatataactgtaaaataaattatacagttatatataactgtaaagtaaaattgtaatattataatataacttgtgcagttatattataaagtagtcaattaattgactactttagaatctcagggtgtttcagtaataattttttcagtcctttccatttccttcacctgtctccatgccagcttcatgtcaagcaaggcattattgtgtaaggtgtaattattgggtaaagtatttctgctacaggttgagtattcaaaatctgaaacgctctaaaatcatgaacttgttgagcaccaacatgatgctaaaaggaaatgcttattgaagcatttcagaatttcagattagagatgctgaactggtaagtataatgcaaatattctaaaatctgaaacactgctggttctaagcatttcagataaaggatattcagtctgtagtaataattccaaaaggtaatgagactcgttgatgcaaacatgaaaaatgctgacttaaactacagaacaaattgccagttgaacagagatttctgtattggaattcagagccaacattctcatgtctggatctagataattctctgaattttacagagggcatattagttttagttttaccagtgtagaccaaacrgaaactatccagtataactggttaccttggaaggtatatttaaataagaaggggtagggagtaggtaccatttctacaaccaaacaagatttcttcatctaaaaggaactcctgttttatcacttaattgtaaacaatattaacttttttaataccaggtatgcaaaaatacacattccaattattgcatcagtgtctgagcatcaacctacgacttgggtgtctttcttctttgatctacatattcttgtatgtaccttcccagcaggcctttggttctgcatcaaaaatatcaacgatgaaagagtatttggtaagagaggtttttaatgaatactttgatatggaatagttatttttctttttgagattatttactttaaatttttgtttttctatgtttgactctatatattcaagataaattttctcctttattttgcataggtgcttaaccaagaaaaattcactgagaggctgggcatggtggcacacgcctgtaatcccagcactttgggaggccgaggcgggcggatcacctgaggtcaggagttcgagaccagcctggccaacatggtgaaaccttgtctctactaaaaatacaaaaattagccgaacatggtggtgcatgcctgtaatcccagctactcaggaggctgaggcaggataattgcttgaacctgggaggcggaggttgcagtgagtcaagatcaagccactgcactccaccctgggaatcagagcgggactctgtctcaaaaaaaaaaaaaaaaagaaaaaaattcattgaatttgtattaagtattttgattgttttaatttaggactagtatattatggtttctgagaggttaatgttgtagtttgtgtttgagaattgaaaattttaactttgttgacaatagccttgactttgttttctgagtaaaattttatttaagtaggaagaagtttttagggacattcatcttccagatttcagagcaaagaccattttatagcggaataaggatcacctttcactaaacatcctcttcattgatagatttgtatatttccaactaataagacttgaaatacaaaatatttaaatgccaagtatttagggttctatatttctaatataagtggacaaaataagcagatatcaaaggcttctacatgatttaatcacacatgaaatatgctgtggttgttttgtatgagataaaaactgaaactgagaaaaactttatcacgtgcacaggatcacaccagttggtaagtaatttgtagtgctagaaacttgtacaattataggatctggaccatgagtgacacatgaatcaggaaagaaagaacagcacctgtaggggttcagtttaaaggattgcacactcattgttctctaggttaatggatcctggatgaggccctgttaatactgcatcattcaagaagatttaacttaaacctcatgactcagtaatcccattcctatgtatatatctaagagaagtgagtgcatatgtctaccagaagacatgtttaagaatgcattagtaattttatctacagtaacccctaatagtaaatattccaaagtcatcagcagtagcatgaataaatttttgtatatctgtagtggaatacaacacaacaatcattaaagaacaggatggggaaataagagaagccaatacaaaagagaacatttttatgtggttacattcctgtaaagttcaacaataaggaatactaattctttagaagtctaaatagtggttaccttttttgataggggagggggttgttactgactgagaagaggcatgaggacatataaaaatgttctatatcattatgggttgtagttacacaggtgtgtatatatacaaattcattgagatacacacttaagaatatgatgcgatgtattttttagtcaggaagaaaaatttaattagcatcagataaggtaggagctcacatgactcactgaatttgtaaagttatacatagccttcagccagaaatagttagagtcttttcctgtggttagcacattatccagaaagctctggctattggaaatttgtttcaaaaattttttttaagtttcttggcagtaactttgcaggttcctcctttgattaataacttacgttcttctcatcccgtttttgttttaaagcaggttttatgccagatattggcactggctttttatagattttaaatctataaatttattttgcctggagatgtcatgcacaaatatgtttttatctgccagctatgggttttttatgatgttattgacaaatagtgaattaagtctaattcttcataactaattaaatttgaatcatatacatttttctaaactgtggatgtgtaggttttatttagtgaacactagttataatttctaaatgtggctaattaatcagttgttcagtagtatcaatttagaaacaattagatygtttgtgagacatttatataattccaggttggttttatagtgtggttttaagtatctagttcagtttcctgggaactttttccctccaacatattgtaagagaatttgtctttgcagttgctctatatgcaatcagtgctgtctactttgctggagtgatggtgcgactgatgttgactttgactccagtcgtgtgtatgctgtctgcaattgccttttcaaatgtttttgagcactatttgggggatgacatgaaaagggaaaatccacctgtggaggacagcagtgatgaggatgacaaaagaaaccaaggaaatttgtatgataaggtggggaatctaaagtaaggcctttaaattgtctatgtcctttcttaatttttccaccacagtaagaactatacatatcaagaaatgttattaaatgatgatttggacaaactgtgacttttctagttggtctccactgtttgcctcaaaatatgaatcctggtcagtcctttagctcagagttagaaaatagaatgtaatcagagaaggaattcctctttttggtaatttgttatctaaatacttaagatatatacccttgttaatatacccttccatttttgagagcaaaaactttatgctgtactaaattacataacatttggcactgtaaacccctctgaaaccatgtggacagacaggtgcttatccttgaggtccatactcagtgcatactttcaaaatattttggaagtgacatttgattggttgaacagtaaaatgaagggagcaaaatgccttttttaaaaccctccagttcgttagcaataggtaactggccaatacaggtaatttatttttaatctatagtttctcagttggtgcaagtgtgaaaaggacttgtaagaattagagcacttgtcttggatgacatattaaactttgctatttgaatattgcctggattttaaaatactaataaattaaacttcccagtatcagtaataactttgaaattctttccttctataagatgaatgtaattcataaagatgtgtgttaataaacccacattcctgatttttgtgtttgttgttattgttggggtttttttgttgctttgtggtttcttaaccagccttgaaatttagaagttgtgactttttctattctctcttcccttttctgttggggaaggtgattttttaaggtaatcgtagttttaacaagtctgttggttttagggtttcgaaatcagaagactgattctgttaatgcagttttttcctatactaaagtggtacatggtcaaaattatagctgagcattgccattttcaggatgtggaattcagattttataagaatttacatattaagatttcaccagaatggggtcatttggttaatctcctttgtatttaattaaagtataaggacaactgggtttgaaagcagcttcttactggagataattattttgctctgtgaccagtttctggattggtatattcccaggaaaccttattcacgtttgacttagaaaacactccatcacccacataagaatatctgatggttatacattttctgagtcatagaattaaattgatagataaacagtctctcaactttttccattgagtatcttaatgaagcaagtcaaataatgaatttgtctaaccaatttttttaatatctttaggcaggtaaagtgaggaaacatgcaactgaacaggaaaaaactgaagagggattaggccctaatataaaaagcattgtcaccatgttgatgctgatgctattgatgatgtttgctgtccactgtacctgggtcacaagcaatgcctactctagtccaagtgtagtcctggcctcatacaatcatgatgggtaagaaaataactcggatacaaaaacattttatacttacacttctttttcgttgtctcaaaggatataattaaaaaatagaatgttgtttgtgagattctgcatttgcttgtttttaattttttattttaattttggtaggtacacagtaaatacataattttatggggtacattctatttatgtcttttgatacaggcatgtgtaataatcacgtgtaaaatggggtttccatcccctcaactatttatcctttcagttacaaacgatcaagttacactcttagttatttttaaatgtataattaaattatttttgactgtaatcacactgtggtgttcgtacccgttaaccatccccgtgcactctcccccgcccctgccagcctctgccttgtgctcctgtgaagctctgtatttgaatctacctttctttgtcctctcctccaccttggtgccatgggtagtaatcattgtatttcatgctcttttccagaatatttctgcatgcataatcatatacattagtttttctcaaatgtgtggtctttgtacacacagcatcatcattaccatgaaacttgttagaaatgcaaattcttgacctcaccctaatgttacagaattagaaacctggggctggggcctagcagtctgtggtttaatagacctaggtgattcagatgcagctaaaatgtaagaacagctgatttatgtattgccatggctttcaactactctttcacttgggagcttattaggcttgtacactattaggccctaccccagaactactgaatcagaatcggctttttttttttttttttaaatacaagatatgcaggtggtttgtgcacacacacattagtttgaataacaccagtctagctcttcattgtttcacttttttttttctcattggtagaggcttttacttaataactaccatccttaaaatctgaaagtattcagtggtttaatacctcaagattttaagttagcctcttcacatttgtgacatctcatttaaaagagtattgtgattcttttcagcaccaggaatatcttagatgattttagagaagcttayttttggctaaggcaaaatacagatgaacatgcacgagtaatgtcttggtgggattatggctatcagatagctggaatggctaatagaactacgttggtggataataacacctggaataacagccacatagcactggtaaggatttactaaatacaaggttaaaaaatctttattcactccttagcaatcaggcttcacttgtgactaaataggaaaaatgtgggtgaaaagtactctgctgaattctcaaaatacttttttacacatatgttcaataaagtgagttcaaggtgtgcttattttgtttttaagaatgatactaagtatcattcagaattgcaggctgatttctggtagattttatgataaatttagcttactgaagaattagacaaaatctgaaacttaaaatgtttggcttgtatttttcgtgttataaactaaaaattatttgcaaatatgtaaagtaaatgcactgtattttatggataggcaaactgttcctctagctattaaacaactaatctgcatagattaatgtaatcccctctttgtacttcaaagatttttaaatacaaagagtagtcttaaccaaatgaattctatttgtattactgttgtagctaattatcagatgcatgctagactggggagaagaaatgtatgtgctagcaagatcactggccagccctggcctgcggttgtgagaagttgttttttctaagcttgcctgctttcatcataaaatgttaatgttatagaacttaattattagcaaaatattagagcatgtattctgatttttgactgtaaattagttatagtagttgagaggttcataaattccagtgcatttgttgaattcatagtaaatcatttctgcaaaaaaattccatgtaaaacaaactcttgatgaattccatgttgtagtaaaaaatatacattgatttttatgaatgtgggaataatcaaaaacattctcatttttttttaaattctgcaggtgggaaaagctatgtcttctaatgaaacagcagcctataaaatcatgaggactctagatgtagattatgttttggttatttttggaggggttattggctattctggtgatgatatcaacaaatttctctggatggttaggatagctgaaggagaacatcccaaagacattcgggtaagaaactagataattccaggtatgtgaaagatagctcactgtgtcctcgtaattctctcatcttgctaattgcattgtatttgtttcatcatcctatccctcagattagttccttaccctggctttactatttattaaagatagtagaggcatttcctatattaaaactttttgaagtcaaaatggaactaatatacyattcttccctatgaagcagtcccttgccaagacttcttacttttacgtctcttcacagcctctcatgtcatccctttctttccatttccattgcttccactctagtacttacccttatgcttgtaaacctgaaataggatagtaaccttgaaattgctatctttgccttgtttcctccctcccagtgtaagataaaattgatcgtgttacttttaggctcaaaagacttcaatagattaagggaaagggtcttaaaaccatatagacatgagttaaaactaaaactgtcaacttgggcaagttattttagcaagtcaacataatatgctttgagcactaggtctagttctaggatctggaattaaaatggtgaccgaggccgactaggttatcttttgccaaaaataactaatttatagtgccgtttaatgagaatttatagtaaagtagttgaagccccagcctagggactggtacaaaatagataacctctgataaaacattagtataaagtgtaaactctttagcttggaatgtaagcctctttatgttttgccttcctttgctggtgtcttgttcttctgccacctttgtctactctgccagtatgttctagcccctgaaacttgcttgtgctttctttccttgactcacctgacacgtgtgtttttactgttctctttcctggaataccttccctaccacagacttgccccctctccaaaagcccttttctggtatactcacatctgtactcatcaccaaattatttatacctgttttgcaggagtccccagaccccaggcagcggaccagcactggtccgtggcctgttaggaaccaggccacatagcaggaggtaaggggcaggtgagcgatcattgccgcctgagctccgcctcctatcagaccagcggcagcattagattttcataggagcacaaaccctatcgtgaactgcgcatgcaggggatctaggttgcatgttccttatgagaatctaactaatgcctgttgatctgagggggaacagtttcatctagaaaccagcagccctccgccatccgtggaaaaattgtcttccacgaaactggtctctggtgccaaaaaggttgggaaccactgcttttttgtattagattgtgtcttacctctttcactaaattgtgagcttttagaagatggacatccagcattgtgcttttacatgatgaaggcacaaaagataagagtaattgccactgatccagaataaaggaatcttttgggaaaaatgtatgcaggtgtcgtgtgatgcagatgaagtaaagcctcagatttcctggtcaaatgtcaatgctgtaatgtttcccttaactgtgattagtaaacattatttttttgtattaatcttctgaaatttaattctcccagtatggtttttatttgtggatttgctttagcagtcagtgttaaaactgtgacatgtgatagatcactgtttctaaatgtatgctttgaacattaatattacagaagtcctaaatttctgtgcatcttaaattatttttaaactttgtgaatagataatacactcatatggttcaaaagtaaagtataagaggatatacaataaatgtctacccccttcacgtgattcaaaaataaagtataagaggatatacaaaaaagtctaccccccctaaaaaaaaaaaaagttcctctataggtaataacaatgtattgtgtacttgtaagttgctaagagagtagatatttcagtgttctcactacaacaaaataagtatgattgatgcatatgttaattagatcgatgtagccatttcacagtgcatatttcaaaacatggtgtacaccataaatatacacaaatttatgtgtcagttaaaaatgggggggcgggcgggcggtggagtccctggtaatcactggttattttcttgtgattcttaacttctagcaagttatataccctgttcacttcataatatgtcttggtgatttttccatgttagaatatggagaacttctttattcctttgtttacatttgcacagtacgttgcattttttgtgtgtgtgcatgatttatttaacctgtcaccattgatggaatttagattgtttccagtattttagttttataaacaatggcataataactttctgcattcattattttggccatatacaagtatctctgtagcgttaattcctggaaaaggaatttctgactcagaaattacattttttacctagagtgccaaaattgttcctcatagaggttaatttataagttaaccccataaaaattaccacaggagtctttttaacattgtcctccccaaataaagccgattttaaagttcatgtggaaaaatttagctagaacacttaagaaaactctgaaaaggagtaacggagatgaggatgggtaattgagagagccagccttacctggtattaagccatggtgttggtaccagtctctttaaattatgaaagtggctatgtgcagtggctcaagtctgtaatcctagcattttgggaggccaatcacttcagcccagtagttcaagaccagcctggacaacatggtgaaaccctgtctctacaaaaaaatgcaaaaattatttgggcgtggtgccgtgggcctgtagtcccagctacttgagaggctgaaatgggaggattgcttgagcccaggaggttgaggctgcagtgagccacagtcacgccactgcactccagcctcgaggacagaacgagacattgtctcaaaaataataattattaaggccttataacatggttcgaagtctggtgggattaatttttttgaggtgtaactgaatatggctttataaagatacctcagaagcttattcttacagggaaatgaaaagaggaaactgtagctttgaatatgttaacttgaactaacatagaacttgtggtttctttcttgtaggaaagtgactattttaccccacagggagaattccgtgtagacaaagcaggatcccctactttgttgaattgccttatgtataaaatgtcatactacagatttggagaaatgcaggttagttaaatccatttttctctaattttcattcaaaataatgtttaaaacaagtcttatttgcctctagaaaacaggataatgatattttgattgtgctgaagagaaatgtgcttatctaaatagtctttttttcattaaatttagatttctgaaactaatatgtgagaaattagaaaataraattttagatcaaggacttctttctaacatatttattaacagtagcctcaaatccaatctttgcttgccatctcaccattagaactcatgcttttggaaagtattgttctccaagaagagttctcctagctaggaaacagtgtggtgtcttaggtcactttgctgcttggtggagaaaagcttaaaattaaagattcgaagtaaatagtcacttcagatgttcactctctccccattctccgttaccacaaatagctagagctgcctgggtcagagttttctagtatattagaatgatgtggtacaaaagcttaagggtctacaaaatgagtgaatgtgcaaagaggcattgtggcagaaagaagaaacaatggacttgatgtcataacacctgtgttttcgatcaggttctgtcaagtcatgtaactctcagacaatttgtatctgccttggattccacttggttcttttcttgtttgtaaataatggggcttggattgatgacttgatttttaaggaaaccagaatatgtcaccccaaaatatgcctctttgacatgaaagttaattttgagctgaaggcaatttagaagcagcaaacagagaaaaagttctatctaacctcttttctgcctaaaggcagaatataaattctcctttactggagacaactctaagactcttatcagcccagagaaagcaccagaggaatctgcaaacaaaatttactccattagtttctcccatatatgtacccttctactagtttctcccatatatgtacccttctactttcccatcttgaaggcctaagaccactatcctttgtcctttctccacaaatgtattgttctttgttaagcatgctataaaagccagagttctaagccactgctttgagttccttttcattgaggtttctcctgcataatgtgcgccgaacgtcttaataaatttgttttgctcttgttaatctgtcctttgttataagtgtctgtcccaaatttttatcttcatactattagtttcactgaaaactgcttatttctgtattgctctctggttaagttgataagaaagcagaggaaaaattgcttgcttaattttatactatcactggggatcaagataactatcaaaactaaaggggtgtgtttggacctcaatttgtgaatcaagttttaccgtgtttttttgtggtgtttttttgttttttttttgagagggagtctcgctctgtcgcccaggctggagtacagtggtgtgatctcggctcactgcaagcttcgcctcccaggttcatgccattctcctgcctcagcctcccgagtagctgagactgcaggcggctgccaccacacctggctaattgtttgtatttttagtggagatggggtttcactatattagccaggatggtctcgatctgacctcgtgatccccctgccttggcctcccaaagtgctgggattacaggcatgagccaccgcgcccagccccaagttttatccttttctaaaacaccatctttgtggctaatatggactagaatattcacttggtttcagaatagttagcatatactgtgttcctgtttgttgtgttgcttcaagtaattccaagtgaatcatattttatcattattcacttggaattactctgtagatgacttaaaaaacagcaggtgataatctagatttaggtttttgtttgtgtttataatttcttttgaaggccacacttggtctttaaacgcttgctaagaaagaagcacactggccataataatcagttaccccagaaaacatattttctgattggcttgtttctgattagtttctctgctcactactgatcacgttgaaggacctttttcttcctctcttttaagtttatcaatagttttaagccatgttcccagcatacattcattttgatgcctaccttactcaagaataatatatggttaaaatatgaagtgtaacttttgctatcatatagataagcaagaacaagtaattcactatttgaaggagagctggttttcatgtttgttttaaagttgagtttggccaggcctggtggctcacacctgtaatcccagaactttgggaggttaggtgggaggattgcttcagcccaggagttcgagactagcctggccaagatggcgaaacccagtctctgtttaaaaaaaaaaaatggaaaaaaaagttgaatttacttatgctagatttgtatgtcaacataaacttagtctgagcattttttttttccccgagacaggatctcactctgtggcccatactggagtacagtggtgcaatcatggttcactgcagtgttgacctcctgggctcagttgatcctcccacctcagcctcctgagtagctgggactacaggcacataccaccacgtccagttaatttttgtattttttgtagagacaagatcttgctatgttgcccaggctggtcttgaactcctgggctcaggccatcctcctgcctcagcctcccaaagtactgggattataggtgtgagccaccacatcaggacggtctgagaatttcttaaagtctccttctctccctatgttttccctttttatccctcataaatcctttcacggtttggtttttttatttggcctcctttgtagttcccactttcagaatgtagtatctcttacttgtgcatttatttaacaaataataattgggatataaagctacactttgaataagacaaagacatgtttacatcccaatcgaagatacaggtaatttttagcgttaagtaaagatgttaataatatatgttatggggtaaaagaacaagatgctatgaggaaacaataaaggagatttgtcagtcactaatctcaagaaaatatttccctgaagggggtggtaaaggagctagccatgcaaaagagctgaatgaagaacacgccaggcagagaggatagatagtgcaaggccctgaaacagaaaagaagccccttgggtgtgttctgtctgtatacctataaaaagggctttgatagatttcatttctatgttttggtgggttttttttttttttaatgcctttagaatgctcatttactctaaggattttgtgaaattcttactctgatgtacttagtttctctcttcctgattttttcctgtctagttagcaatacatgagaactattaaggtagatagattacttgattgttttcctagtttaaagggagaaggtattactgtaatgataacacttactgtcttataacactgaatgttttccaatatggttaacacccaataataatgtcacttttgcagctggattttcgtacacccccaggttttgaccgaacacgtaatgctgagattggaaataaggacattaaattcaaacatttggaagaagcctttacatcagaacactggcttgttaggatatataaagtaaaagcacctgataacagggagacattagatcacaaacctcgagtcaccaacattttcccaaaacagaagtatttgtcaaagaaggtgggtgccaagtgaaggcattaaagggtaacttaaggtgtgttggtttgtatgaaaaagaatttctggaaattgcaataaatttccatctgccagatttataaagactatggcttctatattaatacraagtaaatatcagcctagcctgctaggagcattcctttcaaactgagcacttcagatatcccaagctgagatttttccagaggccttctggctttggtttgtgctattgccattagtaagacttacttgtaaagtaagatgtagctgtggccatcgctttccaaacctgtatgaaagtaaaaatgctaaattctcatcttttgagcagagcaaatttatattgcatcttcatgttccattcttagtatgatgttactctattattcattgaataaagaataggtttgggttgggtgagtccttctgaagcccaaaaaaatcatttatcttaagataattattttttaatgtaattgtgacaaagcttataggcaggaattatgagactactgcaattcttttctaatattatataagatatgaagtatttcattgggggtcattattgctcacttaagccaaatagattataatttttgctataaaagatggctaaaaattagtatttatataggttgtccagcagtaggaaatgggaagtaatgaacagtcagataaaatgttaaggttcattataaggtactatccttataatactgattattattagactgactttgaatctcattttttaaggatgcttaggtttacatagctcagatcagctatcttatatcattgaaacaactgtcttaactctttgttacttaaaatatacatcaaatatattcaaaatacagatgattttaatttgtactataaaagtgctgaatattaacggtgtgatatgtaaatggaagctttttatatgaatatgtgccagatgtaaattaccatgtctagactaatgtatttaaaaatgtcacatagagctgacattcattgtgttagtcatatgaaactcattatctttaggtaaaataacattaaaaaatcagatgattgtcacaggcatgaggtaggagaaactggtgagcagcaaatgctgctattctcaaagcagttactcctaagatatccaagtataactaaggtgtactttttctgcaaaaagagggctgttgaacttgttgtctgatgatatagaccccaaaggcagtgaattttcttcatttgaccccttttctcttcccatcattttccccaaataaatgtgaatggataaataaaacataatctgtcttgtgtgcccaaaacatatattgtggtggccaataacatattttgacattctggtttccatggctttagatgttttgtactaacactatgaaggaatgctttttatacttccctttctctatcctggttttgactttggaggaggagggtatacataacagcatccattctgagagtttaccagccatcgcaaagccggcatgactaaggcactagaaattgtagtccaggctgcagaaaaggctttttggcacatggttcactgccagtaggagaaaagcaccctgagggctattacacacttggatattcctggggcacatcataagatctcatagaaaaagtatcctgttagaatctggatgtaattataataaagaaactactagatctggtttgaatttttaaaaattgtaccctctgaagtttcttactttgtgccttaataacatcagtttaacaataaggtaatataatggggttaacaagttagcagtagctaatttttagtaccttaagaaggattgcattttgccttgtgttctcatccctgttagaaactactataaattatcttgaattgaacatcatggataaaggaacatgatgcaggatttacccagtttctgaaacctctgagagttgtatttaaatgtgaaaattgaattgagtggtcagtctcttgagtcttctgcctctgttaacccagagctttgatggtgcattaaattacttagtttcaaaaaatatttgctgtcttcaatatctagggctgtgtgtcagattgaaagacatatgtgcctataatttatcctgtggggttctaacataaatattttagcagtaatttgtaccactgcatttccggtaatttgtttctaatactaggaaacgtctattgaaagtattttagtgggatactgaattgttaagaaaaatattttatttttaaaagatgtatgaaactgaaggaatattgttttgctttacattttcaattgcttattttcctacctaaaggattatttttagagaatgtgccaagtgattatatctctcatttttgtagatggttacagtcatcctcattttacagaaaacagggactctaagagttactaagttaacgtgtttttctggcacacacctaatttcctggaggctaaatcaggagcagcattaccatttctgattccttagtctagtgttacatattctgtcttgcctggaaattttaataattacagctcagcactttgtggttgagaagagggctgaagattcattcacttgatggtgaggatgtctaggaacctagtcctttcactttgaatgtgttagtgtactcaggtaagaaacaccactaacagtttagtggtgttcactgaactattcaaggaatccagtcacaagaagagcagagagcttactaagtcatcatagtkcagtaaaccatgtgtgtgtttatagattttttaatcrgtaagaaacctgcattaatactatgtgttttgtttttttatagactaccaaaaggaagcgtggctacattaaaaataagctggtttttaagaaaggcaagaaaatatctaagaagactgtttaaatgcactgttctggttcctaacttgaagcagttgtccttgtgagaaccggtctttgcctttagctcatgtcgtgtttcacagcaaagagggtacagaaccatcactggtccaggttaatgtacaaaattttctggcaatgcctgattaaaaaaataaaattggcttgttgagaacagctgttttcgatttctaatgtgaagcaagacagagcactgctgtaaatgtctagcagcagattttttttttattggtacatattatccttcaaatctgagaatttggactaactgcaccaaagaaccctctaatttggtccctggcacatgcatacttgtcaatgtttttattcttttacaagacctgcattttatttgaattacccgaatagcaatatgtaaaatacaagtgacaaaatgtgatgagagcttcttgaaccggtaaactagtacaggtctgagaaagacatattagaagaatcattatacttccttgaattatatttattttcatgtttctctaatgcaaagaatgtttcatcaaatgtatattttctgttgcttactgtttgctctgagaagaagctgctgtttcaaagatggacctctgagtagctaattgattcaagtagtttttttatgttgacacattattactgctgttagcagtcgttttcaccaggtacttacagagcagatttcatacatcattcattcaagggctaaatttatattttttggaaatcatggcaactacacaggatgttgcttaccaggacggagttttggtatcttagtactgaagttagcactatgtttacatgcaaaagattaaggaaaaaacccttaaagtggacaggtatccaaagttcattttctgtgactcatcaaagtgacaaaagacttgtaacaactttgcctggacttttttcattttacaacagttcatccattcacartgattttgttctctgctccatattttttaatcccttaagcatttgatgaaacactctttagtgctatatgcattttcttacttttgttaaaaatgtgacarttgtcaaaaaatgcactaaaatgtaaatggagattgaacaagttcactttccagcttataggcaactttatacagacttgaacattttctccagttgtttagtaaaagtgaaagagaaagggtttttcctgccacaggatataacttttttttatataacaagcataacacaccactgcttttggtggaaaagtgcagaatagtatgtaccytttatgaagaaaaatgtaatttacaatattcagtgagaatgttactgctgattttcttttccaaggtgtagaatattctttgatttatagaattcatttttgacccagatgatggttcctttacagaacaataaaatggctgaacattttcacaaatagagtgtaacgaagtctggatttctgataccttgtcatttgggggattttattttactttgttgctttaaaattcaatgcagagaagttgttgactgtaggggaaataaagttaattcaaattttgtgttaagtgttgttttttacaaatcttttggttttgaaaggaattggtactgaacacatacctccttcttccttgttgactttcacaaaggttttaaagaaaatgtgtggaaaaaaatacgttagattatttcatcttagaccaagctattttatttggccttcttttaccctggaatgaaaatctcaggtttttttgtttttgtttttgtttttgttttttgttttttgttttgtttttggaagggatttggggagggggaacacctagccaactaggaattttatctctgtttaataaggatagggacctaacaaaaccatccatgaagttctggtaatgaaatgtcaagtctcagtatagaattttctcattagaaaaatcccaaaggaaagacccctcacctttctcaggaaacaacattttggttcagtgtatcttgtcagtaaaataccatattgtaactgtttgagcacttgtattgtagcacaaaagtgaaatagtagtttgaatacattggaatataggataattgacttaaaatattctttagatctcttaattcatttcatgtgtgatcactaacattgtacaccaaaggaacttaaagatcgtggccttgaagttttagactataaaacagcttttaggctgtagtgctctgtagtataaataaggcagtgaggcagcaactccaaagaaaattccctttcaagacttacattgtaacctacttgagtttatagttgtggagttttaattcatttgcattctaggccatgaccaagtgaccagaggactaaaatagtataaaagcatcctgtattgagtttccatagccaagggggtgtaagatcatgaaatttggagctgtttctcgtttttaaaaaatgagttgtaaaatacatattaaataaaatttaccaacttaaccattttgaagtatacagttcaatagtgaagtacatttacattgttgtgctaccagtctccagaactcttttcatcttgctgtagctgctgctgcttaatgctggttttgccatgttgcccatagtccttaatcgagataggtggagtaatgttgagctcaacagctgtctgccatggaaatagtaggaaattgagacagaccaaaaacagtaatgaaatgtcatgtcttatttttattgtgaaatgtaacacaagagaacacaaaaatgtacagttgacccttgaacaacatgagttgcacacatggattttttttcaataaatgtattgaaaaattttggccaggcatggtggctcacgcctgtaatcccagcactttgggaggccgaggtgggcagatcatttgaggtcaggagttcgagaccagcctggccaacatggtataaccccatctctactaaaattagaaaaattagctgggcgtggtggcaggctcctgtagtccagctactctggaagctgaggctggagaatagcttgaacctgggaggcggaggttgcagtgagccgagatcgtgccactgcactgcagcctgggcaacggcgtgagatgctgtctcaaaaaacctatataattaatgtattgaaacatttttggagatttacaacaatttgaaaaaagcttgcaaatgaaccgcatagcctagaaatattttaaaagttaagaaaaagctatgtgattaatgcacaaagtatatagataactacttttttgctgttgatttgagacagtcttgctccatcactcaggctggagtgcagtgacatgatcttggctcactgcaacctccacctcctgggttcaagcgattctcatgcctcagcctcccaggcagctgggactacaggtgcccaccaccatctctggctaatttttgtatatttagtagagatggggtttcaccacgttgtccatgctcatctcgaactcctggcttcaagtgatccacttgtcacgaactcccaaagtgctgggattacaggtgagccactgcacctggcctaggtactattcttttatcatttactaccataaaatatatacaagtctatcatatgttaaaatttatgaaaacttaagctcactacatggcgccattcacagttgagaaatgtaaaccaatgtaaagccatattaaatcataactgcataaaatactgttctataatatagccatctgttgctactatgagctcaagtgttgctagtatccacttaaaacaccatgtgtgacacttatcactgttttatagcctattactggttatgttttgggggactcaaaagttttatgtgaatttttgattggcagtcattgttcaggggtcaccttagtgaattaactgcaaagtgagcaattttgtatccgtgacacaggtcaagagaacagaacagtgccagtactccagaagcttcctcatgaccccttgtggtcactatcctgtcccacttccctctccaaaaggtaatcattatattggtctttattggtgctttgatttatggttttaccaattcagtatttctctctaaacatgttgagatgcatctatttgaactatagaaatggaataatagagtatgtatgatttttatctgtcttcttttgcccactatttgtgaaatgcatcgaggttgttgcttgcagctacacgttttttttgtttcattgctatatatagtattccttgtgtatgtctgtagctggctctcacacatatccattctgttgctaaagggtatttacattgtttccagtttgaggatattaccaacaatgttagaggaatactcttacatctcccttggtgcttatatgcatgtatttctaaaagtggaattgatggttacttccatatcccagtcaacccctgtcatctttttaattttgcctctctggtgggtgaataatgatttgtcatgatgtttagtttgatatttctaggttaataaggctggccatttagaaatctcccttttataaggtgttggttctaatacatttctcctggttttttaaaaatttattatgttaataggaattctttgtcttgtatataaggccttcatttgtgttgcaaattgcctaggaattaataattttaatatagtctatttccatctcttgtatacctatacaaaatcttttcctcacttgaagccatgatgatagtctgctgtgttttccagaaaatgtattgttctactttttatacttagctttgcagtccacctataattcatttgttgagcacaatgtgaattgtttttcttttaaggggttttattggcatatgtatatctaagtgacccagcaccatttattgaaaagacagttcatttcctacagctcttcagtatcccttttgtagtaaatcatatgtccatatatgcatctatttctagaccctctgttatattccacagagctctgtgtatgttgacttaatatatagctttaagataattcagaaaatatggtagagtaagtccatctgtccctccattgttccttaatttgccttgctttttcatacaaattgtagaatcaggttaagtttcaccaaaaaacaaaaaaaaaaccctgttgagcttttgatttggcagtgaatatatagatcatttggggaaaatgaacaccattgaaatattgagtcttgtgtccatgagtgtggcatatccttccatttatgcaggcgtttagtttctgttttattgcttttgaagaccttgcgcattttcataactttgattccaaggtatatgttatttttaatactatcataaaattagattttctatttctcagcatataaaaatacttgatttttatacgttgaaattactaaacttattctaacaattccaattttttttgttgtgaacatcataacttgggaataatgacaattttacttctccctttctaatcattatatatttatatttcttgctttgctgcactggctaggacacacacccagtatagtactgcaaagaaaaggcaacatcttgctttcttctctcacagcgaaagcttttgacatttcaccctttaagtttgctgtatattttctatagatatctctgatcagattaaggatgttactgtttgctgtgagttttttaatcatgaataggttttgtttctcaagtagttttttccttcattcattgagatgatgctgatttttctcctttaatgtggtacacgaattacagaaactttgttcacaatgttaaattaaatgaaacttgtattcctggaatagtgatttatgcttggtgaaatttactggtgaaaccatttgggcctggagttcttttgcaaatgcttttaattacagattatgtttcacagatacaggattatttcagttttttactccttgtttccattttggtgagttattttcaaggaattcatctaaattttcaattcggttaaagtaaaattgttgaaaatatcacttaattgttttaatgtctgcagcttctattggtgttcctttttaattatagatatttcatttttcccccttgaattcatacttctttccccccacctctgccatacacttttttcccctgattttccttggcaggttttgtttttttttttttctttacatcaattttgttagctgttttttttttttctttcaaagaccagctcctcactttagtgctttctacagtgttagttcattattttgtgccatttccttggggtgggcggagggtcatattcttttaaacttggtgtggtgattttttctttcctaatatattgttacagatttactccgagcataatttagcctccattctcacaggttttgaggtgactaaatgtcattaagttaaatgtatatttaatttccattgtacttcttttttaagaccatgagttatttacatgtactttctaaaaatttccaaatatggtggttttctaatatccttttattatcaacttctaccgttgttgaattgtagtcagatactctataattttaatcctttgcaattggttgaggcttgctctgtgactcaacttatggccagtttataaacatatagattattattatattttgccaatgaaacatagtgtcaaatgagcacacggtgctttcagagacataagtaaatgttttttgaatttttggtttttggttttttttttttttttgagatgacgttttgctcttgttgcccaggctggagtgcaatggtgtgatctcagctcactgcaacctctgccttctgggttcaagcaattctcctgcctcagcctcctgagtagctgggattacaggcgccctccaccatgcctggctaattttttgtatttttagtagagatggggtttcgccatgttggccaggctggtctcaaactcctgaccttcaggtgatccacccgcctcggcctcctaaagtgctagaattacaggtgtgagccactgtgcccagctgaatataaatattttacatatatataatttttctccttatgtccctgaaaacaatgtctgttcttttgacaattcttgggcatactgtttgaatcttttgtggctattttgttatttactgagaagaatgtactgaaatcacacacgattataatagattgtgtatttctccttgaattatgaatttatttctttatatgttttgattccatattaataagtttatacacatttggagcctgtatcttattggtaaattgagctttcagctttttagaaatgtcaatctttaataagattttttgttaaaagcctattttttttctgatgaataatagcattatgtcaacattgttatggtgttcacataatgtatgttttttattcttctaatacatcccactttggatttgttgagcttttaactttgtgacttgttggttttcatcaggtttttttgaagttctcattatctctttaaatgttccttcttcccctattcttagtactttccttctgagagtcca

SEQ ID NO: 95384 - DNA, 49644 bp, Homo sapiens
  misc_feature (1)...(49644): n = A,T,C or G
tgcacattgacatgcaccttataaagtctataatcccatgttttgttcctaatattcatgtttatttactctcactggtggaaaatacaccatatccaattcattgtctcttaattgatgaactatctttgcaaataatataatatataatacaatgtaatgtataatagagtgtaatgtgatgcaaactcagtgcttgcagatatgctcaataataaaggacattataggtatgaaaatactataggtcactaattaatctattcccctgggggtggagtgttttagaatcaccataatgccatatgaaactagatgaaaatatacataaataggtttcctctctgctacatacataacaggcttcctgtctgcctaaacatgttataagacatgatgtgctttatagacgctttctgattacaggggaacctcaagagtgctgcctgagtaactctcattacacaaagacacaactgcaagaggatccccaggcattcccatgagaacacagattctgacaacccctccatcccccaccttggtctccaccccaggactcacatcatggcaaaaatccaagggaagattcttgggtaactaatgctcctttacagggggtcccggatgaagggcagggggaaagtcttgtcactgtggggctaggatagatgaacccaagagtgatttgccaaacgtgcacatactcaaatcatttttcaaacattttgggtttggcaaaatgcatgttgctaagccccctttcccgacagtggtatacccatgtgaatttcaagggaaattcaatgtgtgtgtttctgattctcttaggcttatctcaggacaattatttagcaagaaccactttgtgtccaagaatcttcctgaaccctttcttttgtaagaccccttaaacaattttccttttaaccaggaagtatgttttgtctggagtaaattgaactgaaaccccaagaagtgtggttcaaaattcagaattcttgaattttgaaggagattggaaagtctgcaaacaacttctcacatcactgagactggccggtggtggtattgaggggtgtgaagtattatgagcaaaattcactgattatatggagtgacattttgtttactttaaaacaaagtctgacttcttgctgcctgatttgagtgctggcctgaccaagtatcttccaggtctgggtgacccagggactttttcagtcactcaatctttctgagtgttggtgccttcctcagtagatgtgaggacacaactaacacctatgagcaccagaggatggcagctccacggggcttttgtaccaaagagattctcttccctagtaggacctcatcatccaatgaatcagtgagcttactccatttattccatcccagagctagtttttgtctttgttttttaacatactataaacctgagcacagcgcatcaaggttatttgattaaggtcaaaataacagagatggtgataagagttttatgtctgtgctgctccgtttatacaaaaatgagatcattattccacttgagttaaaattttgctcttcttgtcatagcgatggccaacagccagctatgctgcttaggattaagttggccacatataacagaaaacccaaatggtgggctttaataatatagggattttcctttttctcacatgaaaaaaaaatccaagaaaaaatatccagggatgaagggctggttccagggccatcagggacccacgttcttcctaagtgtctcttccaacttccttaccatggaacttgcatttcagaattgcattatggttacatgatggctgctggagacccagctctcatgtctgtgttccaggcagcagaaaggaagaagagcctttcagctgactcagtcccatgtaaagagtttctttggtcctgaactcctggcctcaagtgatcctcccacttcgacctcccaaagtgctgggattacaggcataagccaccatgcctaagagcttctttggaagcccaaaccaaaaacttcagcttatacttctgcaagagaggctgggaaatatgtttatcaaagcccactaccaccctcgataacatgggattccactggcaagaaaggagagaactattgggtactcaaccaactctctcgaccttaccctccatgttctctcctggctgggccacaactctcatccactggaagacagaccaaggggaaatctctggcagctgtgaactggcaggctgtgtgtgtgtgcatgtgtgtgtgtgcatgtgtgcatgcatgtgtatgtgtgtatgtgtgtgtgcatgtgtgtgtggcttcactggggcctgacccacaaataccatgatgtctctttgcttttatgtaatgagttctccgttggcttctgcctggtccaagactgatttgcctcagcctaacattgtgtagtgaaggcctttcccagggccagaaaggactggcagggctggagagaaagcagctggtggagctgtgtggtgggctggcagctcctttctcttcaccttgtttgggtgttatcagctcctctttctccaacctggggtgctcctgcctcgatatcatcaatcactgatggaaactcgcagggaaaagatttgtttgtgtgttccttgaggacagaacaatgttgtagtatttgatgggtcttaatatacggtgagcttcaaagctaagtagttgcctattctagtcaggttgaggcgataccgaatgactcacatgaaacatggaattgacttcattgataccagcaaggaggtgctcacagtgaagtcagccctccctcaccacaggggcacatgccacccccattttgcagccaaaaaacctgaagttaggtcgcctccctgagtcacccaagcactggcctgagtgctgcacagtggggtgaccgggcttccctacatcaaagaactaccctcagcccaggggcctggctgtctaggaagggttcagaaggcacacccaagactcaggcccctgcctcaactccacaacactgagggaggtgagtagactgggtgggaggggcagctctgcagctggccagaggctgcggggacacaaggggtactcagcagacctgggcgtctctccacaaggctcaggtaccagatctgaaataacatgaaacacagtagggggttcatcaacgtcatcatcattattcactacgtttgcttcagacctcaacatcacccacagatgattatgggtttagaaatggaatgaggttgaacttagggggtgaccacctgacttctgttttatctttgtcttttattcatgcttctttttactgagtggtcatccgcaaacaagcctgcaacatgacatgtcttggactcagctcatttgatgcaccaacaagacaaacagcagacaacggcagcaccacagagctggaaacaaaatgaataaatactttttcacaatgaaatgagcagagggactgttgacttggggggctcccgcaagccagagacaagtggggggaacttgctgacttccaagaagaaaagccagcaaagaggaaccagtctccaggaagaatatgaaaatgaagagctggtatgtaggtagcacttcttgagagccttatcttgcttaagcctccccaaacactgtaaagtaagtgggaaggagattatggaaaagaacactgaagttcagagagatcaatatcccatccaagggtgcatagctgggactcagttcagggatgtgagcagaaggggctgggcctctgccatctccgatgctcaggcacctcatcactgaaccaaacacccagcaacccactgtgagcaaaaataaatcttcctccttcccggcccctgtggtccctgcctctgaggccacagctaggagatatggttcctaggaaaggcacaacgaaaagggatactcccgccatttttgaccttcaaagcccttcgtgtcttcactatgccctatgcagccccagtgacatgggaccaccctgggtcataggtgctcacctgcttgaaagaataggtcagaggaatgtcagagaagcccctcctccctgcactgcaccacccactctcacacagtctggccttagtttctcgaccgatggtgatgtctggggcaagtgtctgcacgcctctgtttactcacccgtaaaatggggagaagcgcatttgcctccacccctcctgccgatgggagcagaggtagagcctgcttgtctggacaagcccagagctaggcccatcctcctgacctgctctctgggagccacctactgtgacaaagtctatggctgagtgctccagtctgatctcaggctcccaggatcacgtgggtatcaaacggaggagctgcaggtgagccagtcggcatctttgcaactggctcctgagaccagacgcctcgggtcacaaggatgtctgagtgtgaggtgaggtggctttcattcctgacttcatagccaacaaagtggtgactgtctatctttgaccaaacaggctcgactatcttccctaaaggagcagagttctaagctcaaccccatttgcctcccccatcaatccagcaattatttaattaacacagtttcctctataaattttatttcagatttttttttaaaatcctggcagtgacataatttcaaccatcaaggacccccgataaagtctcaggatgggagttcagtttgtaaggcatccctagttgcagcttcctggggcctgctgcacacactggccttgggcccctggcctccatccatgcaggaggggtttgtcactactccctgacggtcctcttgggctcaggcacccaaacgctagggctcagcacccagccgggggccgtggcatagcacatctgcccagatgttttcaggagatctgagtgggagccatggggccagccaagagggcagggagccccggatttgcagaagcagctgaggaaagagctggcattgctcagactcgccagtgttagccagccgatatcggtcaaggctgccccgctcgagggtccattatcccctttccccggyctcagctgtgcactccaggccataacagcacaagacctttccacaaccccagggtaagggtcagatgtggggtttccaaaagcttcaaaacttacccctctatccagctctatccagaaggacaccaggggacagagagatggacacggaggcctcaaaacaggaaaataaggagacccctccccattgttgattacttggggttacctacagaaagagatgaactgaaggggctgagcctatctgaggattaaagcacagcttttgtcaggagtccgtgcctccggtctttgttccagcgacctgaggaatggcatgcatcagaagccgcttccgtgtctcagatggggcctgggtcaagtcctgggagttgatggagcgtttcccaaatcgcaaaaggagaggagctagacttacctccccctcctgggaagtaatgcgcgacaagaatttaaactcttaaaacgattagcagcaaaggtctcatgtgcttttttttaattatcattttttaatcgaggtataatttatgcatttaaaaaatcagatcaattgccccccgggctctgggatggaaggcggtgtgcgcctgcgaaggtcagaggcccagcggcgccagggctcctcggcggagagccgcccgggtccggcgctttgctttcgccttctgccccaccgcgggcgaagccccagggccccggggagactccaggccggctgggccggggtgcgcccgccggctgtccgcgctcgggcagggtggggcgcagcgggcgtctgtcctgctagcggggatcgggcggctggacccaagagcagggcacgtgcgcagcgacgcggggcggccccgccaggagccccgacccgggcgcggcgcagggcccggcggagagcgcgcattcccgagcgccgcgagccggccgaagtcgggcgagcgcgccgtgcggcggctgggagtgggctgcatgtgccgcgcggggagcccgcccgacttcggggaggcagcggggcgccgtggccccgcggctcagctccctgccgggtcgggtgtcccagccctgcgacttccggggcccggcggctcctcggggagctcgtccacaggcagcctccggggcgagagagcgcgcggcgcgggcgccgggacggtccgcggcacgcgggtggagccgccggcgctcgggctcccgcaggggcggcgggcggggcggggtgaggcgggccggccgccctcccctctcctccctcccgcagcccgccctcccttcctccggtcccgcagccaattaggcggccccctcgggcgggaggcgtggggcgctgcataaagcggcggggagctgccaccccgggagcgggctgcgcagtgtccgggccgagccggtgcgccgcagactagggcgcctcgggccagggagcgcggaggagccatggccaccgctaacggggccgtggaaaacgggcagccggacrggaagccgccggccctgccgcgccccatccgcaacctggaggtcaagttcaccaaggtgaggcgggcgcccctcccacccgacggccgcgggcccctgcgctgggcagccagactcggggcggcgggggcgagggagcagcgggccgggggtccgccgggcgccgccgagacccgagcctccctgcccgggcgcggctctccagaaaccgcacctttcgcgggacgtctcgggcgggatcgcaggcggcggggctcggcgctgtgagcctcgaagccgggaaaccgaggccgtccagcgcccgcgcggggccgggccgcccgcatccctgcgaggccccgacgtgtccctgcgctgcccgctttgatcgcgagtggaggtgcgcgccgcgttgactcggagcgcgctggttttggggagctccctccccaaaaacccctgcgatgatttccagggtggacgagtctggctttgagagggtcggagggtccgagagcgccaagagagagtccgggaggcagatggcggagctgcagttggaagactggggaagcgggtcctccgagcaaagcgcagcgggcgccttccgtgcttagtttatacccggctcagcagcagaacgaggaggagtaggaaggtgctcgcttactgacgaaacctccccggagcccagaggtcccggtgtttacacacaaggcgcgcgctccggaaggtcgcagacctgggcctttgggaagcggtgggtcgcgaggccgcagaagcgcacggttctctgcctcctcgctctgtgggctgggaggctacagcgttggcagaacggcgagattacctgcccggggcagaaaggaataaaagaagatggtgaggcctccgaggcctctgagctggggctgaggagggccgagagacccgggtccgggagcgcgacccgatggaggacacccccaggctgtctggcgtgcgcgtctgtcgtgggccggtgctggggcactttagaggcacaggccaggccgagagccattgccttaactttccccaccttkggcttctcttgatttttgcttttacccatagcccccaactccagctgacaccgcacttagagaatttcctcatccgttttactttaagaagtagcaattatctttctcaaagaattttartcaagcggagaaagttgcagggcactatgtgtggccttcagatttgggtctcttggcacttaattcccaatgtcggctgagcctctgatcacaagacatttaaattaactgttttcagaaggctctgtaatcaacaaagacacgtcgctgtaaactaaacgctggaaattattcttaatgtagttttatttgtaatatcagcttcagagtgaaaattccaacacgaattctgggaagagtgaaaatggtacccgaattttgtaagaccctaaccccaggtgcttggctgctgctactgatggttaagtggggaggttgtttgttttcttttggttgtacaggatttcaaaatactrtatatagaaaccagacagtaaatgtattatggtccttttactttttatgtttttgagtcctatcagcaatctgaccacatacaaaaagtttacctctttctctatgatttttaggacacttttaaagtgtagatgtagcccttatggagaccttagacaattcacagagcaatggttgcctgttgtcttggtgggtgcgcaacctttgccagttaaagggaaccagtgcaggaatgaggctgagggaagctggtggatcggcctggagtgctgggatcttgagtggtctcccaggcgataaaggccccaactgcctgacaccggctgctggctcctcacccgttgggggactgtgctgctgcctgctctgtcctggctcctggcccatctctgcagagacctccccatagcagttgtggacccaggcagcttgtgtggctgagggtggccaaccagtgccctggcacagtcctcagggagactggactggagaggcggccgagagtgaggccaccaagagtgcctgccgagggaaggagcgggataaactgaagtgcaggactgaggcccagagtgggcgagtggcccggcaggtgggtggcctggcaggagagcagacggtggagcatgggagccagcagtggtctgctattttccaaaattgactcatggtgcttctcgataatggggcacacaccagagttggtccatctgagccctagccccggcagtgccatttcccagggtggtccaactttcaggatgactttgtcaaagccccttcatttgtcctcacatgttaacatttcattctctagggtcatgctgtgtgattctggagagctgagagcccctccagggtccccacacagatctcagaggatagaagtcccttctaatttagagggcctctttctttccttataaaatttcttccagtagcagggattctcttcaaagttttctgatttttaaaacaccggtttttattatctctcttatgaaaaataaaattcccccaaatctccttttctgaaaacatattctttttgartttagctgagtggcctgttgtcagatggaagttacgggaaatcggcatcaataggattcacttgtatgactgtcatcttcacctctgcctgagacaccttacagctcygtcctgcttccatgtcattctgttccttttgtaaaatgtgaaccaggtctacagctcaatgtagcttaatgctatacctctataaggtttgttgtatgctaatccacaaatcaaagacaacaattccttctagaccctttaccctgatttggagttcaaaacaatacagccagcataatcagtagaccatatttatataccctttccttatatttgtgcttttgttttgttttaatggagagaaaaatcaacagtagaaaccacttacaagattacttactactgtagtgtggtataaagtaaaagattttacaaaattaaaaacatagtgatgggaaaatatggttagagtcaaacagtctgatttttttttaaggttgctggttacagatcaatgtcatgaacaaacagtaattttttttggaggagcatgcttggagatgaagtatagcagtatagcagacatccgatcattgtaatctgttttcagcccccttatttatattctcttctgccaccttctcattttccctcccccttggagttgataccaggaaggacctagaatcagcaattttcactgacagtctctattatctaacccacgaaatttcatctttctacaaatggscccctcttcctggctgcactttcctccccgcactaacttaactcttcttcctcagttattaatttctcgctgttaccaagtgatgacttgctggatggcaaaagtgaactcttggatttagtttcagctggaagaataaacctgtaattgtagcctggccttttcctggtgcgcttccctgggggcctggcctcacattggagacgctaagcttccagaagccagacaggcaaatcccaatggtgaccgatgctctcagttctggattccaaactggggggcagctggtctctgctcacctgcccagccagagtctgcctcctgtgcttggtccccaaccgactcagaccaggcttcctcactatgagcttcagaggtttttgtgggttttttttttttttaacattctatcaacttttaagttctggggtacatgtgcaggatgtgcaggtttgttacataggtaaacatgtgccatggtggtttgctgcatggatcaacccatcacccaggtattaagccggagctgtggagtttatacaggaagcccaatacagagaatgtaaccaagactcatgcttaggagatggctgccctctctcatctgtcatcactggggagtcaaatgtttcaaatgaatcaatttcacaataattgaaattagcccttgagggacgcaattcttcctttaaacaattcaaaaagaagcaaagtaaagctatgtataccacatgcagatagatgtaaaaacggaacctgatgaactaattctgtactcagaaattactgacggcattttacttgagagacatgcgtgtcagccatttctgccacgggggttcttctgatgctgtgataggctgtgatgaggaagccattccaagttggtgtagcaggagtttgtgtgtcttctggctgggcagccggggacctccgtgctgtcggaatgtgttttgtatattgtctgtcatgtctcttcctagttttttccaaaagccctctcttttaayatgacattaataagacaattagaacttagtgtaaactaacagtaaatagtacatatgtttcagtgcatggacttcgtatgttcttcttagtctgctcatgatgtcttttgtcaaaaaaactttcattctcatctgcattctggatcattgaggttcccagaaaagtgatttctgcgggttatataaacagttatttgcgacatctcttaatgtaacctggaaagtttctaacccagacatttaactttgtacttcaacrctggtttattatcaagcttcggaggtttttctgggttttttttttttttttgacattttatcaacttttattttaagttctagggtacatgtgcaggatgtgcaggtctgtgacataggtaaacatgcgccatggtggtttgctatgaaaatacacattttaaggggaatgtgctggggagggacatgctgatgtgcattggtgaaaactgaagggcgatggtgagatcctcctcaaagtgagctccttggcaatcaatcttgctgagtgttgccactgaaaggagaaagggagtgctcggtgcgtccttacccttcaggggcaggcggactgcttgggacttttatgtatataaacctattgactcttcccccaaagtctattggggtatgagattccattcacagcctctatttaaccatttaacttagccattcctctgtgaatccatgttattgctgaagataataataataatttagaaaaaaatctctaagtgactatagttttatttgaccaaaacttgaatttcgagtctgtcctagttgatctgttggtcatgcagtcctgggactctgttcccctccgggtctcatctataagatgtcraaggggagagggaagcagcagagaggaaggtggacaagatggataagacgtcacctaaggtccttagcatgttgaaattatatgattttgatctaaacctaattggttacacttcctttcctggttagatatttatcaacaatgaatggcasgaatccaagagtgggaaaaagtttgctacatgtaacccttcaactcgggagcaaatatgtgaagtggaagaaggagataaggtaaatacttaaaataaatttgctctaagtaattcaattatgkatgaccaaaggataaggaaacggttcggcttagctataagacagaactggcctatcctgggggcagggcctgggctagctgcgcgaattggcatgtggttctcagacgtgtggcacagaatggcatcaattaccgatgatcctctgcagagaatcattctcccttgatagatgtttctcctactatgaggatgacctcagctatcctcatcatatggctaaaggaaaggttttcttttttctttttttttttttttttatcaattatttggacctggaggcattaaagaatctttccagaaagcatttcccgctggtgtgtttcacgaaatgaagctttctggcagaagacactttagaaaaaaatagacactttgaaggaaaaaaaatagttgctacccgggtgatgcggggatagttaacaatgtaaccaccagatttcttttctcctagaaatttacatgagcatggaaagcggtaacctttatcactctatttgcaagtgcaaggtctatatagtaatacagaagctaagggacttccgaatgtgtcctttatacattgcaaggccatcaaatctattctgaatgtcagtgcagaggtaaagcccttccactgagggcagggagatgtaaatgtttccttagctgctggagtgctggactgatgttcttggtcagcaaactgatgacgttggaagtggatgcagtgaagggcgtgtgcagagtaggcttggattttatcttgcccatgagtttttgtgacagacgtgcaaatgcacactggccccacctatacagacccccctctgtgtggcacctcatgacagttaggctctgctaacaaagaaagtggcacagaggagctcatagaaaaatgtgagggcattggggggaagccatgacatggaatggggtttccactaggagactcccaagtgccccgtacaggtgctaggaggagaacgagacccttgccctgggccttgatttctcccttggtctgagtgactgttctgagccagaggccaccacaccctctgcagctggaaaggtcctggcctccaccccagagcctgggagaagaaattcagtgtcccacatctcccctgccaagcttctgctcacccccaagccagctctggacacacagagactcggtagagtcactcctgactggtgtcccacatccactccctgctgtaccttcctagaaagagagaggcatggaggggccttcgagatgaatgtggcccattttcctgagaaaaagagacagtgacactactctaaatggccctcacttctttccttttagaaagaaggttccgttgtgattattctatcagtgcacaaaagatccagttctgctcccatggggtgggtgaggctgaagggagaaaaacggccttcatgctcctccctgtctgcgaactgttccacgatggtcagttctgcaatccagaaaggaaggaatttccccattctcactcttggaccacaagttcccagctgggatcaaatgccaggcagacacttcccacctgatctgtgaacagcaggctcgtgtgcgttcacactgaggcagccagtggaaagtccttccgtacttgggtccctgagaaaaatactctttaggaaatatttttaaatgctttttataatcagaaacaaacattggtatttggccactgtagaaatattaagatgtaaagaagaaaaaaaatcacttgaacgctcccagccattcaagtgattgaaaaacatgctgctgcttgcagcctgtctgccagcgggacaatctgctgttctctataactgatggccgtggtcccaaactgcagtcacgtcaaaagatgacacccaaactgcagtcacctcaaaagatgacacccaaactgcagtcacgtcaaaagatgacacccaaactgcagtcacctcaaaagatgacacccaaactgcagtcacctcaaaagatgacaccgaaactgcagtcacttcaaaagatgacacccaaactgcagtcacgtcaaaagatgacacccaaactgcagtcacctcaaaagatgacacccaaacttcagtcacgtcaaaagatgacacccaaactgcagtcacgtcaaaagatgacagtctctctctgttgttctggtcgctcagcccgacgtggacaaggctgtggaggctgcacaggttgccttccagaggggctcgccatggcgccggctggatgccctgagtcgtgggcggctgctgcaccagctggctgacctggtggagagggaccgcgccaccttggccgtgagtacatgcacttgggggccggtgggggatgagccagcctcactgagggtcctgtccaccatggggtatgggaaaaamgatcacggtcctggttttgtgtggtcgtgggtctgttccatcctctgagacacggctctctggcaatacttgcaggtgttaatgcctctagactgaatccctttcattttgaagtcagacttttgtcctctgcagctcagcttcttgaccaagttgttgtctataggcagytgagctacatcagtggtctcagacttggggcactcacagattggtgaccatgagctgggccatatcctggtaccacctgtgtgtttatgtacttaacttttttcttttttgtataaacttccttttatttattttattttatttatttttttgagacagagtctccctctgtcacccaggctggagtgcagtggcgcgatctcrgctcactgcagcctctgcctcccaggttaaaatgattctcttgcctcagcctcctgagtagctgggactacaggtgcctgccaccatgcccggctaatttttatatttgtaacagagacagggtttcatcatgttggccaggtcttgaactcctggtctcgaactcctggcctcaggtgatctaccggccttggcctcccaaagtgctgggattacagstgtgagccactgcacccagccttaactcccttttaaacttaagtttaatctcatcctaagaaacaatattcatgaaatcacaggtttgatgtgctaattttatttttctaatacttaccaaaataaatgccaccacttaacatagaaaaaattgttcccatgtgacctaaaatcattcctcagtcacccctgaactggctagtagcgagcatatgtggagcggtggtgagggcaggatagcctggttataggaaacctcagaatagraaagacctgggttcaaatccccactctgccacttactagctgtgtgactttggacaagttgtgaaacctctctgagatttatttcttcatgtaaaatgtcaccgataatgataactcagtggtgtaagaatgatctatttaagattctaggcagagtccctggcaggcagtaagcactaaatagatgacagctatcattaataatagcagttatcataatgaggtcatgtgaagacccattttctaacctcagctacatgcactgctggccagtaatttctagataccctaggtggggatattgatggagcataccccatgaggctgagctgccaaggcattcatcagttgtaagtccattttttagcaggatcctcagaccctcctctggtcatgagggagtgatcagaggacatctcagggccacgttgggccatgaggtcctttgcatcctgtccttgcccatctcagcctcttgtttttaaaagttgttccaaaccttgaggcccggttgtaggggaggakatctcctttctggcctttgatttggaaaaatggtttttctgatgtcgggaacaagcagtagggtagccactgtttaaaggagggtgtcagccaggacacggaaattgctgttgcccctgaatgtgtttctcagggtggaggaactctcaggccgtactcttgggtgcatttccctaagggtgcatccacacagaaactcgagctccccttccttccttcccagtcagcccggccagtccacatgttccccgggtgagrgtagctccctcccagggtaagcgcttctctctgaggagcctctggtttcttcctgcaacgtaagccagcgtcaaccctcaagctgccaaactggctttttcaaaaacatttctgttttcacccggcatgagctcatcggtcggcaatgtccgtgtggactaatagcaggctagagaggatgtgccctgggcaccccccgccctgaaccctgtccttaagtgtcagtatcatcttaggagcagaggctacaaagccaccttcatcttcaggctgccccattgtcctggcacgactgtgttttgatagcagacagctttggaggatctcagaatgcaaacccagcaaatcacttctgccactggcacctcgcagcccacgagaaataagatccagctctttgccacaacatgaaagggacaagagaattactggcaaacacggtttttaaaactccaaccacatcacaggagagcgccccttgctctccacctcgatatggtttccgtgcatgttcatggagcgtgttctcttgccggctcagtggtttgacagagctgggtgtttatttctgtgctcagtgtctggaaacagatgtgggggatccagcggcccctggatggctttcctttgctggggcacccaggccccaactctgctctttgggcgctcattttgggagctcccaaacggaagccctccctatccactctccttttcaccccaagtgccatttctgggtcctctcgttgtaagccctgccgtgctgttttcctggcacttcccgtcattctttagtatctgagggttctgatgtgttaatttctcaggaggcacattttcctcttaaaatgttaaaggaaataaacttaggagtggctatggtttactcatgattgagccacagtaacaagttgtttaaaggatgactgtttcaatctgtagcgagcacttggactcactcacctgcataattttttttaataatttcccgtctaaacctatcatgacctgggttttgctcagagaaattccataaaactaacctggtaaattcatgttgtcactccagtaagcaaacttgctgaagttgacaataaaaacaaatagcaatgctggctgaatgttcgccatgtacctggcttgttgacctgtaggatttattatctcatttcagagatgagaaactgaggcccagagaggttaagtaacctgtcctaggtcacccagccagaggtggtaatccaggactggaggcagaatcttggctccatgtctcgcgcttaccctcagtgctggatgttgaagtcctctctcttgttccatcccagaaaagagcaaagaataaacttgcaattccactgacagatatgcagatactgtctggaataggtcagtcttagaggcctttttgcactatttgcaattgctaggcttcccctggaaaaatgaaagttcacgcttgagtgaaaatctataggaaccaacactagagtatacttgatgtcacactggcctgactcagtccctgagtggcagctgctgggggcagaacacacaccccaacctagaccagtcctgtggtctttagcaacccagtgcgctgtctgggtccccaggtgaggatcgccaagcccttctctggtgcctaaagggaagttgatgatagtcagtgtaatcatcagtgttctcatgtgaacaccaatccagcactcaccatgggcgggcactgtggttgctgctctgtggacactgactcctttcactctaacgctggccctgtgaggtaggaaccgttattattcttattttacagatgaggaaactgaggcaaggagtgattcagggacttacccaaggcccacttacttaactagggttcagcagatgtggttgcctcctatttaaagggggcttggctcattcctgaagcaaaggggagctggggtagcccgagcatccggagtggctgccctgcagtctttccagacacacctgtccaggagcagcctgtaaaggccagtcgctgtgctggccagaagtagatgcccccagttcagctgctgcattactgggtggccttggccaagtcactgggccgttagcgtccgtgcctgcaccttgaagtgggaatgcagtcatggagctcaaagggtgagacatcggggagtgcgctggggttaaagccctggatctgaggaggggccttcttcctttttcaatcaccatctcactccactgactcttccacaagaatccagccctgggctatgtgtcagggcggccacttcctgcagaggcggatgactggcggtttcagcgctgggctcaactggggccacttgtctgagggacaaaggggttctcttccaccccggctggaaatagaaaagaatccctgccattgagtggctgcacactcgccctgggtaatcacctccctcaccagcagggcagtctgctcccttccgactctgcatccggccggccgggctctgcagtgcaggagggaaggattgcatctttgtgctgggggcgcgacccttctcggctcagtcactttccacagccacactggccagcctggccgagaaggaagagcctacatcttctctttctcttttgttcgaggagggcagctcccwctgcagccaccccagagccagctaaccttcagagagcttcctgggaacacacaagcacacacractggccacacagcagaggccactgtgctacagatggaagatcagatgccagtgtgygttccttcccagcacagctttaaatccgcctggcctccaaggggcccttcaaagagggtgcatgtctatgttttagcccaccaccctgcagcccactttaggtgttttgaaataaaagcaatcctcacactcagagacaggcctcgctttacatttggtgtcatgctttctgaagaggtgcatctgwctgtgaggtctacagagcaatgtcctaggactgtgttctctccccaacttccatctttaacaacctgacagtgcaaaagaaaagcaagcyatgtccgaaacagacatcatcttgttattgcaggccctggagacgatggatacagggaagccatttcttcatgcttttttcatcgacctggagggctgtattagaaccctcagatactttgcagggtgggcagacaaaatccagggcaagaccatccccacaggtgagcaaggtggattatagcttcatttgggatccctttggggctatatcttttcattaatccagagccccccctgactgtttccctaaggcaccattcccaaccccactccctctccaaatggtactgccaattcttcttctaagaacttcacttttaaagttgaggtcaaatcacttctctgtataatagacaagacttgaatctggcacccttgttggtttctttcttgtctttttactacttgaagttcctaacctggactaagtgagtgtgtccttccccaccatgtaaccctcttccagatgacaacgtcgtgtgcttcaccaggcatgagcccattggtgtctgtggggccatcactccagtaagtatggcagcctttctcagtagattctatgtagatcctgccccactgccctgtgtcctttggaatcaatttctggtgtgtttttatctgattgcaccagcgttgaacaagcattttcttcgtggcatggaactccatgcttgggggctcttgagatggattagaccccatttctgctctcctaagaccggctttaggcatgccacagaaagcactgtggttcccagccagagtggtcaggaatggccagcattcccaggaaggtggtctcttagctgggccttaaagataagaaagacttgttcaacaaggaaaaggattttccaaggagtgggaatggcctaggcaaaagtgcagaggtggctgggctacttggaagggaacagcaggaaagctggtggggctagagctcaggcaggagcaaaagtgaggaaaagggtgagcacacgtggcaggtggtgtgggccagcttccagcagctttggctgctaaggggccgggactttattcattgggcggtggggatgcttataggtgcccaagaagtgcaacaatgctgcctgtctgtttgggaagcctctggccattgcaacaacagccaggcaggaagctgaagagccaggtggcaacatgaagtgagggttcaaaaagtgcccatggaggcagggaggaggacacgtcttcagcagatgttttagagggagaggtagaacacatgcaacagcatcctctttgcaaaggctgcctattagtaccacccagaatgcagtttaggaagtgctgtgcaggattgcagttctgatcattgcacactcctatgttaccccacataccccaaatccagaccatgaaaagcaagtgtcctccacaaaggcatcgttgrgcacatgggacagggtaagagggtggatctgggcctccaaagcccctgtgctctgtcgcagtggaacttccccctgctgatgctggtgtggaagctggcacccgccctctgctgtgggaacaccatggtcctgaagcctgcggagcagacacctctcaccgccctttatctcggctctctgatcaaagaggtgagacatccaaaaagaaaatatcacatgttcttggtaacattcccactcctaggaaccaggccaccgtcacgagatgggacagtggcagactgctggcaatcgagtgggaagggaatgacttccagtgttttgtttggcgactgcacgttctttctcctgcttgtggccactgagctggagaaactccattcctcccagtggtcctaatgagaatgcttaactcttattatgggctcaaacctatggttgaggacccagtggtttgtctagagaattttcagggggggtcaaccaagagggagccaaatatttgggaggttctctgggatttgcattctcagtttatgaaatggtccatttttctctggagaggtggcctcgtcagctctagctgggcggctgcagcagtccgtgtgccgggtccctgctaatcagtgccctctgctctgaatgcaatctcttctccctcaggcagccagaacttagggaaacagaggctcaatgggacacctccttccagacatacctttagtcattccatccccaggttgtatggagcaaagatttagagaaagcaacaggaagcaaagagggacagaagaaaagatccattcctttctcttcttagtcgggctgatatgaccggcaggcaggtccacagttgcttagaagcaaggtgggaacagctggtgatgagccaaktttccactttcctttggtgatgtggggcataattaagtcacactggtgagacttaggaatgtgaaaatcccaactgttaagaaacagtgcctaaaaatctaaagactcaagcaccgtgcctaaaatcttgattttctgaaataatgtgttctaagtaagactcagcacaggtggggaagagcatcctccacctcgtttgttttgtgttctcgcctgataaagaggcttagtatatgaaaaacacgaggcatgaacgtgaacgagttggcagtccctgccttccagaagggcttgctccaggtgagacccaggttgaacaagcaaagaactttaagggagtgataccctgtcaccatttggaataataacgggtctgattaaaaaatgaaaactgggctcacgcctgtaatcccaggactttgggaagccgaggtgggtggatcacgaggtcaggagatcgagaccatcctggctaacacagtgaaaccccatctctacttaaaaaaaaaaaaattagccaggcgtggtggcgggcacctgtagtcccagctactcaggaggctgagacaggagaatggcgtgaacctgggaggcggagcttacagtgagccaagatcgcgccactacactctagccagggcgacagagcaagactccatctcaaaaaaaaaaaaaagaagaaaaaacaaaactgaagctcttggcagatattttgcaggtgcctctgatcctgggcagggcattctgatcaaggtacccctctccccttaacgcatacacacactctccctcacacacacacacaccccacatggaaaggtgctgtgctacaggcgggccatggccaccttgaagcataaccacacatttgcactgcatatcactttgggatggggtccccccccagaaggagaagtgggcatctccccttgcccagcctgcacactgggctggcagcaggggatgagaagcccaggtcagctcccagggtgcccacggtcaactgcttctgggtcctgggtaaatccagcccggcccrggttccctgtggggatgtgaggcagccacggctctctcggcccaaatgtggatccrtggtggatgaagtccgttcttcttcaagtgctatcttgatttcttcccaggccgggttccctccaggagtggtgaacattgtgccaggattcgggcccacagtgggagcagcaatttcttctcaccctcagatcaacaagatcgccttcaccggctccacagaggtaaccctcctcacagggtgctggggaaagtgaaaggggcgtgttatttgacaccygtgagcttttcctttgacaggctttaatatgatttgtttttcttctaaatttgaccatgttttagtacataacaaccagttaaaaaaagtcactggtctagtttccaaactaaataaatatctaatagaactcagaagccttagaagaaaagattgagagataagataaagtagaaatgtaaaatattcatctgtcaaacaccataattaagattaagagataaataacaagctcagagaaaaatagtcgtgatgcatgcagtgctccaagaatttatatccgtcatatgcaaagtgctcctacaagtcaatgaaaaaaaaaaaccaaactgaatggtagaaaaatgggcagttcagagaatagaaatacgacgtgcccattaagcttaaactagtttgctggtaatcaggaaaatgcaaattcaaacaaaatcagactttccttttgcctgccagattgctaagaactgaaatgatactgctgagaatatggggaagcaggtgctcagcgacacttgccctaagatgcacagtgttttggtagcactcatccaacatttaaagtgaaaaacttttcgattcagaagctccatttcaaaaaaagaaaaaactacttagagaaattttctcatgaggcttcagggacatattttcaaggatattatattcattctctggaatgttttacagccgttacaacaaggaaagctgtccatgatctattgttgaagcacaaaacagcaaacggtagaaaattacccacaatattttcccattcgtagaggtgtgtgcttgtagaagtagaaattatctggaaggattcccaagaaatccttactgatggccacctatggggtgggctcggggcagagccggagggaagctgaaggctttctccctgtaattcacatacatctctatgtggaattacttttaatgagaaagtatttcttctgtacttaaaaaagaaaaaaacacccgctgcaatcagtgtccccatccccctccttagttagtccaagccctggtggatgctgttactctccttggggacagacactgccctgtggatggattccagacctcattcagccatcacccatgagcttgctgatgtttaaaatgcgctcacaccttagcattggagaaaacagtctcagacccggaagagcctgggccgcgccttgctagcttctggctctaggcctccgtgtctgcactggtctctgaggatcttcccagctctgaagttcgtggtgctgggctttacttgttgccctagataagtcaccgagtcatgctgggccagccctcccctccaggggtacagtgggcaatgggagagaccccgtgggggccttgagcatgactggtgagtggcttttctgctcatagcgcaccccttcactccctgcctgtctgcggcagcctcagtcttagagtgtgtttccagagaatcggctccttctcatccggaaggctggctgccctcgctacttctctaacacttggaggttccctcagatcacaccaaagagccacacagaaccaccsccctactgggctgttggaatttcagctgtttctagtgagaggtagaagagtcaccctgcggtccctgaagccctttaccagactggctggaccagcctgctgggctcagaaggacaggcaccaggacaggttagcgggtggcagccctgttcccagccagctgtgtgggcttccagaggctctaactcacacctgtaagtggagcggctyagaccaaggatcccaggatgtcatggtctggcatgggaggagatgctggcagaggccaggacagtgaagggacggcatcggggcctggagcgcctgggccgagagccaggtggtggcactgccacccgggcttgatcagaatgttcactgatgtttacgcctgggccaagttcagcaacatccaaggtaaattgtgatctgtgttctgtcctggaggttggaaaactggttaaagaagctgcgtcccggagcaatctgaagcgggtgacgctggagctgggggggaagaacccctgcatcgtgtgtgcggacgctgactgtgagtctctgccctcctgggctttgctggggcttcagggcatccatctgtctccccctacttcctggcctgaattcaaaaccaactgagagtaagatgtgtgcacacacagtggggacgcttccaccgtgggcatcctgcccacagtcagccagccgcagacaggcaggtggacatcaaaatgccagctttacttctagcagaaagctgccttctactgccaaaacgatatggcttgagtggcacctgagaggctgcctgtttctgcgccttagcgttaagtttacctgcctgttcctgcagagctggggtcacgaggagcaggtctggcttctcctccagagccccctgggaggagtggggagggcaggtgctgcccactcccagtcattcattctcccctccaagtcacatttcctatcatatgttttaagatccctgaagagtggaggtgctctttccttgtgtctcmgacctgataaatcagaggagggcagtagcaactgatccttcaaattacccgctttgcctggttctaggcctgcacccctgccctgggaaagcaacctgcccagcagtttggggatagcttgcgtcttgacagccaaacgacacagcgttaaaatatatgctattgttggctgccatgtccacaagagggaaggaagggctggccgggcattcattcacctgctgacagggtcagctatcaaaaggtgtgacttcccaagtgccttgaaacacctttgccttaaagaatagcctcccagacctgtccacgggtgccagaaattcctgtcgtggagaacaaagcctttcacttcacactcagataaggttggaattgcaaatatccccaagaaaaatgaccctggcacaatttcttactaaggtgtaaatgactgatatcagttcctttctggcagctggctttcacaatgggagaaaggacaggaggaggayacaggctctcaggaaggaaaggggagctgggtgtgaagatggactttccatttcttgcctgggtcagtgttcccttgtggaagcaccattagtgctatgaatagcaagtggtttttggagccacacggagcatttctggcactgtgactcacatttggagtcccaaacagccaggactcctgttttgctttcctgtgccaccgtatctggatacgccacctgcactgaagttcatcttcctcctcttggggaggaaaactgcagctaaagcacaggactaattgtgtttggggcttggttttacttacgagggtcataaaaacatgctgtgtagccacctccttctcctcatcagggcggtgccagtccacaaattacatcctgacataaccagcatcccaggcaagacatcaagggtaacaagccaccattcccctgccccttcgcctcacccctagctccgtcaggagcaggaaatgagtctgttatctcggaggaggggcagttccaagttgggacctggcccagccagctgcaggggtcaagggtgcagagaggtacccccaaaccttatggtgctgtcctgctgccactgaaacttccacaaatgactcagctagataggagcagcctccttctcaaagccaagggcacagtcccttggagcagcccctgtggaattggaacggatcaccttccaatgcccagagccactgccagcctctatgcaaaggaaagctgcatttcttaagaaagcaatagtgcgggggttggtggtgatgaaaccagccaacggttgaacactagaaacccctctgtagatgtaaatgacatcccaataccattcttatccactaagcgtgtcccccaagatcttattctctaaataccctctggcttggtttgaataactggttttagttcaatgtcagctctgcaacttagtcagcccttctaagtcacacacatgatattatcttacttaataagacccttcttttactcaaggtggaacattttggcttctttagaagttctcgccagggggcctacatcaataattaccgaagtttattctataaaacattagtcctctagaaaaaggggaggggaggggagtcctctagaaaaaggcaagtgaaatggagggtgctatgactctctggacttattagcatattaaaggtactgagaagtcctgcagtcagggaattgatttaaccccaaacttggtggaccccaaaatcctttctcccttcctctctatttgggaaagtctgcaaacaaaattaatttctgaaatgcagccatcctggggcctgttttcttgtgtgggcaattagaattgcagctgtcaccagtcctgctttaacaacttaatcgcttcctctcgctctgcccgcctccctcgcccctccccctccagtggacttggcagtggagtgtgcccatcagggagtgttcttcaaccaaggccagtgttgcacggcagcctccagggtgttcgtggaggagcaggtctactctgagtttgtcaggcggagcgtggagtatgccaagaaacggcccgtgggagaccccttcgatgtcaaaacagaacaggggcctcaggtaatccccctggtgtgtgtgaamccatggtgcttgtctaggggctgaagcaggcagtcccatggcaaccgcctacagggtccctctccgygaaaggaatgctgacctgtcctgcccaggaggctttcttttctttagaaactgatcagaaacacaatcctgtcaggtcccgggggctcacgaaagggggcaggacacactgaggcatgggaggagggcgctattcccagggcagaaggccatctgcctgaaccctccactctccaggatgacctccctacagaaaaggggctgtaggctggctgaaggcagcagagtgcaggcagcgtgtggcctggagtctcagtcgcagcccgaggccctcaagcccacgtgggttacaggacaaggtgaaccatcagaaatcaaacaatcccagacggagagagcctggggcaggagaatgtatctccaggcagtaggaacatgtctctggaggatgagtttgggaagccaaggacaggatgaaaatgatcataaccacgagatttaatatcctctttaaaacggcacatcctgtatcactttcttactaattatgaagtgaagcagatggataaatatttaaaagagggcagcctgaccatcccatgcattattgaaatggagctcagcagtcactcactttgcttttagccaaagtcctgccccagccatgaaatttcaagtcacatgtccgtgacttacccacttgtgtctatcccgggaggctgccacttcccctactgtgacagcactgcatgtttacaggggaggctgctgtggatctgagctcagatttggccctgggttttatgaaagtcacaaaaacccttccatgcctcagtttcctcatctggagagtgggagtaatcaatgaatattatgagaatttcatggcacctaggaagtattcaattatgggcaggttttatttttaaacaggaggaagctttaaatgacaggttctccagtctaggtggcagtgagtgtctgtgcatgacatcaggctgtcctgtggggatgccctggctggggaagaagggagggcctcatggaggaaggatgcatttctggccatcagtgcccaccctccactggccccagtccacacactccgacgccacgtgaccctggcagaaagcacttcttgtggctaacattccttctcctcagtcattgcctgcccagcctgtgccccaaacccagcggtcagtgacacaaggttgtctaatggcctcggctggatttcagatctgaacgcaaacatgaccacaagtcattattgaatccgccgtgagttttaaagctaatccacaatcagtgggaaatatgtgaactgatccccatacagaagaaacttttttaccccgtcgttatttgtaagtctctttctgtggctcttttcttggcttatgcctgatgtctgagtcttgacttttgaggccagatayaccgatttcttccaagagaacagatagaggcagaatgggtgctgatttcatcagtgcatttatgccaccgctcaaagtccttctgaaagctcactaaagccgtctaacctcagcatattattttagaatgctgttggggtttctttttcttccaaagtgctttttcatctacggtaataagattttactctgagaggacttacagctgtctaaatagtcctgtctgtctcatgcctgtaaaacagctagctgacctagatccgggtccacggccgggctagcgctcacaggaatgctccaaaatcattcaggtttatttggcaactgagcaacgaggcacataaacattatgcaggccacctggccgggcaggatccggcagcgtcctccgggcagagagccgagcacagccttgagccagtcctgtgggggccgtatttccctgtttctggtgttgtgccctgctgcgtcatctcacttcctggcaggtctctcttcctgtactgtaaggcaccagctgacatttcatggaggattattagatttaaacaatgtgttcctacggrctctccagggagtgtggagtttggatgtgtaggttttccacggggacccagcactgcctgcaggacaaacagggtctgccagatgrcatatgcccagcagccagggaggacctgcggttgggcgaagcccctgtgtcccttttggcccctcagggaggrgaagagcagctcagcagcatctggaactgttaacctgagacttggttcacccagagagaagttgagagaaccttgagctcttccgggatctgttgcaaagctgtttttgttactttttttgagtggagtacacatacacgggtcaaaccccaaaacgcctaaaaacgtctatagtgaaaggattcccgcccctcccgcccccacctttgtacacctggttcttacccttctccccacggtatccccagttcttagttcctcatgtttcyctctagaatgttttcgtgtgcatgcaagcagatgaatgcaagtcctgattgcctttgttatttttacacggaagtttccatgatagtatatcatcttgcactttgtttattgttccctaaaaaaactggaagagctctttataccagtccatgggaacctgcctgattctttttcacatgtgtatggaattctgctggatgaagccaccagaatttcagtaacatcttctgattagcatgcaggtatgtgcagtcacacacaaggcctcagagtatgtgatttcacacacacacaaggaaatccctgggacagctttcccaaagtgggttgctaagtgggaacacatttctaatttccttaagtgttgctgaattaccttccatagaggctgaaccaacgtgtattcctactaacattctagaagtttgtctgtttctttaccctttccaacagaatatggatttttgcccataggagagttaaaaatgctatcttgtttcattttaatatgcatctaccgcttataataagcaaggtagaacatcttattatgtatttaaaaaccgtttgtatttcctttattatcaaatgtgctttgcgtatttttcttgcaagctgttaggcatttttcttatcacttctaagacctctttacatacatagtagagagattagctttctatgaatatgacttgttaatattttttccaagtttgttgttttgctctttgttatgataattttgcccccaccccattttttttacatactcaaaattatacatcttttcttttttggcttctgcattttgagtcattagaaggcactccaagtttgcaggataagtctcccacatataaaacttttatggttttgtttttcctggttatatctttgatctatttggagtttggcctggtataaagtgtgaggtatggatctgagttagtatttttaaactgggtttggagtttggcctggtataaggtgtgaggtatggatctgagttagtatttttaaactgggtttggagtttggcctggtataaggtgtgaggtatggatctgagtcagtatttttaaactgggtttggagtttggcctggtataaagtgtgaggtatggatctgagttagtatttttaaactgggtccatatttcatgagatgattggtcaagtggcatgcacggtttatgccctctctcctgctcctccaggacagaccgtcatccaattgcaccactgggtttgcttctttttctgtttatgatcattggaatgaaaccagttttcccatctaaaaatcccagctaaagtaaacctagtaaagctttgtctctcccagccaaagaggagggagaccagccacagatcatgataaaggacaagattcccatagatttcaggaagaaggaccagtggagggggcagaaagagcattttccctcttgagcagtctcccaaaagggtgcgcttttgacaactgctcagtagcgtgttcacaagctgtgggtcaggctggtggcacagggcaaactccagccaaggagacgtctagacaagatagcaaaagggagagtctttctcatgagctgttcccaccaccaaccaaggagcagccctgccaccccacctggaggctcattctgctttgtccccaggggtgttgagtaaggtggttagcttttcttctcgcttctctgcaccatgacaggagaattccagtaactattaccctgattcacggtgccaactgagcagggcacagggttgccaggtgatacatggcacccaggtaaacatgaatttcagataaacagtaaatgcacttttagcttaagtatatcccaaatattgttttgggacatactaaaaaaaattatgtgtcatttttctgaaattcagattcactgggcatcccgtatttttatttgctaaatttggcaacctgagtagaatgtaaagagttgggagaagaaagactgtgaccacttcagacctgtgtcactyrtggactaactttgctgcatggaaaagggagatagaagtgtaaatatgtcccaaacctccagaggatgagactagtctatctccccatctctcccctgctccaaagagcccagctctgtgcatcagaggaatatttgcctgcaaggctcattagttacatggatcatggcttgacaagaacatgcagagggaggatggctgatcatgttgaaggccactgaaaacatgagatggcagccactgcccagaaggaagccaggctgtacttcttgtttgtgtcttgcagattgatcaaaagcagttcgacaaaatcttagagctgatmgagagtgggaagaaggaaggggccaagctggaatgcgggggctcagccrtggaagacaaggggctcttcatcaaacccactgtcttctcagaagtcacagacaacatgcggattgccaaagaggaggtacaagrgggctgtggcaaggctacgacttgcggggcctttcaaacacgagtccttccctagggcccagggatcccagaaatccttgtgatctgagtgtttttttgtttttgttgctgttgttgtcgttgttgttttttctgtgtggtctttcccctctcctttggggtccctagggaagccgttttgtcctgcctctggcgaactccaagcatgatacagcaggtaccttgtttgttctagctagttttcactcatggctcaccctctctgggagcagcaagccctctctgattttctaacacacccggtccccgagtcagtcatgcagccgcaggtggagaactgttgccacctgtgggttttgccaggaatcarttcaagaacctgtggattcagggcccaaagccgccttcagtgcccctagactgaatttcaagtgttcactcaaggaacatgtcacagctggaatttttattgacattttccaccacggacgtcttgaaaatgagggaaattaaggagactcccccactcccataagagtgtaaatctttctctttcaactccactgttacactagacgggaactggttcccacacagcatttgtaagaggmgagctggatcccaggaggttagaccctggaggtggtattttggggcacataaaaggatgagtccctgccaagggctttctggggcaggtatttcagaggcgtcttccttgagattgttatgtgccgtgatggcatgaagctcagctccttaaacatccctgtgacgagaggtcctggggaacccggaaggtattttggcaggccaggcaccatcctgccggcttataattatgtctaatattgaatcaattacaagctcccttcaaaatcacctttaaatgttcaagccttagttcttccatttccttttctttgctgtgtcacaaactgtggtgaatattgtgtcattccttcccctggtagttattatggaaacgttctagggtgtcttccttggtagaaaacacagctccaagaggtaggagcacagtcttacaaagtgcctgcagatatccttcaggacaactccgaaaaaagttacctaaaggttttgtgttctgtgcatctrtgggttactccaaggctctctggctgggtttctcggaaaccctgatgacaacaagacatcttaaacacaacatatattttttgttattattttttatttttgttycatgttaatccttcccttcagtctccaatggcaatgcagctgaagcaatgtttggacgttctttcttctctaatcatcgtttttcaggcatgtgtrtgctctgggcatatgaaaaacatgtaaagagaaggaaatgcttgttcacagcatgcatttccattcagtcatgcctctcattgccattcttgcaattaatcatagattttcgggccagtgcaaccaatactgaagttcaaaagtatcgaagaagtgataaaaagagcgaatagcaccgactatggactcacagcagccgtgttcacaaaaaatctcgacaaagccctgaagttggcttctgccttagagtctggaacggtctggtgagttgactgtgtgtgtatttcagctctcctgagttgcttcttgctaagttcattattcttctattaactgagagtttctcattgtttacattgtatattatgtaccaagccctgtctcagtgcttccttccatcctcatgaccatcttctgaggtagctgccattatgtctccatttcagagatgagaaaattgaggcacagagagatgaagtgacttgcccagggtcacacagctagcagatggccgagagggctccagtacctgtgcckgtggcccctgtgctgtactgcccctccaactttattttccattctgattctaaaagcagttcatgcccatctgcaaaatgtggatactagtctctgcctcatcagtaattctgcagattatgttttgtgatccccatattaaagattaatgaattgaggctcagagaggttgagcaataagcccagaatcatataaccaggaagcaggagaactttkgggtcagttctgtctcatttcaaagctaattcttattcctctacaccctgatttttctttttctttctttctttctttttttttttttttttttttttgagatggagtcttgctctttcccccaggcaggagtgcagtggcacactctcggctcactgcaacctccacctcccaggttcaagcaattctcctgcctcagcctccccagtagctgggactacaggtgcacgccascacgcccagctaatttttgtatttttagtagagatggggtttcaccaygttggtcaggctagtcttgaactcctgacctcaggtgatccatccatctcagcctcccgaagtgctgggattacaggcataagtcatcatgcctggccctctcttcttttttctccccttatcatttcattcctatcccaatgaaacacactctgtacttgaggatttccaaattttagttgctgatgagaagaatgagaagacaaaagttgagagcaccctgtgttttcatcaaggaagctttggcaaaagactgtttattagacaatgccctgcactgggggctaagtggctgcagtgccaggagccagggggwcttctccagatgactctgagctttcttccattcttttctaggatcaactgctacaacgccctctatgcacaggctccatttggtggctttaaaatgtcaggaaatggcagagaactgtaagtgtttccatcattctgagcctgccgtgggctgaacactagatccactagatttgcaggcagtgacacaggctccaatctgctgacaccccrtcccccccacaccgccgctctgtctgggccagctgtgtccctctagggttggtggggacccatcccttcctctctccagcccacccttcccacttacatcctcagcctgcccccctccaggcctcggcttttgtgtctgcccagcagccatcatgctggggacattcagtggatatttgacaaaagctccctggacggggacacaggcagaactgaaaaagtgtacttttgccagatgtggggtgtcattattcacacaactccccactcacagcagtgaagacaggtaaggctgacccaggtaaggctcctacctgctgggtccttttttctgagcctagtaggggacctcctcccaggaggcatatgacaacacctcctgctgggcctctgcggccctctcagtatatgcaagcctactgcaaatccctccacatgcgtgtgcaaacccactgcaaacccctccatgcgcgtgcaaacccactgcaaaccctccacgcgtgcatgtaaacccactgcaaacccctccgtgtgtgtgcaaacccactgcaaacccctccacatgtgtgtgcaaactcctcagtgtgtgaacccactgcaaactcctccgtgtgtgtaaacccactgcaaaccctccacgtgtgcatgtaaacccactgcaaacccctttgtgtgtgtgcaaacccactggaaacccctccacatgtgtgtgcaaactcctcagtgtgtgaacccactgcaaactcctccgtgtgtgtaaacccactgcaaaccctccacgtgtgcatgtaaacccactgcaaacccctttgtgtgtgtgcaaacccactggcaaacccctccactgtgtgtgcaaacccactgcaaacccctccacatgtgtgtgcaaactcctccgtgtgtgtaaacccactgcaaaccccttcgtgtgtgtgcaaacccactgcaaacccctccactgtgtgtgcaaacccctccacacttccttttttgtcctgcctgctgggaaaatgagttccctaggtttagattaatgggtggaacttcttgcgtctggcccacacccagagctggctagagcaacccgggagtggagatgtgtggtttccagccggacactgtcttctctccccagctcaggattttattagcctgtgtggacaaacattttgtaggatcagtgttcccaaggaaccatctgtgacaacaccccaggttcctgggacatctctagggacccaaactcttccttttatttcactagtctgtcctatttatatacaaatgtagtcccttgtttgcacttcttccagcgggaacagactcaaacgcttcccctcaccttgggccttggttggggcctttktgtggctctcttttgagattcttaaagatgctgtgaagggatgggcctggcttccatccccaaacagatgttcttgaccagtctatgtggaattggggtcctgtccccctcccacctcagtcctgctttgtagtccatccctgactctcagcaaatactccaaggcgtctgcacttgtgagtgaagcctgtccattagccttcccccttatccctgtggctggcttcgccttcagcggacatcagtaattgttgrccatgaaacccctttgcagaaattgcatttcctccctctagtggcctgtttgcatttgagttctgtgagcccctgcttcatcacttsttacacctgcccctccagggacaggcagccagggctggggtcaccagggtcccctcttgggccctccaacagcaacagtactggcaacagctgggatttgctgagcacagactctgcagcaggctcggttgagctctctrtgcctgttccttcataccatcctcacgcccatccatgagatgggtccagctgttttcagatgagaaaatggcacaggaagctggtaagtgacagtcagaaatgaatgctggcagcttagtccttggacccaccgcagtgcaggaccttgctcaacagggatcacccttgtccgccacctgttcatgaggccacccagggtttgygtggtcatttgtctcctttcatctgctgccttcaaccagctgggtcattagggctggggaacccagaccccacacagtcctcctcccagasgccagacacagcctcacgccacagcaaggactccagtccccgaagcaaatgtccctgggcgtagaagctgcagggcccccaatccctggtgtgtactgctttgcactggtgattcaccctcattgcaaccttccctcttgccaccctaacagtgcttttggctccttaacaccccctcgcctggcacagagcagggcttggtgaggactcactggacacagcccatgtgtcctcctgccagttagcctccatcgggacttttttgaatgtctgttttttaggcccttggcctatattttctcaaggcttttgataaaatatttaaaaataattcacaaggagcctagaaactgcctggaaaaccaatttctgtcttcagttgtctctaattaatgtcttcatgttgcaagaagttccccttttttaatgctggagcatcgtgcgggggattccatggttttccccgtccccggccacctggactgggctggcttctggccgcccacccacgggcccctccgggagctgtttctgtgcgggtctcaggatggagcctgaaattcctcttcctcctgggagcctttcttctgaataaaaatgatatagtaaccaaaaaatctacgcaatagagatatggaaagtcaaggcttccctccctgaccttcagtcccatttgttagaggtaaacgttgttccatcattcatttgctcattcattcttttgttcacttggcaaatacttcttgagcatctttgattcaccaggcatgatgctaggctctgagcatactgcagtgaacaacacagccaccagtccctgtgcctcctgacattctggtgaggtttaacaggagtaaggctgggctcctggatagctttgaactgcaaagtggttgagactggctgagaatccattgaggagatgtcccactgggttgaataagagcagcaagaatttgaaccaggacagcaacttcagaaatgaaagaatgagaggagctctgtattgattcttaaaggaatgctgtaatcctactgcatgtgttagttatgtgttaattcaatctgatttcatcactttgtttgcgtttcttttctttactaacttgataaataattattggctttgaatttttacaatgcaacattgtattctcacttttagagtgtattgtgcattttatttgcatacaatggatttatatatgtgtgttcttttctgttttcaaatgaaatgggagcaagctacatttcgttattgagactgggttttggatatccttccgttctttttattgatgatctcctatgaggaacttttgtgtatttccaaggggttctgctattacaaaccatgctgatgtacttccttgtgcatacaagtggaagtatacacttgtgggagattgttttcagaataaattactaaaattgagtaatctgccacatgaaaaatgggctcaccactgttttggttacatttctttaatcatgatggcattgagcaccattttcacacttattggtaattcatatttctttttctgaaaactaactattcctgtcctttgttgatttttccatttgggtatttgtgtttttcttgttggtttgcaagagctctttgtatattaaggaaaatcacactctgattttcacacagtgttgtaaattttttttctagtttgtcatttgggagtttttaatggagtctctgctctacaaaaatagaatttagcattctgtttatggcttttatgttttgtgttttatttaggaaagattataaaataattcacttattttcatgggttctggaactatttgttttaggaaatgacctaaaaatctcaatggcacctaccattcattttctgcctaacacatagtaggggctctacatgattatctgtaattgttataattacaaggaggtgatggttttcctatttgatagttgatgaagttgaggctcagggaaggcaaagaacttacctaagcaacatagttctaagccagtggttctccaacttgagtatgcatcagaatcacttggaggacttgttaaaatacagatgtcggccgggcgcggtggctcacgcctgtaatcccagcactttgggaggccgaggcgggcggatcacgaggtcaggagatcgagaccatcctggctaacaaggtgaaaccccgtctctactaaaaatacaaaaaattagccgggcgtggcagcgggcgcctgtagtcccagctactcgggaggctgaggcaggagaatggcgtgaacccgggaggcggagcttgcagtgagccgagatcgcgccactgcactccagcctgggcgacagagcgagactccgtctcaaaaaaaaaaaaaaaaaatacagatgtctgggccccaccatagagtttctgattcagtaagtttattagtcttttattgctcctgcaagaagttaccataacatcagtggcttaaataacataaatctattatcttatagttctgtaggataaaaatctgacacaggtctccctgagctaaaatcaagggcttcattcctttttggaggttctcaggagagaatctacttccttgccttttccatcctctagaggctgctcgcattcctaggctggtggccccatcctccatcttcaaagccagcactgctgctctctgaacctgtttctataatctcattttgctctgcctctcttcttctgccagttttgggnnnnnnnnnnnnnnnnnnnntgaagttgaggctcagggaaggcaaagaacttacctaagcaacatagttctaagccagtgggtctccaacttgagtatgcatcagaatcacttggaggacttgttaaaatacagatgtctgggccccaccatagagtttctgattcagtaagtttattagtcttttattgctcctgcaagaagttaccataacatcagtggcttaaataacataaatctattatcttatagttctgtaggataaaaatctgacacaggtctccctgagctaaaatcaagggcttcattcctttttggaggttctcaggagagaatctacttccttgccttttccatcctctagaggctgctcgcattcctaggctggtggccccatcctccatcttcaaagccagcactgctgctctctgaacctgtttctataatctcattttgctctgcctctcttcttctgccagttttggggacccttgtgattacactgggtctgcctggatgatccaggagagtctccctcttttaaagtcaattgattagtaacttgaattccatctgcaacattaattcttcactctgtagcccaacatattcacaggtttgggggatccaattttggatacctggggagatccttattctgcctacgatagtagggctgggggaggcctgagaatctacatttctagcaagttcagaggtgaggctgatgctgctggtctggggaccacactttgagaaccattgatctaagggaggagatgggattctgtcacaggtctttttaactacagagactccagtggccacctctaccttcatctcttcctaaacaagcacacatttttcttcacctgacagcagatcaagcgcttagaaggatttaaatctctccaaagctgcctcttgggtcttggaagggaagctaccctgaagacggcccatggtgccagggaaggatcacctgagccctgcaagatttaaagaaaggaactataccaaggatgtgaacccaaaagctgtggcctccccatgtccactctgtgctaacgtctgcttcyctcatgccccctaggctggcctcactgcctgacagctggtccccagctgtgcactctgaggccagcttcaggcccttggtgttcttcccactggtcctctggccacatccccagccaatagctttgggcctctgcctcttctgtctcctcttcaagcagctcccaattgccatctaaaagttatcaacccagtgtaatttctgcccctccctcgttcacagacaccccaccgtccaccaggctctctcgttttgctctctattgccaccccagggaattcacctctttactttttttaaaatccccttcattctctaaagggaaacccttagtcctggccatttcaaaagcatcacacagaagaagaccttgatatttacatttaagtcacatatgcagctactgacacttactagtgctgttatagtcctggctattattccatgaggtcgtcacattttaaccttttgcataagcctccaacggcctgatggaatgatgaagcctcagaacagtttctacacaatggctaagggatgtacccattttgaattttcctcttttctgtgatcacagaggtgaatacgctttggccgaatacacagaagtgaaaactgtcaccatcaaacttggcgacaagaacccctgaagraaaggcggggctccttcctcaaacatcsgackgcggaatgtggcagatgaaatgtgctggaggaaaaaaatgacatttctgaccttcccgggacacattcttctggaggctttacatctactggagttgaatgattgctgttttcctctcactctcctgtttattcaccaractggggatgcctatrggttgtctgtgaaatcgyagtcctgcctggggagggagctgttggccatttctgtgtttccctttaaaccagatcctggagacagtgagatactcagggcgttgttaacagggagtggtatttgaagtgtccagcagttgcttgaaatgctttgccgaatctgactccagtaagaatgtgggaaaaccccctgtgtgttctgcaagcagggctcttgcaccagcggtctcctcagggtggacctgcttacagagcaagccaygcctctttccgaggtgaaggtgggaccattccttgggaaaggattcacagtaaggttttttggtttttgttttttgtttttttgtttttaaaaaaaggatttcacagtgagaaagttttggttagtgcataccgtggaagggcgccagggtctttgtggattgcatgttgacattgaccgtgagattcggcttcaaaccaatactgcctttggaatatgacagaatcaatagcccagagagcttagtcaaagacgatatcacggtctaccttaaccaaggcactttcttaagcagaaaatattgttgaggttacctttgctgctaaagatccaatcttctaacgccacaacagcatagcaaatcctaggataattcacctcctcatttgacaaatcagagctgtaattcrctttaacaaattacgcatttctatcacgttcactaacagcttatgataagtctgtgtagtcttccttttctccagttctgttacccaatttagattagtaaagcgtacacaactggaaagactgctgtaataacacagccttgttatttttaagtcctattttgatattaatttctgattagttagtaaawaacacctggattctatggaggacctcggtcttcatccaagtggcctgagtatttcactggcaggttgtgaatttttcttttcctctttggggatccaaatgatgatgtgcaatttcatgttttaacttgggaaactgaaagtgttcccatatagcttcaaaaacaaaaacmaatgtgttatccgacggatacttttatggttactaactagtactttcctaattgggaaagtagtgcttaagtttgcaaattaagttggggagggcaataataaaatgagggcccrtaacagaaccagtgtgtgtataacgaaaaccatgtataaaatgggcctatcacccttgtcagagatataaattaccacatttgccttcccttcatcagctaacacttatcacttatactaccaataacttgttaaatcaggatttggcttcatacactgaattttcagtattttatctcaagtagatatagacactaaccttgatagtgatacgttagagggttcctattcttccattgtacgataatgtctttaatatgaaatgctacattatttataattggtagagttattgtatctttttatagttgtaagtacacagaggtggtatatttaaacttctgtaatayactgtatttagaaatggaaatatatatagtgttaggtttcacttcttttaaggtttacccctgtggtgtggtttaaaaatctataggcctgggaattccgatcctagctgcagatyrcatcccmcaatgcgagaatgataaaataaaattggatatttgagaaacattgtgctttttcatttaaagaccaaagtcatttgaattcgatggcaggcctttctctttctgagacctgtacgaaatggctgatattaaagcaggatcaataatgtaagcataaaattacatttgctcagtcagtcgggcccagtgctttgcctgagtgtgaaacccatttctgtgggcttgggggttgaccaggcaaggagctgggcctcagaggttccatgtcatagctggctgagtttcagctgttatctaagctgcctgagtctccttttatcataaagtagtgatggtgtcagtgtgcgaaatggtggggaggactgcatgaggattgacggacagcattgtgcccctgacggtgagcacaagtgtctgtttttgtcaccttttcctctagagaaatctagaggatctagagaaaggatcaatttgggttttactgacctcaagtttctaaagcttctaaccaagaagcctcaatcaccccgttgtgagctgacgctgccattggctcaagatcattgctggtactggggtatgtcctccaagctcatcccttgcatttgatgtggaaagcccagatcattttgacatgggtggcaaagcaccaccactttaacaaaaaagggaggctgggatcagatctctcgtaacatatgcacttatgttaagagaatttagacacattatttagagacatcccatttctcaatccaaatgtgagcaggaaactgtaggagaaggatattttccctcatttggtgtcccggaacatgactccctgaagggagccattctggggacaattggagggtgtggtatgcgtgtgcacacatgcatttgtgtgcctggtgtgcgtgtgggggttggcacctctctagaagtggaccctttgggatgtcctagcttctcctgctggtggatgaagcctttctaatggctttgctccttgctcctaggcatgagcttgaagggggataatgaagggcgtttaggaagttgctcaaggaagactgtctgaggaaactgcgtactgggctgaagaaagacaaccggaaaacactgaaggagcgctcagccactgcaccttcaaaaaggcagaaaagtcagttcagggaggtgcctcccagctaccccacccgcctcaggaggggtcattccaacctagggtgctgagaatccgggtgggattaccagcaaaagctagagaaccatgggtcagcgacccttaggaagaagtggaaaggagtcttaacttacctgcaataaccttcctatgcgaagctgtggctaacgcatgcctaatggctagaattaaatgctgggaatataacgagctcagcacaggttatccgcgtgtcagatgttcctgctgtcttctacagtggggacatttcctagcctattcccaggctcctttagaagggaagtggaggtgccccatcttcacctgccgcgtcccctccagcgtctgcccgggccctgggcctgcgctccctcgcggtggcgccaggtggcggggctgcgcgccctggaggagctgcaccgccgtcgcggggctctctcagcactgaggacaccacgccctgcaaattgytgggaacttgtcggtggcaatcacactgctggctcctgcaaactggtgtgaggccctcaggggtgagaacaggattgcagaactgcgctcacccttttggaaagtcgtccagtggcagaagtagcctcccaggagcagagcgaagctgctcggtggtcccctctccaaccagggacccaagaagccgctcaagggaacacggccccgcggcgtccgggaggtcctgcaggagccctgcggctgcccgggttctgtgaaatggcagtgagggtgggggagatgtgcgctaaatcctgggaacgtgcgagtcataactttccaggagaggggcccagggcgctggtcctgcagggcgtggaaccctctgctcttcctgagcaggctttgtccccgggtcgacacggggagctcagcgtgaggcccgcctgcagcgtggacgcagatcttttttatggtctgcgtttctgtattagcctcagcagcctggtgacgcctttataaaaggtcgaaacacgataaattgccaatattccacgttttatgtattccccccaaagccgacaattaacaatgactcaccgagcagcagattctttgcacacatccataattgaatcagtaaaatccatgtgttggaggatatgcaaattgcaggtcgttaacgctttagaacgacacatttctgtatcgccccgtgaagagctctacgcacatgaatgttccccgtctgtttaactgttacggccgcagtgtgtgggccgcaggcgcgctgggggctcatctgctgattttgctgcccctggagcagagggatagcgaaagcggggctgagcgcagcacggaccgatcccatcgccgcgctcgccccgcgtggaggcagccgggtgcccgaacctgaaggaggacccggtgccggaagggcccgcggaccccggcgtctcccggggcatcgagcgccatcgcccgcgttttacggccagggaaactgaggcggccgccgaggggacgcctcgcgacggttcctgggagagctggcggcggccttgctctgcgcgctcttcgcgccgccctccccgcccgcccgcctcaggattgaggaagtgcgtctgggcccggccccggcgcggggggcagacggcggtgggacggccaggccccggccccgccagtgtgtccgcccggccccgcgtcccggagcgcccgcacccggccccgccgccgcctcaggtaagcgccgctcctgccggcgccccccggcggcctggctgcctcccggccccgcccggggaacccagagcccgcgcccggcgcccgcggggagcctcggcctctgcctgcccgcgggcccctgcgctccgggcggccgcgtggtcgggcacggggggccgttgcgcaggggccgcggcccgaggggcgcggagggcgtgtggggcgaccccggtctcacgtccccgctgcctcccgccgcgcccggagcccagccagcctgtgggaggggagcgcgcggggcccgagcagggaaccccgaaaccccgtccgggcagggtcgggaaagctgggaagcggaggcaagagacacgagtcgggagacacgagccggggagcccataggtttcctctgcctttggagcgaacccagtcccttagcggggagcgggcggagtgtgagcgcgcgggtgagcccgtgccggggtgtcggcaagagaccgcccgggagcctctcgctggtccggggcttcctggggttgcggggcggcccagcgaggcttcaccctcctcgatgtctgggtcacgcttcttgcccaggtggtctctggctggcgcagatacaactgctctgtctaccatggtctctgcaagctacaggggaccttcctggcaggcagggacgcgggaaggaagcctaggaaggccggggtcagcgaggagacgctggtggagaatctgagaacccccgtggccatctcaacctaccccttcacagtatgaggccgcgaagtttttctcccacgaacacttcccctgcaacaggtagagaaacgggggcatatagctttcagcaaacctctcaccgtgtacactaatgatagagtttgccagccactcacagggtatcaaaatgcccagacattaaagggatagctagaacatgcacaattttggaaaatgttaacattaaacgccttttatgatttgattctcttcatctttgcctatgtcctgaaagagaaaataatataacaaactaacctcacacctaatttgttcctaaaggaggttttgcggtcagccaaacctttccctctcccaaaagtcgatgtctctggcagtgacctcgcagtcaactcggatcctcagataaaaaacattcagtctgttgaatctatgtctaaaatgtgtcctgatctgtcccctttttcttatgcccccaccccccaccctgccccttgtccagggtaccagcatctctttactgtaggatttcagttcccccttcctccattctctatatagcagcgtgcgtctgtgtgtgtctgtgtgtttaaatgggtaaatcagaccatatcagtcctctttatggagtccttcagtagcttctccttgcaactggcacgcaatccaggagacctccttctcctcacacccccagctgatccagcctctgctgtctcggaccaccaggccattgccccaggccacactggctgagcttgctgtccagcactggtcccctgcactgctgcctcctgactcttcacacagcctcagaaagtcttccctggtcaccctctgaaaacccacgctccctctcacatccctcactctgcagcctccctgcagtccccattctgtactccttctttatctgtttaatttctccttaattatcttgtggtctccactggagctcttggggtcagagactgatctgtcttgcttattgctgtgccctcattcccataactgtacagggagataccccgtgcatggtggtagagtgactggatggggaatggacaaccctaacttacctgtggtttcagactcatggagcatttctctcctccaccctttttgggctcatctgggattgagaacaacatatttctctggcctgcagctccaagatatttggatgcccccaaacccattaaacacattttataggcaaaagccaatgctagtaagggatgcaaatagcactcaagagatttctagaatcatgggctaaccattttgaccaggattttgtttcaaaaaggaactaggtgatatgaatgagcatgtctagcatgctttgcttgcaagggacttctaacttctaactgatatcgacagtccttcccaagcctcctaaaatatctgggcttctctgctgtcagaagctttatagcaattacttagctgtctgctcccccaccagcttcacaaactcatgaagttccctcttcatagaaagaactcaataagacatttgtagaatgaatgacaggttcttctcttttcttttctctagagtcttgctctgtcacccaggttggagtgcagtggtgcaatcttggctcactgcaacctccacctcccccagtttaagtgattctcatgcctcggcctcccaagtagctgggattacaggcgcccaccagcatgcccagctaatttttgtaattttagtagagatgggtttttaccatattggccagggtgatctcgaactcctgacctcaagtgatccactctcctcggcctcccaaagagctgggattacaagcgtgaaccaccgcacccatctattttcttttccattaaatgtttaggtttattcattaatgcaggtataaatagttggcaaaaggaaattgatgaggttttgaaaaatcatttaaaccatcattactgctgaaaacctcttgatgccctctttagggtgtataatgaagacatgtaacttgtaatcatcacttgttggcacctctctggacccaaaagaagcaggaggaagcaaagatccgtttgagggcaaagattgagcaaaatttgaattacctcatcttaaaacttctaccttagaatataagccaaaatagtaactagaattttaaaactgctccaggggcagagtcttccactggtaaagtgattttcaaaaggaaactgaaaatgaaaaggggaacaaaatgtgctgggtgagggttagcctgaaataattttaagattttttttttttagaacttaaaaacattgtatggtaagacacttctgttttcaggaagaatgtctagcgtttggatttttgaaatgctgttggttatgtgcggtagctgttttggagaggtgtctgaaagcagatggcaactgtgcttctcagtttctggatgtgaatgtgtgatcggaacgtttat

SEQ ID NO: 95385 - DNA, 76850 bp, Homo sapiens
gatcctcaactctcagaatgatctacagatgcttgttaaaatacaggtttctggagcctactcaaagaatatgacttaataaatctgagctggtgatctttattttgataattcacaagctcctttcagagtaaccagaattattaataccccaggcttatgaaccagattgcctgagtttgagtcctaattttgccacttcctagctgtgtgattttaggaaagatgcttaatctccctataccccaattttctcatctgtaaagctgacatgataataatgctcaccttcaaagggattttaggggaaacagataatgtaatgcatacaaagtgcttagaataatgcctggtggataattatcatcctattatgttaacttatgattaacgatgattctctcttgacaattaaaatgttagaacaacagcaaagagatcattcgtccttattttgataattcgttttgtttgattggcacctggcattagttttctatgtaaaaaaaaaatagtaaagtcaaagacccataaaacacggactctgtcttcaaatggccaatgattttggaaagtctagaaatctcataagaagcaagatagcgaatgggtactaagctagaggaaaaaaacaatattgaaaacagagtgttgttgaaccaacttagaatgagagcttaactacagctatctttccatggaattttttttaacacatcatttcttcatttggctgaagctttcttttgaaactgatcaacttttttgagatattttgtgttgaaatatcttgagttatactcaaaaacacctttgaacaagtttcatatttattttgcagtagccattaactcattcatcttacttttttatatgacactgtatccactctatattttttcagttttccaaaatcattgaatttgtaagttacccctatggtagagtatttttgaaacagcattaaatatgtcagggcctataggataccattttgttttaattcaaagtgcatacaatttatggaatactagtgcctatgtaatgatatcagggctaactattggcaactaaaagtcagtataactattattttaatataagttaaacatatagaggcctcctgtatctagacatgtagcaggcttttcaaatatgagaaatgataaaatctctcagacttgcaaagtaaaaagacacgtttaccatgacaaaagatgacatagcaaaatttgcaatgtggataggttgaggatttcccagataaagttctggttctttttcggcttaacagttcttccttcaatctttctctgttttctcacattttacaatagcaagaagaaagtaggctgtgccttcaccattttgcttaggaatcttctcagttaaatatccaagatcaatatttccacatatctgtgagacataattcggctaagttttctgccaccatatactgacatattagtctgttctcacgctgctaataaagacatacctgaggctgggtaatttttmaagaaaaagaggtttaagggactcacagttccacatggctggggaaggcctcacaatcatggcggaaggtgaaggaggagcaaaaccacgtcttatgtggcaacaagcaagacaagttgtgcaggggaactcccgtttataaaaccattatatctcgtgagacttattcactaccaggagaacagtatggggaaaattgcccccatgattcaattatctccacctggccctgcctttgacatgtgaggattgttaaaattcgaagtgagatttgagtggggacacagccaaaccatatcaactgatgatctcctttcctacaacttccaataacactttcctcatttccacctgtatcctgttcgtagcacttttaatgtccatatttgtaccagcagtctgttcatgatgatttatgatgatttatgtattccctaagatgatacagattttctctaccatgcctctcactttcttctgaggcctcactagcagagttagcatccatgtttctactaacaatgtgttcaaggcaatctaggtttttattttattttattttttattattatactttaagttctaggatacatgtacacaacgtgcagatttgttacatatgtatatatgtgccatgttggtgtgctgcacccattaactcatcatttacattaggtatatctcctaatgctatccctcccccatccccccaccctgcaatctaggtttttaaaatgctggctccacacaattcttccagcctttgccattgtccaataccaaagacactttgacatttagtttcctattactattgtaacaaattacccccgaacttagtgcttaatacaacacacgtttattatcttacatctgtggaagtctgaagtttgaaatgagtctcattagactaaaacctaggtgatggcagggctactttctgtcccagagactctaagggaggataattttctagccttattcatcttctagaggctgcacatattccttggctaagccccttctattttcttttcttttctactttttttttgttttgagacggagtctcgctcttctcgcccaggctggagtgcaatggcgtgatctcggctcactgcaacctccacctcccaggttcaagcaattctcctgccccagcctcccgagtagctgggattacaggcacctgccaccatgcccagctaattttttgtatttttagtagagacagggtttcaccatattggtcaggctggtctcgaactcctgacctcaagtgatccacccgcatccgcctcccaaagtgctgggattacaggtgtcagccactgcacccagccccctttctattttcaaagccagcaattgcttatcaattctttctaacatagcatcactccgactctgactgactctattgctttaatctttcttttacaaggacccttttgattgcatttggttcacccacctaatctggaataatattcccatctcaagactagctgattagtaaccctaattctatctgcatccttacttctctcttgccatgtaaaattgcatattcacaggttctaaggattagcaggtagacatctttggagtgccattattctacctaccactgtatttactgctcacaaacaccaactccttggcaaaaatatagtggacagcatttctgttaccatcagaatctcttccagtccaggctgctttgtgaatgtctataccaggactagaaatgcgtggacgccaacctaataagatctagtttttctaactaaagctttacattcatacaaaagagacattttggagtctttgcatcatcttactgcaagttaccagtgtaaactttaaccaggtacattaaaacaaattgaaaatgaataatactaagaaaaggaggaaataaggagccagaagtttatcttatttttcttatatttgagaggttatcctaatttggtaaaccatacaatccatagtttgttcgtttgctaaaaataaaacaaagctctgaccctgacatatatgtaacacttctctcatttctacccttttactgttctctatctcgttcttaattccccttggtttatggattttttatggtccacaaagtcagtagagatgaaaccattagtcccattactttatttgaactgacatggcaatagtaacccagaaaaataaagatgcaggttctaaaaatccctgaatttagaaagattcatacgatgtgttttgaggcttatcatacttaatgccttgatagtagaccagtgcttttcaaactttaatgtgcataggaatcacttgaggattctgtttaatggatagtctgattcagttggtttagagaggggcctgaacttctgtatttccaacaagattgtaggttatgggatactgctaatatagaaaccatactctgagtagcaaggatttagatactatctctagttgccattgtcctttcatttgcaagtgtgaaagtaatgtacatttaaatgctttcatgctgttgtcaattgtgggttgtaggtacaagaaaaacaaagcatcttgagaggaaataaaaatttcttgagcttttctgccagcatcaacatggctaaggagattgctttacactgagtaattttccttgttaacatttttattaagttgtcatgacaactttcttattctccataaagtggaggaaagtaggttttaacccataagtcaactataagaaagaagattggacctggaagatgatgaaatattcaggtattcatttatccactcagcaggcattttagtgaatcccgttatgaaccattttcattactaggaaattaggctgtgaagattagtatttccctaacaacaaggaactcttgttacttttttagagcatatcaaacatccagattacagaatgtcttttgcagtcaccttttggtggttctagccacccttatgtttagattggttgcttcctcttcttacccattgtctgacagtcagaaaggatagaggaggaagaagacaagacactatccagttgagagtctactcttagtaaaactcggtagctcctggcagaatgtactggggtcaaatgcaatactaatcaaggagtttggtgtgccataaaacttgagaatggtaaaagtagaaattaatgggttaaacaagtcattttccagaatgaaaggaatattggtaatggtatcaacagacgaggacaacagcaacaacaaagtctttatacaagcctgcaacacgtgacaactgcggatcaggcatctgaacccggcctatctttccaccgtatcttcctacacttttctttatgtactttttatttctaccagatggtattactccttgtttcttgaataacagtgtcatgcctttccaacctctgtatgtttgctcacaagtttccctctgtcagagaaaagcaaaaacaacaaaaaagtcctctattttatctttttccaaacataaccaatccttcaagtcctatctctagtactgttcctttatgaaccctgtcagacaatatctcattttcttctgaatgttcatagcatttacttaaaaatagtatgacttccctcttctttttactaatgaattactgtgtattttttaagtttccttctacatctgaagttctaaatattcttagtacaaatgtcctactgatctaagagagtatcatgggttaaatgtagaggaagagaagtttctgagatggcaggaaggcaaaagtttctgtgactacctgtgcttatattgctgactttcttaactgttcctgacttatttaaatgtatttttttcctgattctgattaatgttcactatgaggcaagcacagtaggcaagactgggagaaagtttgcaaatgtgatgagcttacaaatgggaccagattagatggtgtacttgggggagatataaaagaggaagataaccatgaattgaactgaattgaaaatggatcacataaagatcatgattaattgttaattcacaatggaacagcatgatgggatttttttaagtcagaaaggtgactaaaagcataatatcacaacacacacaacggtaacaaatataactaaatgcactgaaccaggcagaagccagaccttactgaaaagatgtaaaatctctgtaaccataaaactgcatctgcaaatgagtagattggcttcaaatctgaaaaccaggacaagagagtcatcagcgcagatgtcaacttccccagcagaaatgttggagtttttaactgtggaaaactacagtttttccacaccagtgcatagtggagaagacatgtttttgtttttctttttaagtgtgccaaattttcctggagtcccctccaatttttttctttctctctctctctctcttttttttttttgtcccctgcccctaggtctctgtctccacacagtgatttctgttatggcgattgggcggctgcagagaccaggactcagttcccctgccctagtctgagcctagtgggtgggactcagctcagagtcagttttccagaagcaggtttcagtgcagagttttcctacacttttcctgcgctagagcagcgagcagcctggaacagacccaggcggaggacacctgtgggggagggagcgcctggaggagcttagagaccccagccgggcgtgatctcaccatggtgcgttttggctgctactttctttttcagtctttcggtgcggagaaggggaggaggcgggcagaggtctgaaaaaatcgaatgccttatggaaaggaactgcaagggttcctttggggtgatcaaagagggagacacagacacagagagacaaaggcaaggaggactgtctgggagccacgcgggcgatacagtttccgaggcacgccgcgtcccgcctagcctgttgaacaggtagacatgagcgacccaagcgtaagtgccgctgccgcgagtgcccagggtgcactcgcgcggggaccgacaggtgccactgcagggtcccctctcccgctcactgcctgccacccctgacgcctgctctctttctccattcgcagtgcggatttgcgaggcgcgccctggagctgctagagatccggaagcacagccccgaggtgtgcgaagccaccaagtaagtggtcgctgcatccccacgcgggtcggggttcttcagacaggcggtccctcttccgggacccccgcttgggctgggtctccttcctctcctgagaaaccttcggtacgctcccagttgcccagccctgggaagccagcatcgggttcccacgctggggaggagcgagaggaaaggagaggacgcccgaggggccggcccagggcccgggggacccgcggcgcccgagggaggagcacagacgggggtgggcgccgagcagcgccgcgccggctgctgagctcgcggggccgggccgtgagaacgcgcggggcgcgccggggccgctggtctcccacggccagggcgcctgggccccagagcccatcagccgcgtgcagcgctgcggcctccggcgcgccggcaggcaagcgagcgggcgcagctgggggatgcctggaccccggaggcagcagggctggaggcggtggcgggcttcagggcaacttcacccggccggctgcggcgtgggtaagaggcgcgtcctcctccacagcaaaagctgcgatcgctgggctgcccagagaaggcagccggctaactgcccagcggctccacgaggtgtgcgcgtgtgtgcgagagagacaaatgatttactgcttagcagtcccatttctgttttcgttaggactgcggctcttggagaaagcgtgagcagggggccaccgcggtctccgcgcctgtctgcaccctgtcgcctgagctgcctgacagtgacaatggtgtgaggggctgcgttgcaatgtggtcatgtgatttcaggctatggatttcgtgcgtctttctctgctcactgattttcacatggttattctttcattttgcactcgataaacagtttacatcttctgaagtaagccagaagattgtatggctcacttaacgatgactggttgaaggcatcttgatttggaacctatggaaacagtgctgagttttaaataggacagatttttttttctttcatttgaacttcatttataacatatcaatagtgatgttttaggatcagttctcctatggtaatttcactaaatgcctatttaatgaattgatttgatttcatacatctctaccacttactagaactgtctttgtacaaacgtcaaactttcctgttacatatgggtaagcrtagaagcacttgatataatttttttttatcttggttcakagtgtagaagtggtctgttgcttttcctaaaattgctatacatattttttctttaagagtgatcatttcaggtaccctattatgtacagtggtaaaaagtaaactcgttatgatagcaacgacgatgtaaccaaaataagcaacacttaattggtctgaaagttatacatataagctttattattgcttcagtggaagttgtctatgcattctgtgctttgttcagccattaaacaactgggtccgtgatcttcttcaaggggccgtgaagtccctaaaattgtatttaaacattagagtggctgcattttaagggagatagtacatagtcaaatatccaaaatggacctgtgtcctaatagaaaattaagaaccacggggtaaaaacacgtaagccatactttttcttatcaaaacaacaggctgtctacatacagcctgcagacataggctagaaggaaaattctagaacaattaaatggtgttacmgtagttaaatatttcacataaaatagaccagatgtatgtattttaatgtattaggaaacaggtctgtgaacgtatttagtagaaatttgtaattaatagatgggtaccttatatttatatttataaggtatatttatactttatattgtaagatctctttctattatacgacagaaaataaaaattatatttttgtctttgaaatccaatcaaaatataaagtacttatgcttggtatagtgtctcatagtgtatgaaatataaatagccccttaaaggtcttgcttctagatattcaggtattaaataacatgattaaaatcgttttctgtcattcggagaatgaggaaggaaatataaaattattttatttatttatggcaataccaaaaacaaaagtgtgaaaaacttcacaatgcttagtacttataactcttataattatgtcttattaagggatctttcttaagacattttgaaaagctattttaatatttcactacaaacaagtgataatattaaaattaaagtatatctattacaaatacatcagtaaaatattttgtgaccgaattttaagaattttgttatatttttcaaatgaaattgaaaaaaattaaatgtttatctaacatcacttttattgacacattgatattgcataactttgaattttttcagaaactatacaagggaaattaaatcctgcatttacatttgctagcaactaatgagtgtggactgaggataatatttcttgctttacaggttagtttaaaataacacgatctgcacccccataatttctaattaaccttttttcagaactaaataaacatcaaattagccatcagaatgaatctctacaagtaaggggaaatggaaaggtaaagcaacatttcagtaatacaagccaaaaagtatgtgcattaatgggaaaaatttttggaggaagctgttactgagaatgactttttctgtcagattcactaagaagttgcttggcttttatttgtgagaatattccattttgaaggcactatttttacactggttaattaaaaatatttacccaagccacttttcttaaacatttctatttattacttttctgcacatttgtaaaaacaaattttttccccaaagtattaataattaaaaatatgtttgtctcttgaccatctacattcattctgcaatagtttgttttgggtgtctacatcttgacttgatataagaagagcttttgtcaatgtttagttactagttgatttactttgggtgaagtaatttcctggctatcctgaatcatatctgcttcttttattttctttcagaacattttgaaatgtcttacctattatatatgtaatttttcttcttccctgggttcatgccaataggcttcatcttcctatagcctcgaaggcttacagaggatgaacagagttattttggaggggtgaaagaagagctgtagagtgggcttccctctcagcccacagtaggagagaatggctacatcttaaaacttgagggactctggagcaggctcttccttgccacaagaatgtgcctcacagcctgtagtttctaacttctggtatgctttctggccattaaacaatatttcattaaaacaaatcctccattttaaaaattgaggccaagtcaaattaattaactcacataccaagtcatctatctcaccatactaagaattagcaggaagtcgacacgagacaatggctttgagagtgaacaccttcttaggggggaagcaaatggggcagacccatttcttaatcctgacctttttttctaggtccagcctatctatttatccccttttgctatgtcacatgacattgaaagtacctgtttaaatgtctgcatctcccattaaactcaaatctccttcacggtatccaatgttggatccatagtgcttggtgcatagtaggtgtctaaagagcttaacattgttgtcattgttattcttgaattaaggcttgtttatgctttgatgctaccacatggagctatggtcttggtgacagagacccttgtgtgctcttccgtcatatagtttgtggcctcttcagaattgcttgtaaactgttatttatttcaccaacaattttaactctgctccaacccttaaatctcttgccactagacctaccagaacctgccttcccaatgtcagcttcacttttaatgtttgctttaccttccttgctgttgatttagctggacaaagagagacataactgtatcttgtagccaactaccaattgcttcactccaatgtcagcttggaggatactttgtgcagctattttattcttttttagttaatgtcatatcaaattctccatggtacatattctggatttttccaggttttctagtctgcccagattatctccagactcttcattcttagcagaggaccatactttttaattcacagaggatgttaaggtcagtttgggcaaattatttgtcaacactcatcttgaatacagtaagcatttctttgaccagctgtgagcataagaactcttttcttatattcagctatcgaatttgtctctataatatttatatctttaattttttacctcttagagtatttatagaaaatgcttttacatctaacaactcttaatagtgtctaagataatattcagtttcttcaacccatgcttatttaccatgggttgagagtctcattgttaccagggcttttctcttttggatgcacttctgtttttattaaagtgtgatccccagagtttaacatagaggactgtcctctgatatatttatcttctctggatatcatgtagtaaatcaacctgaaatctattctactcttccccsctccgttttttttttgcactcatacaacactgtttaattatgtatcttttttgcacattcttctgcaaatacacttattttccccatcgaattttatgtttggccacttgatttgggacttttacaaatacttactgcaattaaatttaatcattacctttagttagcctgttgttccagaaagtcaaggtcatcttggattctgagtccttgatacagaatagccattttcaccaatttagaggaattaacagatttgatcaggatataattaacatcttcatccaagtaactatctacaatgctgaactggaactacctttggcatattcctagacaccgtcctttacgttagactcctgctttacattagtccataaattattcctctttataaggctgttcaaccagttatatagtcaaataactctctttgaagttgacattcctttgtgtgacttaagagagtatactgagacagacttggtcaaattcctccctgaaatgagtctccactttctgcagaatagatgtcaagtaactgctattaaaaacaaaaggagataastaggttagttgacaaggataggttcctgtgacctctccttatcttgtagataacagcacttcacattttgaatgcttgcatgccatgtttttaatcatctctttggaatagtacctgcaattaatgtccagctctctaaattatagctgatggaatccaccttcccaattttgaaaattgaggcaatggttggactctgtcaacacttctcttcatcacaatatttttaaagatgactttaacaattcctttattttatccacacatgctttcaatattttgtagtgtaatttctccaaattaatggatttaaactcatttagaatatttgctatcattctacatgctggacctttgttatttttagttttgttctacttttataagtatggatattgttttcttaaggaatggatatgaaacaaaacaagagcagagtagttctgcctgtttgttcatgtactgtgatttgaatatctttatccagtgtgctcttcctatatctaataaaaatgccattatcaccactttatctggcaatcatagcaagaattaaaaggacattttttcttttttttataagcttcaacttattttatgtcttatattttataacactcttcttagagactcagccactattttgtacttctctcaataaagtttattatggattatgcttgtcactgaggaagatacaaagcaaagtttatgacacacactccttgacttgaaggaatttaaagtctgcatgaacaaaaccaagaaatagtctcagaattatacatgtcagcacttaacaatgagcataatatttgtagaatagttttaataagttttaaagaagttaggagaaggaagagagttcggtatgatggaaatattgagtaaggctttccagaggaaatctaagacttagctgaggttttaaaacaagatcaggatgttggacatcacaggacctgtaggatttaaatgtggcaaacagtaggaagagtattctagacagaggaaaggaaaggattcactgcagggatcagatgtgtgtgtgggtgtgcatgtgtgtgtttgatgkgtgtgtgtgtaccctgtgtrtggcggaacgggtaatgctgagccttcccaggccatagctttgaagtatttatttgtggagaacaccacttttccatttctagcttttcgtttccccttgttcaatctttgtggggcccacacctacacatcttgtagatctcaaactaagctctgcttcttaaaacctttccctgaacttccaagcctaaattgcatgccttattatgttttcctgtaacacattgtgcttcctttgtagaattattatgatatgaataattacttgctgaatttttactattatactgatacttgtggagagaggtaccatttctgtttagttccccattttatacacagtcatctaatacaagtgctcaatggctcataagcactcagtgaaaacgtgtgctatggccgggcgtggtggctcacrcctgtaatcccagcactttgggaggccgaggcgggtagatcacaaggtcaggagttcaagaccagcctggccaagacagtgaaactccgtctctactaaaaatacaaaaaattagccgggcatggtggtgggtgcctgtaatcccagctattcgggaggctgacgcagagaattgcttgaacccaggaggtggagtttgcagtgagccaagattgcgccactgcactccagcctgggcgacagagcgagactccatctaaaaaaaaaaaagaaagaaagaaagaaacaaagaaacaaagaaaacatgtgctatcatgagcctacttggaacagtgaagttatgtggagagtacttgtaaaaaaaaaatgtttaaaataaagaagggttagattacaagtccagcatcttcgttctttatatgcttattctaacagattttttctatttttaaaatttatttctttttacatcttaagcttttttattaaaaataaagacaaaaacacacaccttagcatggacctacacaaggtcaggatcttcagtttcactgtcttccactgccacatttctcactggaagatctttagggacaataacaagcatggaacagtcctcgcctatgaatacaatgccttcttctggaataccttctgatgaaactgcctgaggctgttttacggttaacttatttttataagtaaaactagtaycctctaaaawaacaataaaaggcataatatagtaaatacataaaccaataaaatagtactttattatcactatcgagttttatataccgtaggtaattgtatgtactatgctttttatatgactggcagcacagtaggtttgcctgcacgaacatctccacgagcatttcagttatgcattgtgctatgacattacaatggctatcagtcactaaggaatgggaatttttcagccccattataaacatatgggaacatgattgtgtatgtggtccatagctgacagaaacattgttatttggcacgtgacagtatatgcactggaatttttagctgcttatttttctccatttgcaatatcactttgcagcttcaaatatgctcattataagcagttaaatgatatgtggtttttattacattattaagytaataaaataagtgacaaggagtttcagtattccatagtataacataaacttttaaattgtgtatttgtgagcataaagttatatcaagatctttagcactatatatgaagtatttagagagttacaaatgtagcattgaaggaaatttgggtaaatgcaataaaattgtcagtacatgagttgtaaagcaagatatccatatattagattagcactatacatttgtaaatatgattagcaaaaggcaggcttcccagcgaaaacaaacgtctttgggtaaaattctatttcttttaatgttttaaaatatttgtagtcactaattgtaagtcatattcctctttgtccagctctatcccaaataacaatttaatacaccgcagcatctatttctgcttmttttctgtgtcactggctcagaataattcataagcccttgttgtttcatcttatgctaacaaaaatccagcagtggtatgtaggagagctgtgatatgccctgataagagtttatactttggagaacaaattatcctaattaaagtcactgcttttcttctcttctctctctcctcctctttgaagctgtgagagtttatcttaacctagactgsttaccacctatggctttatggcttgcctgctggcttggctgagagcaagaaagttgtatatgagggatatcacaaggccaccttccacaaaaattgctctcccacttggtcctgtcctaaggcctaaatctcctttgggttgatgcaatcttttggagtgtctcctggagtcaataagatgcctgttttaccgtgaagagcagcacaatgaagaggttgcccaatagcagtggttacttttattatgttgtctttctgccttcaatcaagagcatgacacttggacatagctttttaaagtaaagagaaaaggaaactgaaaggctcagtatgtgggacatagataagaaaatgagacctaaatagggtgtattgggcaacaatacagggcttaaatagaaagaggaagaccaaaagaaagcaaagaatgtcctaagaagagctggkttttttttttttttttttaacaattttgttgcctattagttttcttcattcctggggatggttgggacatttttccacatcggcatgttatggccttgattatctacctaaatcaaaccagaggaaaatcattttagtttatttttatcttaacattggatctgtttcagcgcgtcctggaaattagtagttgcatgttgtcaccgtctattttgtacacagtgaaaaggtatttggctgtgtttctatttacattcactgtccttgataaatactaattggccagtgattgtaagtctcaagaatttttgctgcagagcgtgtgttaaaactcattttaagtggtgtaggagtcatgcagtgtttatcacttaagtgggtaatctgacagctgtattttactgcctgactgcagctttattcttgatcattctcttccttgagtagtgtgttatggtcatgttgtcttagctgcaattaattcccaacctttttttgttttccagtctttgtcttttgcatttatttttctgctcctgcaatgccttactttgttgtctctgccttgctatttcctatttattctacaaagctcaccttaagtgtcacgttttcagggacatgtttaccaatgtactgtacaggggcacatgcagattcttcatgtccccatcacaacctgtcatgacatcacactgaactgagtttgtgtggtctaagtctgtccgccccaacctttactcaaaacgttccttaaggaactaggattggattgtttttatttctttgtttttgtttttaatccctgaaatttcgtcctttagaatgtagtaataggtacctaataaatatttttggcatatgtgaatgaatgartgagtgaataaataatcagattagttgatgaaagattctaagggaagattaggtartgtgattataagagaaagatcctgaagaatgcttgggaatggatcctttactcatacatgattttgttcatcagcttatatgtaggatcacagtcatttggaaaatattggtccattgaaatttatacattttccaaatggtgacacacttcattatacagtgtcaaaagttagccttcatgactatcaccactgatctcatcaggaagttttaagtattggatagctataagctcacaatggcagtcctagatagtgcagccgtggattgaaaaagtgttctagtttcctctttttaagccaagaatccatccttaaatataagaagaaaatcaggccgggcaccgtggctcacacttgtaatcccagcactttgggaggccaaggtgggcagatcacctgaggtcaggagttcgagaccagcctggtcaaacatggtgaaaccccatctctatgaaaaatacaaaaattagccgggcatggtggtgggtgcctgtaatcccagctactttggaaactraggcaggagaactgtttgaacctgggaggcggaggttgcwgtgagccaagttcgtgccactgtactccagcctgactgacagagcgagattccatttcaaaaatatatatatatgtatatatatgaaaaaatcaatagacttggtcttagaataaatattaaaatctaaaataataagtttatataaaaaattagcaaagtggaattacttcttatgtttacatttaagaccaagaaaaacttcaagatttcaaaataataaattattagacaataatgaaattacaaacattataacaagtatactgatagttaggaaaaataatagagttctgagaacaaactgcgttaatctccaaaaatgtacacttatactttaaacctactaatttagaaaattctacacaaatataaattccattagaatgattacatcatcacatgtcatgtagtctctggagaactctgctgcaatctgtgagagaatgagaatgaaaaaggtgcataatattagaatattgttatgaaaatagttctgaccatgcatatcctctgaaaaggtctcaggacatccccaagagtttgcaaaccacatttcgagaaatgctgctttaactcaaatgtgtcttgaacaaggtaaacataaaggtttttacaataattttatatcaagtccagtttataatagtgaacatttcttaggtacattttacattccaagcattaatacaactgcattactttaatcaaatcccttgaggaatgttctattctcatcactgttctacagatgaaaaaatggatgatgcacagagtagataagtcacttgcctaatgtcatacatttaattaataatggaaccggtatttgtagccagggagggttcacacttttacttactatggtaattactatggtaacctttctgcccacattgcaagttttcctgatgatttgtgaattacccaagttttgcttataaacaatagcatttgttgaatgtctagcattttaagaaactgccaaactgttttccattcccaccagtaatctgtgagatttccagttattccacattgccaataactcttgacattgctgaactctagaattttagccattctaatgggtttttgtttaataactaataatattgagcatatgaagaaatgtttatgactgtttatataccttctttaatgattgtctattcagatgttttgcccattttaaaatggaattgtttattttcttactgagttggaaaactgtatattctgaattaaactcycttgctgttgtgtgttacatatattttcttctagtatatgacttgtgtttttgtttatgtaataatgtcttttgaagagccaaagtatttkttttattttgatgaagtccactttatcatgctctttttaaatatttcatgttttttttttcaaatttaagcatctttgcttcaaacctggtcacaaagaatttcttttatgttttcttctgtaagttttatagttgtaactttcgtacttaggtttacgatttgtcgtagtctgtttattttgctataaaagaatacccgawgttggataatttatttacaaaagaggtttatttggctcaatgttctgcaggctgtgcaggaagcatggcaccagcatttgcttctagtgagagcatgaggctgcttccactcatggcagaaggtgaaggggagccagcgtgtgcagagattactgagagagagaggaagcgagggagagagagaggagacrccaggcttttgtgtaacagccagctcttgaaggaactagtagagcaagaactcactggctatcgtgagaacggtgccaagtcattcatgagggatctgcccaatgactcaaacatctcccatttcactccacattcaacactgaagawtagatttcaacataaagtttggaaggttcgaatatccaaaccatggcatggtccattaagatttaatttttgtatatggtatgatgtgtggataaaagtttatttctatttctatatggatttccagttgttccaatggcatttttatwaaaaaacaaacaaacatattttctttcctgattttattgccttgacacctttgttgtaaacacaattgtggatctctatctcattgatctctttgtcacccctttcaaactgatacctcactttcttgattactttaactttttaagttttgaagcaggtatataagtccttcagtgctattttttcttctttaatattaatttggctatcctatgtcatcagtgaaatcttagcctcattttttcaatttttactaaaatgatggctgagatgttgattggaattgcattgaatctataaaccagtttagagaaaatttgtaccttaacaatattatacatggtatatatctctccatatatttagaccttccttaatttatctcgtgaatgttcgtagttttcagtgtaaaagtcttgtaagcctttggttagatttattgctaagtatttattaacagtatcataaatgagtttttaaaataattattttccagtatttgtggctagtacagaagttataatggaattttgtatatcagtcttgtatcctgaaacattgcttaatttacttcttagttctagttattttgtatatccactgggaattcctacatgaacaattttaagtatatgtgtgtgtgtgtgtgtgtgtgtkcacatgcatgtgtatgatccttgaacaacacaggggttggggcactgacactcctgcacagtcaacaatccacataaaagttttgactcctcaaaaacttaactactaatagcttactggtgactggaagctttaccgataacataaacagttgattgacatgtattatatactgtattcttaaaataaagtaagctagagaaaagaaaatgttacaaagaaaatcataaaggaagagaaaatatatttaccatttattaagtgcaagtgggtcattataaaaaatcttcaccctcgttgtcttcattttgagcaggaggaggaagaagaagataaggggttggttttgctacatctgggatggcagaggcagaagaaaatttgcatatgagtggacccatggagtttgaatctgtgttgttcaagggtcgattggatacacacacacacacacacacacacatgcacacacacacacacatgcacacacacacacacgtgcacataaacctgcaaccttttggccttttgtttaactgattgcaatggctaggacctaacttctgtacaatattgattagaagtggtgagagcaggcatctttgcttggtcctgaataatagtggaaaagtgttcagtctttcatcatcaagtatgactcaataattatagttttcatagatgctttctgatgggttaaaaaaattatgattgcagagcttgtctcacttgttctcattattagtgttggagtgggagtctcttgtgactttctgcaatttaaccagaagtcaaagaccctgtactttgagctaacttttgtgctctgtrtagtaagtatttctatttacagaaagctacaaatataggtaacaaaagaaaaggatttcatatcctcacaatccttctttcaaacttgctgtttcccaatccacagatcttaatgtaatctgtactcagttacagtgtagtactttatcactataactccttattttcttccactttcagtctactattcttattcaaaattttgccttaaaagccataaacatctttctaatttaaaaatcaaatgatattttctcagtcctccttaccctcttcagacttgtgacatacacttcttttygaacacgtgtcctctttcatattcattctcattgtacttttctaattgctgcttctctgtcatagtcatwatactttctccagtccttaaacatgaggattccctggagttctaaatttggttatcttctctctatatatgtagcctcttgatcttaaacagttttagttaaactcctgactataatggtttctgctatggggaggagcacaaattcatctctaatctgttacacatttctgaagtaaatactccgattttcaaaagcacctccaccctagattccctgctacctcagttcaagatccatgtatctaaaacaaattcaacatcctttctctcaggcctactgctctgtttctgttacctgtttccatgaacggtgctatatctttctacacaaaacttcagagtcattctattcctcagatctagtgagttgccacatcatgccaactttaattttataatatctctagtagccatcttttcctgcctctttcccacaatttccttcatttcttgctttcacttacactgttctttctctgtggcgtgccccttgccaaaatcttaattttcagaacttagtcatttaaaaaaataagctcaaattctgtacattccaagaaggcttccctgatgattcttttgccaccaccgcctaaatctgatatttcttataaacagttttaactctctatctttacttattctccctttttattgtagccattagctatttaataaaatttcttatatatacataagaaaattcgactgggcacggtggcttatgcctgtaattccagcactttgggaggctgagcggggcggatcacgaggttaggagttcgagcctgaccaacatggtgaaaccctgtctctactaaaaatacaaaagcattagctgggcgtggtggtgtgtgcctgtaatcccaactacacaggaggctgaggccggagaatcgcttgaaaccgggaggtggaggttgcagtgagccgagatcacgccactgcactccagcctgggcaatagagtgagactccatctcaaaagaaaaaaaaagaaaagaaaattcagtgtgtgtgtgtgtgtgtgtgtgtgtgtgkrtataccccactcatatcaggctttgaagaaaattaaagaaaggaatattttttgtccttttatgaaacagtaaattttgattgaattataaatggatctactgacaactcattttaaaatktatttccaataagcaagacattttagaaactctgatttagctttcttttatttgtattttatgttttttctggttcatgttttgccccctatattgattatagctaatagcctaatattaatatattttattgagattagttaatattaattgagtggccaaatgatggwtgattctgtgctgagtgtttctgataaggcagtcaagtatagaaacatggatggtttttcatttagctgatttcacagcaaagtgcaaaaggaggataggaaattacatgagcattgttgatttctttatcaagcacagaccttggaaatgcataaactctatgtatagtgagatttcactttttctgaaaaaagttgaaaaacaacactaataataagtaaaatagaaaaagagaatatataggaaaacaaaaaaaatggcttgtcaaattgtgtgtcatttacataggtgtgtttgtgtcttcacatacaaagaatccagggaaaataaatggaaaaaaattgaataaatttaataataacaatttagttagcctatctatgtcacttccgtgtttataccagatgactcagagccagtagttctttcaatttcagcagaaaataattattggcagtcccaaagttggataaactgtgacctgcattggctggtttgattaaggctggaaaatagcaaacttgattaagtgacaaagacaagataatgaggaaagttatttagaaaatgtgtttagagatttgaaaagggactaaaagatagtttctcaagaaagtgcaaaagaagatgagaaaattatgaaaaagagtctggggcaacattttaggaactgtagacagtgaaagcaattttataatgtatgttaatattagcatgatatatagacgaaaggtaatcttctgattggtctgagatgaagtagttatgttaaccctcaaaagatgatgaagtgtgaaatttgaattcagataactaagttttcaagttttctcaaagtattccctgcagtggctggtggtccacaaagaaaggagggcttctcagcattttcagtagaggaggtcatcagggtatattgggtgaactcaatacacctatacacctcctgagctttggggtttgagccacatcactgaagtctgcactctgtcatctgcaaatggaagggactgcaataaataatctctaactcctcttccagttctaaactcctattatgcaaatgactctgtctttatattgacttttatgtaagaggtactgaaatgaataggaaaaattgtttggtatttctttaaattttctctattttgaatcaattagatggcagaggcattaaaagaatatagttgtgggtttggatttaatgggaaaagactcagcctttctcaatatggactttgcaagcatccaaatatatacctgcaaagtatatgttcagaagtccaaattcatttctggtaatgattcttctaaactaatcattatgtaaaaacttggcagaattgagtttgtgttggaatttgccacgtcttttgctaacctgattccagcataagcatcaaggatctgtgtcccagtgttatgacaaaagttcatttcctgtcttaagaatcagaaagagctttactgctggtcagaaaactagaaaaggtacctgactacccatcaattactaataccttagtagcctggtcccctgggccacctccaaagaaacatctgctgagtctccaggcctcgaatctcacacttcacttttatgagccttttctctggggtcataaaagaaaatttctctgagaaacgtactttgccaaagtttatcccttggctttgttgtaaagatcctttaaatgtggcagagacaccaacagcctttttagctgcctttcaattcttctctgatgcctaaaactagagaggctcaaagtgaagttttcaaagggagtctccttagagttcactgggaccctggaagcatctctcatgccttcattttgggaatatctaaacttcattaccttaattgacatgcccaacaacctgatctttcattttattctgtacactaatttaacagatacaatttagtctttgttttcccagattacattttttagtaggggaacttgaataataatcaccatgatatgtcaaaagctcctggtttctcaaggcagctccacagcaggagctctgtagttagatagggttgggttcatttcctgtttctgccactcaccagctatggccaaggacaagttacatgatcgatgtttcagattcttcttgtgtaaaaaatactaaaatacacaaacacacactcacacacccttcccataagattgttgtgaagattaaataagataatgtatgtgatgtccccaacagctctttaaagcaggagtcagtcaacagaccccatcaaggacaagatagtagctacttaaggctttgccagtcatgtgacctccatagcagttactcaactgcacagtttgaacacagtagccatagacagtgcataaatgagtgggtgtggttgtgctccaataaaagtttatttatggacatagaaatttaggtctcatataatgctcatgtatcactgagctcctggtgttctcctgcatgacagcttagctttgtctgaccctctcagccctgctccagcttccgcagctcctccaccgcctgaaccgcctccattgatgcatctgttcttgttctccttgtgtttttttttktttttttttttttctctttgctgttctttctgtagccaggcctatacttctccattaatgtgttcttgattaggtttggtaagattctatctccagcattgcatagatgtcttaatttttcatagctgtataagtttcttgtcctttctctcaaagagcttggaaaaatttccaaaggctggattagaagaactgtgagagtcactagtgtctcttattccagaatcttctttccaaatatgacaagttagagtccagccagtttgtctttcccctaccattcggtgagttctgtactcacaaggtcactccttccttcccatcaaggatgaattgaccttggtatctcctcattgctcagaaaggtaattcaagtgttccacaggtcaatcccagagtcacttcacttttgtcaggaatccctgtgtctcttactttaactggactctgggtgacctatcttgtttgcacaaatatcttaaagtgaacatgccaattagtgtctcacctctacctgctcacaacctaaacctttccaccaaactaacattgagaaagtaagtagataaaagaattattggccaggcgtgatggctcatacctgtagtcccaacactttgggaggccaaggtgggtggattgcctgagttcaggagttcgtgaccagcctgggcaacacggtgaaacctagtctctactaaaatacaaaaaaaaaaattagccgggcgtggtggcgtgcgcctgtcrtcccagctactcaggaggctgaagcaggagaatgacttgaacccgggaggcagaggttgcagtgagccaggagtgtgccactgcactccagcctgggctacagagcgagactccgtctcaaaaaaaagaattatcactgaatccatatttagaagaacagttagcttataaaagcaataattagagacargattccttgtataacaaatactaatcatttcccaatatggcattctgggaaaataaaatcagataccacaggatttctatttaagtttggttgttatgagattttgttttgttttcaaatttccacattgggaataatatgaattaataaaaaatagtgagtagtgcaatggcataaggcttgcttgatttataaaatagttttggcttaacgagtagaaaatgaggtttaaaattcaacatagtcacccagtttttatattctaatatttcattaaaggaattagacatgcaacttattatataatagaattagataagataaaaccaaaatagaatctttctgctctaagctgtgctgcaaattctataattttttagttcaataaaaagaactgttgacttagatataactttcttggtatattctctaatgctcatcaagtaaagattgctttctatatttgtaggataatgagcattggatatattattagagttcccttaaacaagctttgatgcatgaaaaaaatggtttcataagtataaaacattaaggaatctttctgagaagctagaataaaattgtcaatcatttatttaataacttatgtcagcacaattttcttgtagtatgcaatgagcatttacatttggttgtatgtaccaaaaaaaaattttagggttgctctgaagttatcaaggagacactgatcatttttttcctgttataaaaagttgcctagagctctagtagaagaagcatcacagctttcgtaaggcaagtgactgaagacttgatccaagactggacttttatcttkttttaaaaaaattatggacctatggatgctaggcaagaccaggcactttatatatattattccaaattcttaatttgaatctgttacatcatgactttaccattttatgtgtgaaataacagaattcatgaagttatgaaacttgtccaatgtcacactaccaccgagtagcatttgtgatagtcaacatgtattcctcccatactgggtagcagtgcttttctaagtgctttctatttattgctttgtttaatctcacaacacatttatgagatagttgctattattatccttatttttcagatggagaaaattgaggtgaagttcagttaagaacttcactaatgtcgcagagttagcacatggtagacgcagggagcaaacacaggccatctgttcatgtagcctaagcttttaactgctacgccaactccactgcctcagggaacaactgggcatggcacctacatttatgtgaacccaaccctccaaattatgaagtctctgtcatgctaattatctgcatgagacatgagacatcaggcacttaaaaactcaccattacagggccgggtgcggtggctcacatctgtaatcccagcactttgggaggccgaagtgggcggatcatgaggtcaggagatcgagaccatcctggctgacacagtgaaaccccgtctctactaaaaatacaaaaaaaaaaattagcctggcgtggtggcgggcgcctgtagtcccagctgctcgggaggctgaggcaggagaatggcgtgaacccgggaggtggagcttgcagtgagccgagatcgcaccactgcactccagcctgggcgacagagcgagactcctcaaacaaacaaacaaacaaamaaaaaaaaaaactcatcattacagaagagggaaaataagggtgtgtgtatgtaagtatgtatgtrtgtgtgtgtgtttatgtatgtctctacatcaaggatgtagaggttttactttacttccaggccttcctgcctgaccaaaatttaaaagaggagaaattatgatgtcatgtaatcatcaagttcattatgtcacctaaaagaaatctatcaattagcccaattatttaatcaaggatttgttgtcactttaaaagtttcatcagattattttacctaaattataatgtactctgtggagtctcagaaaatgtgatcttgttgagtgtttcttccaggttggtaggttggcttttcaccttatatgcaaayttaaatcaaacattgattagtgtagragtatttctgatataacacagcatagatgttcttggaaaacctcatatgcttcaaaactgtgcactaaaaataaaaggacttagggaaaaaatgtgtttgagtgaaatcattcaatgcttacgagcactaacaaaagcaaaaaagaaaaaaaacaaaacaaaacaaaatccccaaaatataaaagtttagttaaaagatacattgaattctaatgaatactgcacctcagcaattgtaggccttgacctaaggggaaaaaagtgaaagtagttggtaggaaagaactataagacagccttgagtctgctgagttatggagacaagagaaaaatacaggaaaattgtccaacagtacttctacgacagagcatatggtcagactgggctaagaggaagaatggggagcaaaggggatctagcatgcctgcattttatcctgacattatttccctagcgatagatgtgcctgagccaattgacattcctgaaatgtacagtacttatttgaaaacagataaaaacaaaatggctttttacagagtaaaaaggaattacatttcttccttaactcatttcataatcattactatattttcagtaagtatattttaaagtgactaagcctctgcaaggaactattttagcaatgtaactatgatgagaatcatagaaaaagatgcaagaaattgttttatatattttagggaaaattggttgaaaagtttatctgatttcctcatgatcagcatgatgcatcataagtagtgatgatacttaatttgaagatgtttaactgcatgtattcaaattgtagtcatcacacgggagagtttttaaaatatattttaggatttataatcccaaaggtttttctcttaaattagttataaaacattctgtaaatactttgataaaaactgagaaacaaaatgtgaatttgaatacttaaaatctccctactatagagttgagtgtactgaattttgctattatttcaaagatgccacagaattgcctcttaaatctaattttaaaagattgtagattgcactcatcttattttaaataaagatttaatgcagcttattaaacacaatttgtgtccagtactgtagttttatcaaggcggttgccacccggcgagtcggggggcaggggcactccaatatgattattgaaagtgaggttgccgttgtctttagagttgacctctctgttttgggagaatcatcagtatgggctcttgagttacaaaaatttaaggtaagcatcctcctctttaaaaatagcttgagacagctcacacttacatgtagatgcagtccgttaggaaggtgaatgccctactcagtaatagaaattggagtgaacaattactgggcttttgaacaaggagaaattgcttcccaaaatgagattttaacagaagaattggagtaacctaactcccacaaggtgttatataatattagaaatccaagctctaggcttggttaagattgaataaccagagtcatgggaaatgtattatggactattttgattgtgcactatggtccctagagtttttccttggctgggatattgagaagtaaagtcagaggaatgtgtcttccctctgctttggtccccacacccagtcagtagcccaggcctgcggattctctctcagaattacttctgcaattgattcattttttccccccagggtcctgtttttgcccaacccagatctaccatctgtcctactctgacccatttttcattctacattccaaataatcttctaaaaatgcagtctaattcacttactctcttgcttattagttatttagttgattgcccttagaatagagtattatcttgtttaatgcggtttgtagaactctgcaaaatcctgacctctgcctattttgtctctcaccaccattatcttgctctgtcttaacctcattcatgcctttgctacactggaattacttctgttcctagaacattggctcccaagcatgctgttctttctggaactctcttggcctgacgcagctcagatgtttctgagaggactaggttcagatctctgatttacattcccagagcgctatatccctcccctttttgcagcagaggccacccttggaactgatacatcagaaatagttttcctcctggattgtaagttcttgagagcaaggggtgttctttacacatcactctgaccttgtgtctagaaaaatgcctggcacagagcaagaccttcgtaaatatttgttgaataggaagaaaaatgaacaagtgcatgaatgcgtgaatgatgtagaagacaatccagtaataccaaagaatctattggaatcaaaattattaaaaagaaaatgcagatgaatggagaatttatgttaaaagccaaaagagtcttgagctttgacttttaggcatcatcaaatttaataaagagatatcagtaacatactaaagcaaaagccagatggttttgaacttaagaataaatatgatgtaaggaaatgaacacagcccataaagccaacctttcaaaaagagtaacaataaagggagaatggtagtgctagagaggaatgatgggatgaaggagtctgagatttgtttgtctctttttaactttgtggcagagagaattggacatgctcaccaatttttctactactttgtcctgctttcctgatataccacagggaaagttctataaacatttcctactacaaagtgaaaagaaacctattttaaaagactggtttatgggattttatgtaatatttttcaatttttgagtaaggaaaactttctaagttttcagtctacctgaaaattaagcctttttccttatttatgaaaatagttgttacaatttgtactgaagtatacaaactttatccttactaaggcaatttgcttttaagttttctcctccttttggctactcttaaaaatctggactttcaagtttaatcttaaaaagctcatatctttttaatcayagatattggcatgtccaggtaccaggtatgatggtagacatttgatacagctaattgcttttgtgatggatacataatttttaggcttgcctcttccctgtaacttttttcgatttttttattatttatttatttcaacttttattttaagtttaggggtacaagtgcagtttgttacataagtaaacttgtgtcatgggagtttgttgcacagattatttcatcagccaggttttaagcctagtacccattagttatttttcttgatcccctccctcctttcaccctttacagtccaaaaggccccagtgagtgttgttcccctctatgtgtccatgcgttctcattgtttagctctcacttrtaagtgagaacatgcggtgtttggttttctgttcctgggttagtttgcccaggataatggcctccagctccatccatcttcctgcaaaggacatgatctcattcttttttataactacatattattccatggtgtatatgtacgacattttctttatccagttkatcattgatgggcaattaggttgattccatgttttactattgtgaatagtgttccaacaaacatacgtgtgcatgtgtctttataatagaatgatttatattcttttgggtgtatacctagtagtaggattgctgggtcaaatggtatttctgtctttaggtctttgaggaattgccacactctcttccmcaatggctgaagtaatttacactcccacgaagagtgtaaattaaaaagcattcctttttctccacaaccttctcagcatctgttattttttgactttgtaataatagccattctgactggtgttagatggtatctcattgtggtttttgatttgcatttctctaatgagcagtgatgttgagcttcttttcacatgactgttggtcacatgtatgccttcttttgaaaagtgtctttttctaacttttcatctgctccttaagacctgcttttggagaaaagtgtatcagtgccagagagtgtggtaaggggtgttttccttacatgatattgttacatgtctacatgatcttgttacatgtagtaaacaagatgttcatgcctaattgaattctaggatgggcatggtggctcacgtctgtaatcccagtgctttgggagactgaggcacgtggatcacctgaggtcaggagttcgagaccagcctggccagcatggcgaaaccccatctctactaaaaatacaaaaattagctgggcatggtggctgccacctgtaatcccagctacttgggaggctgaggcagaagaattgcttgagcccaggaggcggaggtttcagtgatccaagatcatgccactgcactccagcytgsatgacagagtgagactctgtctccaacaamaaaaaaaaaagttcatgcttcattaaattttaaattctagagtttaaatgattgagggttgccttacttgcacaataatctgtccctgttattaatactaggccagtagctgggtcattattctcaccacggcaaagttaatcactcactagtaaaaagagagtgagcattaagtttatttggaggctgtttaattatcaacttttggaatgagaagtacctcttcaagtttctgagaacatattattccacttcttgccaaggcctgtcgccaaatttattattttaatttatttgtttttcccttaccatgttactaccatctctacaaccaactatgtactgaattcacccactgaccaaaccatttctgaagttactgctaacgttacccataaaaatcatcactagtttacttgaggaacaatcttttgcctgccaggaatattctgtattctgtattcctggcaggcaaaagcaagacaaacaggtttccaaggtatcaacactgcgtgcatctgcttcatagtgtaatttcatcagttgagcagatgaagaatgctaattagtttgtttatacatatgtaatttaatgagactaaacacttaactatcttaaagtaagcacaacttacttcctgttggctgtttttgctttaataaaaaacactgttcggcttatttcctggaaattatagtaccgtgcagtacaggaaaagaaattatttcaaggaagrttgactggtcaattgtattctactgcagctggattcagtaggaagataagaattaaaatattgggcttgggtaccagcgttgaaatccaatgtgaatgagagagttaagtttaatggaaagatctattataaactatattatggcaaacttctaagtccaatactaaaattctaatatataccagaataattcgttttagtaataattctatgccatcctcagacctaacctataatcttccatttcttattgtcttccttttgtttttatgtacccttttttgctagttattgtagttagattttgatataactgaaatagtggcattcagttaataaagctcttttccctgaaaattaatacaaaatagtggtactattatttgtataaatagttatttagtattatctattacactctttttgattactttgaagttgttcaaaaaytggatcccagccaggcacagtggctcatgcctgtaattccagcactttgtgaagccagggcaggaggattgcttgagcccaggagttacagaccagcctgggtaacatagtgagaccttttctctactaataataatgaaaaaaactctccaagctccccaaccccaaccaaaactggacctgcgtaggctgttatttttggagaggagtgactagaggagatgaggaaataactttgctcctatagtcaaaattatattttaattaaaatgctttagttaatatactcggttttctacaaccaggggtcagcaaactactggctatgttcacagtctgcttttacaaacaaggttgtattggaacacatctgtgcccattcatttgtatatcatctctggctggcttcacactgcaatggtagggttgaatacttgcaataaagaccatgtaacctgcaaagctgacagtatctattctcaggccctttacagaaaaggttaaagcacttttaaagcttaaagctgatcattgatttgaagcttaaatcagaagagaagttattaaacaataatagaattatgttgagatgtagtaaagactaagaaacaaatatttattacattaagtcccaaaacaaatgtgggtaaaattattagatatttaggttttgtagaacctaagtaatcattccccctatagccatattacctttggaccacttcagtagtctattgaggtagaccgcttccattctgttctggcagaacaaattttctastcataaatgcataggattttcttttgtcccttcttgaagttccataaattatatatgagcatagattttgtttataactttaggtaacagagccttggcagcttcttctggcctgccagcatccataatcttcctctatacctaatgtcccatgacatcccatggggatcagatactgaatttagcttccttgtttgtcccagttcagaaaatgagttgttcattgttctaaacttattagatgacttacatgtgacaatttacaggctgttgcttatgggaacatattaagggcattgaggagcatagaaaataaaaaaaaaaaacctaattgaacttcaactctaaagattcaaatataaggctgaatcttggatgtttcagataccactagccaatgaacaggaaattatgttcctcactgaattttaatatraatttgtaaaccatattttgaagataaaaatctaagttgattaacaaagcccgattgtgtagaaactgctctaatttagtaatattagtttggagttatagaaaacacattggctttggagtcagctgaatctgcatttgaaccctagttcagtcattctctagcatttgaaatgagagaaaactacctaaacttttgagcttctcacccattggggataataatacctgtgttatgtggttgctgtgaggattaattgtaaacatagagttcccagcactgtgtcaggcacatagtacttagtacatgtggggattagcaaatatgggttcttttccactctttgtttttcttccccaagagtaggaaatagctggtagacccagttaatcaagataattagtattgttgatgaactgaattcacaacttgacagttccagtaacaaatagctaatgataaatgggttgtgaattgtgggagaatttacaaccacagcatcaacaaaaacaaaagtactgggggaaatatgctggaatggcgatgcttatgatttcagtgggaagtggggtagtctttgactcaccgcagtctagatttgtttccagagacccctgcaaatcccatggtatgttcttggggatcaggagttctgatgtttttttcattttgatgataatatttttaaattgctttaccatttaaagtgataaaatttttcttttgccataatcatcttcattgaactttttttcattgaactttttttttctaagttggtgtttcaaatctgaaaacatatacttggggatcattatacatattgttttgctttaggtatttttggaagccattggtttttactgttctgacttttcagaaaggagagcataatgagaatgtagtagtacaagcatgaataaaacataaacttagatgtggcttttgtcataaaaccgtggtgttccactcttgtgaaatcaaactggaccagatgagtgtaaaaaatggaaatcagtagttgatgctaagaacattttggaaaaatatattttattttaaaagttaaaatagtaagaggaagtattttgctaatattgtgaaattcacacatattaagtaaagatctttgccaaatgtcctgctcattttataattggcatttccagcagaatttttttaacttgagaatgacatgactattgcttttgctcacctgtctttttctgttttcatccgtgcataaagtcactcctctttctgttctgactttttgctgtccatagacatcccagttaccagtgtccttgaattgatagtggcttctktttgtcagtctcatataagaactacagctcatcaggaggagatyrcagcagggtaagagacaccaacaccatgttctgcacgaagctcaaggatctcaagatcacaggagagtgtcctttctccttactggcaccaggtcaarttcctaacgagtcttcagaggaggcagcaggaagctcagagagctgcaaagcaaccgtgcccatctgtcaagacattcctgagaagaacatacaagmaagtcttcctcaaagaaaaaccagtcggagccgagtctatcttcacactttggcagagagtatttgcaaactgattttcccagaggtgagtgcgtgctctttagattttgaaattgtaatactttgaaattgtagaagaatgtttttccaaggaaaatttaaacacttcctttctcactttcaaggctacaataaatgtagaatattttcttgaaacacataaaaatattcttttaaagcaattgtgttcttaagttgtgttttatcttaaaatgtttatgatcttgaattcttttcaaaagaacactgcagtctgacaaactttatgattttgggcaacaggcttaatgcctctttacctcagcttccttatccctaaaatggaaataatagtagtacccaccttctacagttttaatgagttttaagtgaaaccatccatagctcttgccataacataagtgatcagtagttgttagctattatcttaaaattaaattcttcaaagaataacttattttctgctcaaattttctctcctaattttaaagagcatcatacgtcccctgccagttttcagagttgtgaaaatctcccttggccacttgctctgattctgaagttctgctcaagccagtcttgactttctcccttgggtcggagtcatgagcctgtgattgcctacacctgcgtgttattaggtctcacacttcttcatatagccctgcaagctgcatagcatagtgtcatgttgagatctagagcaccttctgtcaatccaccttgaaggaaacttctgggaagaggacacagacctaaataaatagaagagcagttgaaggtcttcatgatgtcttcctccctctgtcagtcttcatagttttatatagatttgcttaacctatgaatttggctggacattgacttaatcagacaccagctaacataatacattgataatttttaattgactcaataccaaccctctactgtgtgcaaagcaccaaagaaacatggactggctgattttcagaactgaaaggaatttaacagataatcttgtttcactcccaggaagtgctagggaagttcagtgacttgaccaaaattacacagctttcaaagggtagagcaattaattcctgctgtaaacagtccaggctggaatgactgagaaagaagaaattgaagtttgaaagatggataaattagacttagcagaaagttgagggagtttatttcagatataatattaacacaatagtactttggcagataacctttgaaatggaaatgtttaattattcttaccacactctagttgctagacagccagcattggctaggataaaggatakagccctcctcagggagttggtttgtagcacagtctgggaaacaatcggtgctctcatttcaaggacagagtgaaatgaacagaaatgaaccaaaggtgatgatgaggaagctgagattgcttctatgttttccctgaatcctgtccttactatgttggctttatcattttgtttggtaaattttgaatttctgcaatggaagtcatacacatattggactcttttttaaaaaacattatggttcacctccagcctgggcgacagagcgagactctgtctcaacaacaacaacaamaaaattctggttcacttgatggtgccaccaaaagttccacaggcttccttcattctttttcattcattcttctttttgcccttctgactgaataacttcaaatgacctctcttgaatttgctgattctttggcttaagtctgctgttaatgctttccattgagtttttcagttcagttattctttcattccagaatttttacttggctctatttttgtggttatctctttgttgatgtttacattttgctcatgcatagttttcttattttatttagttgtctgtctgtgttttcttataacccactaaatttcattatattgaattttttgtcaggtaattcattgttcttcatttctttagggctggttactgtagatttatttatttatttatttatttggttgtatcatatttccctgatttttcgtgtcccttgtagctttgcattggtgcctgcacacttgagtatgcagtcacctctttgcttcttttcagactggttttcacaggaaaagacattcaccaattggctcagctagagattttgagagcctctcaaacattttctatggatgtgcatgttccattcctctcttttcctgctgagggagaagtttctgggtggtgtgccttctcctgatcctgaagagccatacaggctgctataaacttcccttctctttttcctaggaaaatgtactgaaagactaggatgcaataccaaattaaaattgtatataaaaaatttagtagtctatgttgtttgttcatgagtttgtaagaataagcattaagatttgactacagtgtcatgtaacagagagggcaagactataggagatggaagaggtatgtttggcattagtaactaaaactcctctccaactgagatattatcgttatggcagtaaatgttccagtgttgaatacatttgagctgtgtagtcctcaatctagatgacttcaaacatctgcttatctttgataaatacttgttatgtttttttactgattatttgttaagtttatagatttaatgcttagactgctatttagtgtcagttgtattaataatacaaaagaagatatttaaaatagcatttgacatcacaatttttgttttagataatcagaattaacttcctggttatatttttattagtgaacaggcaagtataaaaatgtattatccttagaaaatgtaacatgagagaggtcgttctcaagtaatggaatactagagctttaaaaagtcttcttgatcatctaatgcaaacttatcatttctattttaagaaatagagacacataaatttagatctcttgcttaaagcaaaagataactggagaaatggaaaactctctgcatttcattcacaacccattgctcttcataatataatattgtttgctcttttttcatgggtattgtttcccaataattctgtaagctccttcaggcatactgtcttgaaggagcttttaatggagccacagtcaaagcaaatcagaaaccacttactgaattgaaataattgaattggatatgcttacataaatgataagatcccaaatcaagtacctagtaagagtaggatttgaagagaatcacgaggtctgtagatgtgttctagaatattaggttgaaagaagaaaaagaaacagtattacaatttatcttatgaattaaaatattattggtctagaaaaacgttaagcactgtaggaaaattaaaaagccaatgaaaatagtgacttatccataaaccacaccaatgatatttttattaaaattcacattgttgacagcaatgttgcatcaaatagcagtttttcctgaagtattcatatatggtatatttgtggcaaaagtacttgttttaataatttaatcagatctattctttatgagccaaaagataattgtttagtcaagagaaacaaacttgagagcactacaaactatttgcattggggaacaagtgtcccctctgtgaatcagaaagtccacaatctacaatacttcaggttccagtgattgtacaaataagaggatctgttcccccaaaattcaaaataaaggctttcccaaatagtagggtgttttagtgatagacaactaaaagatttacaaaagactgctacacaatgtttacatatattgaactgtaaggaatgaatttggaaggaaatattggatttagttctaaaatctgaaaccaaaaattaatatatagaattgttggggtatggagcagtcctgaagtggttgattttatgttatgaggccctgaggttggctgtgtgtgacagatctcacttatagttgaatcctgcttataattttattgtggactcatattatctcagggtcaggatatatcacaggaagtacagcaccaaggtaggaaactcgatgcacyagcagcctctaccaataaatattctgcctggaaaacatgtgagttctgtctcttatgggttttgttttgaatttacaaaaattttccagaagagcaatggtataagatgaatgtcaatttccataaaagcctattcactcataatattggtcaagtatgctactaatgctttgcacggactttattcctttttttctttaggaaaataagttttgattcaaaatggaaagccaaacatacatttgctccaccaaccttagcaattggaaggggaccatttctcctcccctcttacaatgatagtgtatacgttaggaggaaaagaccagaaaaagacatttctggtggcagtaggaaggaaatgaaagacaaataaacatcttgactaaaaaggtaaaagagtatacccaatggcttaatcagagacataaagaggagtggagtatctccagtagcatkgaagaggaagaagaaagcattcttcagtggcagaattggttgggttttctttctccctggcccacaaaatgttcctggtcagggcgagcatggtggctcatacttgtagtcccagctacttgggaggctgaggcaagaggatcactggagctcaggagttcttggctgtagtgaactgtgatcaccactgcactccagcctggatgamagagcaaaactctatatccaaaaaaaaaaaaaaaagaagttcctggttcaagaagcaattaatatatatataaacaaatataattgaaatagtttacattggaaacaacctaaatttgtttgtaaacaagctaagagagtaacacctctatatctggctttatcacttcacagataaaattttatagattaagccttcaagactttgaatagctggcaggtggacatcattcattcattcattcattcattcattcaataaatatgtattgaacatctcctatggataggtaccattgtaggttttggatggaggggtaagcaaaaccgacactctctgcccttttggagcttctgttgtaatggaagagacagattatgaaaaatttacaaagttggcgagcaaatgctatgaagaaaaactgagagctcaggcacaaaggcagcaacccttattttattaaagacttcttttttcatatgaatgtattttgcaggaacaaataattcatagccactcatgctttcatggatttgtatccacattgatactctgttaactggagtaactttctactgtaccaagtagatggttcttgaaatatttaaacatttcaagcaccctggctgatttacttcatgtatagtgtcactaatttaatgttaccttcctttttccttgatgagaaagatgtctaggaaatatgcccatagtttctttcttgaacatgtttctcaactgccctttgcctttacatagctcaccaagcccgactcagaatctgccctctgggtgcgtcttccaccagcttttstttcatcctgtggcagatagtatcctttctctctatatctgaacagtctgaaaaattgttccacattgtaaatttaaattctctttaattttttttcagcaattgtgttttctttcaatacatttttaaattttctttctaagctttgtatgtgtatatttaaaactaaaagcccttttcataactcatgtcattaaaacagaaccttgatctattttggtttactccagtacctcacttgactggtggaaactctacaagagatataaatagtttttaaggaaaaaggaatttcttaacttgggacagcaaaaaatttttcactttcctctggggaaactatagaaagaatcaatggttctatatatataatatatagttttatatatatctctatatatacacacatatatagtgagagggaggtacatacatagatacatatgatttttacatggaatatataaaaatggacaacactgcttatcaatgctctactttccacttatttattagagacaatcagctgttaagataaattaatagctactcaacatgtatttattaagtataaaagcttacatacaaatgtcttgcaaaataaggaaactcatgaaattctcagaaatcaataaaagaaaataaaaccataagtatttgatgaggattattagttcaaagaaaggaaatcagtgtaagccaaggtaaacccaaggctcatttcaaataaatgatcaactaactttggtgacagattagatttaagagatcaaaaaaggaagagacagagataactccagagtttgctagacaagaagatgatatgaatgtatagttaagggcagagagtcactggggcagctgggtgtggagtttgtgaaaggaacagaaatttgcttggcttggtccatgctgagattgaagtattggccgcccgtccagagggatttcctgactcagaggaagtgatgcccatggaatcctatattgcagaagacctaacactaccaaactgaaatcttctgtttgggttcacactcagctcaactattctgtggctgtcagtgagaccaccaccaaaggctaaacctgtgggccacaacacatatccaatctcagattagtctcagcacattgcttcctctccagtttgaaaaacacatagaaaatcacttccagtttccaaagtgaaaattcataacatttatcattcaagcaattgtataatgtgctttattctcgaaaataaatcttcaggatgcatttttaaatatataattccaaacaaattattatataagggmatgtttaaaacatttcttttgaactttcagtttgaacggctgaatgttgcacttcagagaacattggcaaagcacaaaataaaagaaagcaggtaagtcaaaccactttagttgtgtgaacctcttattrcaatgactaatactgctactaatggccagcagttactgaatgtgtcagccctttattgaatcattgtggtatgtcagaaactggacttagtactttagctgatactaatttcaaagtaagtgcatctatttatcacattttataaatgattaaactcaggtttatatgaagtatttagaattttatagccgtttaaggaaaagacagagctggggttcgagcctgggtttttcagagccattattttaagcatgtagttataaactgctgctttaacaagctcctgtaaggccgattcttttgtactaattggtaacttctaaaatatttaacaacaggtaagtcatggatcccaaacaatcaagacttcctgcctgaaggatgctgccaaagttttgagcagggtcccagcaggtaccccatccccaacacacatctcaacaacatgttaatactttagtatctgcatcaggaggaggtagaaggatcaagtgcttaagaggagggggactcagggttccggggggtagcagctgtttattaatccttagggaagtgtttctgtattctcctaactagtttggttgcactgcagaacatcagtttgtttatactttttttctagtattctttgaaattttcctttaaagcatttctgaagaggcttaatataaagttactttttattttttattttttttttagaaacagggtctcactctgtcatccaggctgaatgcagtggtgtgatcatagctcactgctgcccagaactcctgggctcaggccatccttctgcctcagcctcccaaaaaactgagattaagggcatggacctaaagttacttttttaaaatttatttttatttttttgagacagggtcttgctctgtcrcctaggctggagtgcagtgcaatcttggctcactacaacctctgcctccctggctcaagccattttcccacatcaacctctcgagcagctgggactacaggcatgtgccaccatgctcacctaatttttgttttggtttttgttttgtagagatggggtttcaccgtgttgctcaggctggtctcaaactcatgagctcaagcattcacccgcgttggcctccaaaactgctaggattacaggcatgcgccactgcgccttgtctctaaagttacattttttaaatctgatttatttagtgaatcaaatacaatttagcacatttactgctgacagaaaatgtaataggggccaggcacggtggcaaatcccagccctttgggaggtcaaggtagacagatcacctgcggtcaggagttcgagaccagactggccaacatggcgaaaccccgtctctactaaaaacacaaaaattagccaggcatggtggcagatgcctgtaatcccagytaatcaggcaggagaatggcctgaacccaggagacagaggttgcagtgagccaagattgtgccactgcactccagcctgggcgacagagtgagactccatctcaaaaaaaaaaaaaaaaaaaagtaataggccccgtttttgattccctgaaatttcaaggtttatttggtctataaataatagaataaatactggtgttgaaatttgcagaactgaacattggagttttacaaaccagcactattgtcaggaatgttttaacaattcattcatctgtctcctactcatgagtgatcatctgctctgtggatcatatgtgcttgattttccttgctgactagctggtcccagactgcaggcagcaggaccaagccaagaaggggtcatggacaggtccagaaggaaagagtgtgaatctatgtgtctgacagaagctttgtttacacgagtaacatgagaarcattccagaacacctctgaccttaataaccagtcaagctgataagatagtcttaagtctctcactgtgctactgtgtctgtctgcttaagtccttggcagccagtttactcaaaatttattctcagggctttgtgttctgaatcgttcctacagcttcttgcaatactcagttatgatgtgtttccagcagtgtgcctcttaaaataatctcaaaacttaagccaacaataattatttttttgaaattttgaaatttttgtttaccacttccctgatgtccctaaatataaaaaaaagaaatctgattatacttttaaattttcttgatgagaactattcagttgttgaaacaagatttttgctcataagcctgcctgctgatatgttaagtggttcctctgtgcttttttagttttggggtatcctcttgtttaaagattttttacttcactttcttattggtaagtcactgccatttttattgctgtcagtttgccaactgctgaacacaacttaactcttttttgtgctgcttattctcttctacgaattgacaaacaaaaatccaatatatcaaccaataaactgcccttgaatgaaggactagagctgcccccctcctcttttttttttttcagtgaatgagtgttagtatagccatcatgtccctcaggattggttgcccagagagttcttgcttagtttctttttctgggatcttttgatcacatcattatatgtatgaactcatgctggtgtgtgtgtgtgtgtgtgtatttgtataaggcacacatgtgttggctggtgcatgtgcaatgcttacacccacttgcattttttgaaggtgagggtaggaattgtagtttgaattgcactatgtgctgtttggacaaactaagcttcgctcatttggcaaattttgtcataatcactcatcactatcagaaatcatcacaaacaattaggcaaacatgaatcaacaagtcgtgcagttaaaactgcaaaaaaatcttatcaataaaaaagcatgctattayagtctcaatttctatgctgtaaaacaagtgcagtaattgcatgaagaataggtttctttcattactaattttttatacaaaatcaaggattaaagtttaatataatgatatctgagagataaacacagccttaaactaagaagcaaaagattctatgtatttgctttaggaaaatatataatattacttaaaagtgaattctatctgtatgtaggtttttcttggttatcagaattaccatcctcttcttggccacttcacatttgaggttgctagccagggaaggttctcctgagtacagagtctccttgacctacagtggagttacgtccagataaacccatcgtaacttgaaaacaccctaagtggaaaatgcatttaacacgcttaacctactgaatagcttagccttgcctaccttacatgtcctcagcaacttaaagtagcatagagttaggcaaaatcatctggcaacacagtgcactgtagagtaccggttgtttaccctcacaatttcatggccacatgagagctgtggctcactgccactgcccagcatcacatgagagcattgtactccatacctgtagcatgggagaaaatcaaaattcaaactttgaagtacagtttccactgaatacttacagcttttgcaccgatataaaggtaaaaaaaaaaaaaatcctaagtctgagactgtctgtattagtctatgtaaagttcactttaaaggtaaatatttcttatgaagaataacaaaacattctatgtcatatatattttggggttttccaacattgttctggatggtatatgtcattgctcctttctcataaaattgatagtcaagatttgcttctacagaaaagggaatttaaactattttctttctttctttctttcttttttttttgagacagtttccctgtgttggccaggctagagtgcagtggtggctgatctcggctcactgctacctctgccccgccaggtcccggttcaagtaattcttcygcctcagcctcccaagtagctgggattataggcacacgccaccatgcccagctaatttttgtatttttagcagagatggggtttcaccatattggccaggctgctcttgaactcctgaccttgtgatccacccacctcggcctcccaaagtgctgggattacaggcgtgagccgctgtgcctggcctaatttaaactattttctatcattgtttctgtatattataatctgaacttttagcatgtatttataagtttataacttaaaatattgaaatatttccaggaaatctttggaaagagaagactttgaaaaaacaattgcagagcaagcagttgcagcaggtaatagaattgtttatgtaattagaaagtatgccatatacctgtagaactcacattttctccaaaaatattcatatttatttgttggtgactcccagtatgaagtgttcaatattatgtattctgttaacgtaaagagtaactctttttgatactatatgtttttgtttgacctaaaacattttctctgtttatgtttacttgctgaggagtagataaggctagatgggaagctgtctcacagatattcacaggctttgatcttgaacctaactaactgttcctcatttatacatcaaaaattctactcaacaaggtaaaataaagaatgcttttaaaggttaggagcagtcatgggaaaaaagttaacagtattctcacattaatgattagtttgagagaaaaaattgatatgtgactttgtcttgctgtcctttccaaagtttcagtacatgaaccacgaggttgcatctttctaaaagtataagatattgataataataataatgactaacgtatattgaggcccccctaggagcaaggccctattctgaatataagccccacaacagtgctatgaagagggcactattctttttcccacattacagataagaaaaaatgtggtactcagagtgtaaagattaaaggagattatagaaagggaagatcatacagagcacccttgacataactaactccatctttaaaaaagactccattttgtattttgtagggcattttgccaacaaaaatagcatgttttatttaataaacaaatttaaaaaaatgaaaactacatacaacaagataaaaacacaaacacacttttccactatcagttctcaccagaggactctgtaactataaaaaattaaaccttcaacaactcaaaacggtcgtcctgacaccttcttacattcactcgtgataaaaactggacatctgccaccaaaggctctgccatctcaaagagtctttcttataagacggcctgacccaaaccaagactccttttgtcttcttcaccatacccaccctcctttgttaattctttctcctatctctttttccttttgatgttaagtgttactttgttacaaaatatttaacctataacatttatattttctatattaattaagcatactattatgtatcgtttacaatactaactgatttgtggagygacttgagcctgtgtgcctgcagctctaagaaacaagtaaacagaaagtactaaaaaaactgcctcttggcaaggcatggtggttcacgcctataatcccagcactttaggaggccgaggtgggcagatcacctgaggtcaggagttcaagaccagcctggccaacatggtgaaaacccgtctctactaaaagtacaaaaattaggcaggcatgctcgtgtgcacctgtagtcccagctactctggaggtgaggcataagaatcacctaaacctgggaggcagagcttacagtgagccgagatcgcaccactgcactccagcctgggcgacagagcgagactctgtctcaaagaagaaaaaaaaaattgcctccttaaaaacttcatgtaactcatggcttttatgataaaaaataatattaataaaagcctaacattgtaaaaagacacagacatacagaggcttatttctaaccttatagcactcgtgaaaatgctatagaaagtaaattatatactccaagcagacattcattcagctaacactaaacaacaagaatgcgatttgattcaggaaaaaatgctttgtaatcatttctagacaaaactgagtttcatgccagtaattttaaattaacttccgtgtctgacccttttgctgctggaaaccctcatagaggaagatcctcttcatgaggatggattgcttytgttgttaacagaaagattggaggacttttgccaaaatgtacttamtactggaattcaaattattcttttgtagttaggtttcagggagataaaaagttgtgtattatactcaaccrgtcattcttttttaatgaactagtttggratttttcttcagttactagaattttagaagctaacctaggtagataatttggatataggggtttcattttggttggaaatgttattagcagatataaagggagctaaatcagcaaataacgcaagttgaaaataggaataatggcacagctttaccaaggtggcatatttgatatggcagaacatgtattatgtgatttcaggagttccagtggaggttatcaaagaatctcttggtgaagaggtttttaaaatatgttacgaggaagatgaaaacatccttggggtggttggaggcacccttaaagattttttaaacagcttcagtacccttctgaaacagagcagccaytgccaagaagcaggaaaaaggggcaggcttgaggacgcctccattctatgcctggataaggaggatgattttctacatgtttactacttcttccctaagagaaccacctccctgattcttcccggcatcataaaggcagctgctcacgtattatatgaaacggaagtggaagtgtcgttaatgcctccctgcttccataatgattgcagcgagtttgtgaatcagccctacttgttgtactccgttcacatgaaaagcaccaagccatccctgtcccccagcaaaccccagtcctcgctggtgattcccacatcgctattctgcaagacatttccattccatttcatgtttgacaaagatatgacaattctgcaatttggcaatggcatcagaaggctgatgaacaggagagactttcaaggaaagcctaattttgaagaatactttgaaattctgactccaaaaatcaaccagacstttagcgggatcatgactatgttgaatatgcagtttgttgtacgagtgaggagatgggacaactctgtgaaaaaatcttcaagggtaaggaaaacataatactatcttgaatatgaaagctatttcatatttaagagcaagaaacaaaagggtaaaaatatatgcatcacttcaaatgtttgataaaacatatgtaaaacaatggtaaaagaattgtaaagctgtaataaactgaaaacaaaattctttctgcatttgtttgcttacttgattcattactccaaaaatatttattgaatgcagtctgccttttaatatctttatggaatgttttataatgaaatttsataaatgtttatataaaaatgttttcaattatcaaatagctgacttaggttgaataataagaggtattgttttacaacaaacaaaagtcacttgtttcttgtaggaggcaactaaatggatttttaatcaacatttaatagacatgaaaaaaacaaataatttatttgattaattgttaccgaatgtggaagttaaaacatattctgtcatctcatggtagagagctttggtaattatttagtctcaggaaagaaagtttgctaactcatagttgataatacaagcaaagctaagagagaagtttcacacatgtataactttaacagaagcaccatttgttccccaaaaggaaaacagctttattattgcttttctatcataaaaataataaaatatattgagatgtttaaaaaatgagtaatattgaaaggtgtttattgtagcaaaaaaatgaaaaactaattatatacattttttgtttaaaacaaaaaaatgctattttacaactgcttttatcatgaaacagtgtattttgtgcatcctcccatgtcattagatataggtctatttggctttcttggagtcttagtggtatcccatcatatggttgtgctctattttattttatttatttagactgcgtcttgctctgtcgcccaggctggagtgcagtggcgtgttctcagctcactgcaacctccaactccggggttcaagcagttctccccgcttcagcctctcgagtagctgggattacaggcttgcaccaccacatccggctaatttttgtattttttatacagacaaagtttcgccatgttggccaggctggtcttgaactcctgaccttgggtgatccatccgcctcgttctcctaagctctactttatttaactagtaccctactgaaggatatttgggttgcttttggctttttgctgcaagaacacacatgcacatctttgtccacacatgtgcaagtaaaccttcttgtggtccaggatgatcacttgaagccccatctctctcacgacagaaaaaaaaattaagataaaaatcttacctttggaggctttttcacttccatacctgccagatggagcaagtacttatgggagaagtggggaagagaagagaaacatgctaaaagagaaggaagccaaaaaaatagaacaaagaaaaaagtaagagggagggaagaaggaagaaagaaaggacacattttcctgactaccatattatacaaaaaatagaacttcagattaatcaagtgagaccattaagaagaatatagtagcaaaagcatcagcatgctgcttagtgagaaagccttgaagcaagagcgttttgcattgttcattgtaaatcttgatttctgtgtagagtatactctaatatactcttcaaacatctgcacgcattttagaactcatagaaaataggaactataagaaagcaaattgttccttttcagcaggtttaaacacaaaggrtttattactgtatctacttccccttcttttgtctcagaaagatgtgggaaacttgaataaaccacaattggttatcctttccttcataggttatggacctcaaaggccaaatgatctacattgttgaatccagtgcaatcttgtttttggggtcaccctgtgtggacagattagaagattttacaggacgagggctctacctctcagacatcccaattcacaatgcactgagggatgtggtcttaataggggaacaagcccgagctcaagatggcctgaagaagaggctggggaagctgaaggctacccttgagcaagcccaccaagccctggaggaggagaagaaaaagacagtagaccttctgtgctccatatttccctgtgaggttgctcagcagctgtggcaagggcaagttgtgcaagccaagaagttcagtaatgtcaccatgctcttctcagacatcgttgggttcactgccatctgctcccagtgctcaccgctgcaggtcatcaccatgctcaatgcactgtacactcgcttcgaccagcagtgtggagagctggatgtctacaaggtaggagtggaccagggaaataattgttttaccagcaaactcactggggaacaagcactgtgcctaggacctgaattataatgcaactgaaaggccacctctgtagggycttgcaagcccagtcctgggagcaggtatggtgcattcattatgtgggtgttttccagccagcaatagctctgaatctgcccagaaacagagataattgttstgggaggactgccacactgtcctctcaaagaatgaggagagaatggagggaggatagggtgctcaaagaatggaggatggggtgtaggacctgtgaataggagaagtttaatagtgaatctgccacttcactgtggaaaccgagttgaattattaagtgtgagataattcaaagtatggcttatacaaggaaacattatcctttgtatctgtaagagtaaagacacatgaggattataaaaattgcctttaaatagattacttcaatatagagttaacatgatacttttcatggccagttaacagaaatcaaaatcacctacttaaggcatttttgcagcttggccaagggcagagacatttgaaaaagaaagacctatcttcaaatcttgttctctgccttacttgctttgtaaactgaccaagttaaaaaacctttctcatcacttctaagacagagaaaataatattcactcacagagtttatatgcatgaataacacacattatctcccataatcttcatgaacaggattgttataaagattatgttaggtaatacatgatattcatcagtcatacaggatgagccaggcatcattgtaggcactggggatacagcagtgaccatccctgataccttttctttttaaacgtaactactattagtaagagagctaatgaagagatttcaagttctgcctgcttctttagaattaaaagtttttactgatttaaattactttgctttcttttagacattggcactaagaataaagcgtatttctcatttgtatggcttgaatcatcttctgaacttgccacataacaatctgacatttcagagctgaacccaacaggaaataaataaattattgtggaagaaacgaatattattcatgataatacataagctcttgtcttgttttattctagatgcyagaagtaaaaccttacttttaaaaattcctaacaggaaagtccaaacagagccatgattcccttggggaaaaagaggtccatgtatacttacagaaaaaataattggcttcagttacgttaagtttgatggcctcttgtggaatttactatatttatttgtagccattttctatcttgagacggtctcctgtcttagaattgtgagaaggaagtctctcttccttgcaaactgctgtaattgctaacagaagtagccctcttctacttttggttatttctatcaaggatatagggtatagtttttaagtatcctgacaagcattttgaaactatgctcctcactgtaaggtataaggacaacagccacagagttccctgattaatctaactagagttgtaactagatagtaaattaccttctatgccagccctcatttctacttttttttcacttctgattttgcttgagattacttcgagatagctgaaaataaatatagaagggtttcagatacacaaaatgtataatcgtagcctaccctatgagtgccaatggctttgaaagaatagtcagcgttatttattccaagactggattatactagggctttatttaattttattttctctctgtctttcttgggtttttggccatttttctgtttctctctgtgttcatttacccattgtttcagcgaatatgtactggttatccagcatttgccagcatgggtgcgcagtggctacagagctagagggtacaatccctgtgaggaaagttcacatatggagagggagaagagggcacaatggaccaatgccagatttccatatgacgtgacgaagggatgcagtatgcacaaagggctgcaaaagcagatatggtaggcccctaacatcaggtaggggtgggtgtaggacttcttctaattagcctatttattgagcacctgtgatggccatcatgatgagcacttcttatgtactcattgctgagaaaaagcttatgggtggcattgccacctggttcattcattactgggcacaggtaatgtaggagtcaataaactagayaaactcaargggcttacatatgattaggggaaacaaagacaataaacaaatgagtaaatttatagtatttaagtcagtataataatgtgaaagaaaaataaagtaggttaaggggaagaagaagggcagtgggyaaggggtgattgctatttcttagagggtggtaggaatcagcttttctaataaggtgaggttttagcagggactgaaggaaaggagggacaaccacgtggttatctgcagagagattgctccaggagaaaggaatagcaagtgggagcatgtttgatgtgcttaaaggataatggaaggcagtgacattggaactaagtgagcaatatggagaataagaagataaagtcagagattaggagaaagacaggtaaagaagaaatctggagccataataagggtatcagcatctactctgaggggaatttctgaagatttgtgcctcctttcttttttcctttctcaccctcatcctttcacaattgaggctttgtgtaagaataatagggtcttatagttacaataaacatttggagaagaagaaaaatgaagctcttagaattagggggttatttctggactaaaattaactatctgctttttgcagccagcatcacagacagataaaaattgcctgtaacgacaacaataatgatgatgataatgataaggttaatacttagatttttgataatagcttgatttccagtggtctttcaaacaccacygttgtttttacctgctggttcaacatcttggtttttataattgtgattagtatccattagatatgtaattgctatgaggaccccaagggtcctttagaagaaccgtttctctttactcttatgactattaatatcttggttttacattgcacaattttactgcattgatgtgacatttattgagtagtgacttgaggcaaaatactattttatgatgaggaggatataaaacgagtaaatgatcccaacatctttaaacaatttattataattcaaaaatatattgtttctacaaaaactatcttatatggtgaaaaaaaagagatgaaatgatatgatgagtcagtgtgcaaatctgggagtagaagtcaastgttactgtgttcataggactgtactgcctctcagtgcagtgcctcaatgtaatgggtctaaaccttgygcatttcctgaaaaasaaagccatttctgggcrtatctgattaaccctgatcctccagaaggcctgagcaatgagaattctrctatatgacttaatttcttctatccgatgtaggctgtgattcttcctgagcatttatttatagtatggaaaatatattatgtctaggtggagaccattggcgatgcctattgtgtrgctgggggattacacaaagagagtgatactcatgctgttcagatagcrctgatggccctgaagatgatggagctctctgatgaagttatgtctccccatggagaacctatcaaggtaaggcagatgatatattgtccaaaagatgtcacaagagcaaatgcgtatagttgattaccaaaaccatggtgtatcagttgggggttagttgagagagagagagaaagcaaaatctrtatagagaacacaatcttctctaacttgtttacattggaagaaatttattatagggtattaaatggcttacagaatcattgagaggacagaagaacccatctataagttgggctttcaaaaaatgtttcccatagtatagggattttctattgtcaaagtaaaatggcttctaaaggcaaacttcagaacaactgcattttcaaaaatctggaagctgattccaaaactatcctaccaaagccacagtcaggaaactgccatgttcagaaagctgctgcctcttcaaaaccacatctactataataatcagcaagatggcaatcctgcatcatgacttacaaaatgagtgatgggaaaatggactctctactaagcatgctatagaaaacacaaaggcttccacaattgttcttgagttatagtggagattgtgcctgccgaatctcatgcaactgtgcatctgatttaccaagcctaactgcatttagaagctgcaagttagtttagaaaatgtagttttagttttccagcccctggaggagaggatattacatttgaatggatgttgactgttaattcaccaatattttccaaggcacrtgacatttcaaaatttctagatgagccagattccagactaatatctcaccacacatgaggaaataaagttaacatggtaggcattggtttaacagatagaatataagcagattacctttgtctcacagtgaatctgccccttaatttttataggacagtcctcagttgactaccttcagaaataagcctttgaggtattgtaaaatcttatccggtatgctataaaacatatagagaagaaagaagaaatttaaaaacaaaactatatttggagatttacccttaactctctttaaccttaatagaagccatatgtttaagccttcgtaactattttctaagtctattgtcatcccatttatatgtttctgtgcaacatacttttctaaatttaatggtataaaatcacaaacttttattatgcgtggattctgtgcatcaaaaatttggataagtcatagcaggaatacctcgtctgtgctctacaatctatgggacctcagctgggaataccgaaatgggtgagggtgcctggaatagctgggattgcaacgattgaagctggaggattcattccaagactgctgcttcacttacatgtcagattccttggtggggatggctgaaaggttgggttcagctgggattgttagcgttacatgtgatgccctratatgtattttttatgaggtggttcatgtcccactgaacaagactggtggaagctgcatgacttagtcttggaagacacaccgcaacacttccactgcactctatcagccagagcaatcacaagtctgcccagaagagagagggctcagagcccaagaatcaataggaggagtgtaaaataatttgcaagtatgttttaaaagcatcacaatatctgactttttcagatttattttcgataattgcatttttttagaggaggactatatatttctttctctttctaatttgtttgagggggcttgtagcatcaatgtaaatgttaaaaatatctagactattaacaacattttaagtgattttcacacaaatacattttataattaagatgtgtatgtttggggtgggggaatttatggcatttttgttatttgcagaaatgtatttttagatttttctaagttggaagaattatttatagctagtttcaaagatagttacctgggtaatgatagattagtttaaaagacctataaagggaatcattaatcatacctttttatgcatactaacctgcagccctgggaaatatctgacgtccctaaaagataccggtgaaacatcacagaggcagagtggagagtatttttagtagggaaactttaacatgtatcagaaaggagcatattgtgacttaacatcgtctcatttaatccttataataacactttaaagaggcatctacactggcagacacgagcagtcaagtctcctatgtgtcagtatttggagtcatgtccatgtgacttcaaagcccaggctttttctgcttcttgccctgctacctcttggtatagaattgaagtgaaagaatagaaaatattttctttttttatttttcaaactctatgctttcctttagcacgtcacatgtgcaaatcattcatctattcatttattcccattgatttcctcactaacatccatccagtcaggcttagaaagcagcaggtgggttggtgacagagaccagtgggctgagtgtaaccgtgaaagtcagtaggtgacaagtgaacacggaagcaaacttctagtacccctcctttcctaagcctagaagcttatgatgagaaatgggctatgccacaagtggtctcaaatagaagatgcccttagtaggttcccattcaaacttttcccrggagccagaattctgcctttgcctttcattatttcacagggaagtctgttaccagtgaaaagagatatgctcagggcacgatgtgtgtcttaaacacgttgtgttttaaatcttgctgatgaatttgaaaagctctgtaagaaaatgttagggttgagagattcaaaactggagaaggggaggaaggcagcacggcatggaaggactaggagggacacttgccttgtctgcatcgtttcggtttttacgagcagaatatatttacattttaattatgaaacaagataaaaatgctatggtaaatttaatatataataagctggagtaactaagtataggaagaaaaactggtttaaccagaasagtgctcacagaaagcaaaaattcctcaatctaaatatgctgaagtcatagttgatatttatgagcagaagagctttattctatctatctatctatctatctatctatctatctatctatcacttgctaaatgtgtaaattaatattctcctaaaagagacaaagccagatatataacagacatctaagttttgcttgttaaagtaaaactttgatgaagaaaggtctttaaaaataatcaaacccctgcattttataggtgaaaacatgatcggagggaagtaaagagacttaaggaagccagactaccagttactagtagagcttgttagaatacaaagttcctgattcacagtctagtgcttttgtttgaaaattttgtagaactcatatgacatcttaaaagtaaatgagtctggaaagtttctagcagatatctgaaattagttattaaaactagacataactgaattcttctgatttctaaattatatccaagttactgagttcttggtcttcattcaaaacgcatacatctaatacaactttttaaaatggttgagtaaacaaagagtttgaaaataattaacatggtatcatcatcatttaaaatatctccactttagcttgttttgtagtagcagtaatttaagtgtttgtgaatcttttaagatcatcaagtaatcagacctttgaagattccattgttaaatatcctgctttggctaggcaaggtgacttacatttgtaatcctagcactttgggaagttgaggcaggaggatcacttgagcccaagagtttgagaatcagctgggcaacatagcaagaccttgtctctacaaaaaatttaaaacttatccaggtgtgatggtgcatgcctgtagttctagctactcaggaggctgagatgggaggatcatttgggcccaggggttcgaggttacagtgaactatgatggtaccgctgcactacagcctgagtgacagagcaagactctgtctctaaaaaataaataaaataaaacattctgtctcagtggctttccaaatcattggagacttccagaattcstaaaattttgccacaacacatcccagactgcctcttatatctaggcatggcacaaatctgatctttcatcagtatggatttttaatttcatgtatatagacattgtcatcgtcattggactcaagtaccttccactttctgcttcctctgtcattttctgcttaaatattacaatttcatttcctcagttgtaagtcattagaacagtgggatagtgtttggtataaagctattttgaggtaaaaygtctaaaagatatatttaatatccttagagctagcttcatttgcccttctttgtcagtgtttgggaaaaygattccaggagtccagaaattatgtctatctcacttgaatgagaggtggcagtttcacataaacagctcatatcccccttgctrtgttgctgtggttactatgatccctgtgcatggaaacttgtttcagatgttgaagacagacacaattaagatggtttgtgtaataaacctaaatggaaaagagttaagaagtgtgactgttgattctgcactagtaatttttaattgcatgtgaggagtagagggaagttggctgaaggttttraggaaaggggtggtgtcctgagggtgaatggtaaaataatttagacggtattcaaacgacactgacgagtaggaagtgttttaccagtgactgggaacatcatgttawtttttgmtttcagatgcgaattggactgcactctggatcagtttttgctggcgtcgttggagttaaaatgccccgttactgtctttttggaaacaatgtcactctggctaacaaatttgagtcctgcagtgtaccacgaaaaatcaatgtcagcccaacaacttacaggtagtaattatgttaaacacctaaaatctcttgtttttatttatatacaattgccatttgccccactgatttgattcattcktcataacttttttcttccttagtcgtaaggaaaaaagaaacgtgataacttttatcatcctcactttaacttttttacactgcttattagcctcctaagaatgacttgcctgaggtgtttgtggcccagccataaatccatgacagatattacatagtcttccatcattcttcttttagaagcacatattaatactcttagtatgttgataggtgttctgacatcaactagtacactgcagtgcagttctggcagtaaacacccagactcagcacagtcataaccacaagttacagggcacagaacccaacaagcctgcccttaattcagatgccagccacccttcaggacctaagtatgcatttagacgactgagctacaattttgggggttcccatgaacctctcaagttagataattatctaaaatgactcacaatacttagggaattgctatacttactattacagttttatttcgaaggatacaaatcagaaccaaccaaatgaagaaacagtttgggtaaggtttgggagggtcccaaatgcagagcttccatagaatcagaacttatctccctccagccacctcagtgggttcacaagccaggaagctccacctgattgagctttgagtttggtgtatggagtcttattgttttcattatgtaggcatgattcgttgaatcattggccatgtgattgaactcagtcaccacccccactctcctccccagaggttaggctaacacaaaaccccaaccttctatccacaagattgatttttctggggccctgcccccattctgagtcatctcattaatataaactcaaaagtgatccaagggcctcatggaaaacagatactcctataactcaaaaaatccaagagttttagaagctccctccctgcaatcaaggacaacagccagtcaaattccctatcatacagggaagaatttaccagaggaaaactagctggtcatcgagcacttttcaaagattgcagttttatggactggcagcaagtgttaacacggtcagaggagccacgtgtcatctagcatcagaagaacctttattttcactgtcgccttgacaacatgtagtatacagcctgagtcaataaaatctaccattttgttatcacttatccacctttaaccggaaaataaaccaatccgtggtaactagaaatatatctttcatgtacattttgtctcattataytggaaactcttaagtaacaaaagagtttttcagatctatacagtagctaaattatactaagcaagttagctttcctattctcagagataactctttaatagcatcttctcccttcttcttctrcatttatttatttatttatttatttatttatttatttatttatattttttgagactaagtcttgctctatggcccaggttggagtacagcagctcagtcttgcctcactgcaagctctgcctcccagtttcaagtgattctcctgcctcagyctcccaagtaggtgggattacaggcgcccgcctccacgtctggctaatttttgtatttttagtagatactgggttttgccgtgttggccaggctggtctcgaactcctgacctcaagtgatctgcccaccttggcctcccaaagtgtaggattacaggcgtgagccaatgcacctggtcttctcccttcttaaggcaccagcatcctttcctttccagcccagactctcagttgataatcttgcctcatatttcaccaccagaatagaagtcagacaggagctttgccatctttgtgctgtaggttctctcagcagagctaccccagtactcatctcctccttctttgttcccattacattggcccagctcccctcctgcccctggttgatacagttttactctcagtgctatttcctctcacsttctcaataacttttctgtggaaattaactctctatgatcaatttctctttgatgaaatgattattcccaacagaatacaaccatatctattaaagctctgaattgaaaaataaaaaattccttgtttccaagtccggcttctgctacaattttmaatttctgctctgttttatagcaaaactgaaagaagttgtctatactcactatctgtattttttccacctcttattttctcttcaactcactccagtcagtgtttactccactcaacyggttcttatcaaggtcatcattgtgccctgctaaaataaaatcactgtcagttttctctccttatcctctcagaagcatttgaataggctgagaactccctcatttaaacattttcttctttaaatttttggcaccacattcacctagttttctcactaccccatgtctacaccttctcagtgtcttctcttggtactccttccctaccaaacctttgttgccgtgctcagagcctcttttcctgttatcttctgtatctgaacttttatgactctaactattttttaaaaaaaatctttcrcccatcctgtgattctctgcagagctacagactcatatatcctattccatatttccacttggatgactaattcacatattaaaatgaactggaccgaattagaatgagtgatttcccacacagactgatgaaatccacttcccacccaggcaagcttaccaatcaccttaaaatgatatcaccatccacctagttactcagaccatcgaccttacagtgatcatttcttctcctctctttaaagagacactccttaactatcataactatagcaacaaccttctcctcacataccctctcattatcctatttcatcttctcagttcacacctgtatctgaaattgtcttatgcagtatttatttatgtgttgattgcctgcctccctttttagaatgttagcttccwgtggtacacattccatattcccagctcctagatcagcgcgtgaaacacagaaggaaagcaagaagtatttactggttaactgttgactcctgggtatgaaaacaactcagtataacctgagaattggaaaaatccctggggttcattgtaatggtaattggcctatggtcctactgggtataataggtagggataagaatccatgccttgagataatatgattctactctctctgtaggcattaagaggaatcatcctattaagtaggagtcagttgcccatcctttcactgacacctgtgtttctctttcaatgttaagtgatgtgttatgtgtatatgtgcatactgaggaatcctaccttaaaacaaaactgctacatataaaaagcatattttcctttttcttctatattgattgtttttaacagtatgaaactaaactttttaaattcttgcattttgtatctcaaagtctggtggtcttgagtcatgttagggggcactgatattagctacttatttttcttcaaaatataattcaggatctcatgtatttcagcagaggaccacaacatgttgacatatatttctgacaacaggacaatgctcatgacttaartcttagattcactgtattggcaatgttactagaaatgcacatataggtttttatagcatagatggtgttatcttttaaataaattttttattactgtggtaacacatgcccatttcagaaaatttacaaaattagtaaattataaagtaagtaataggaataagtcataatctcattacccagagatagtaactattaacatttctgtctttgtttcagttacgtttatatacacatrcatgaatgacattgaaattttaatttaatttatattgaacttcagctcatttgctgaagtcatttctactttttatagacaaatatgatatagcttttttccttttgtattgatttcaataatagtttactttctttttattctcgtatatgagatatttatgccttgcctaagggaaagcagtagttaatactgtcttatttaggcaaaatataaatacttaatgttaaatacttttaacaacattttaaattcctttctttcagagatacttcacttttcttccatatgctgggaaaacttaaaataatataaataaatttcaattaaacatccaatgctttgggaaatttagtcaacggtaggggcataattttagttttactcaaactatagtacaagaagcggctgctaaagaaggtgtacaagcacaaaatgcagttttctttggagagctttattgatgatacattaaattctggaatgatatttctttaataataaaataatctgtttaatattgaatgtagcttccatgatatatttctgaaatacaggtaaatttaggacacagaatacatacctataccaaaaaaaaacctgtatcttcaaatttccacttccaaattctaatcagtgattcagaatgtagcagtgtaatgacagttatacactcctgttttttaaacattgtcaggagttttactttaattttaggggataatattcgacattttgtttgcattcttgaagtaaggaaaactaatagagactagtagagactacattagatcagtgagtcagtggatccaggtctactacattagttccaggtcagtgggtcaatgttagaggattatgtggtgatccagggatcattagaaacaaaaatggcaagtggggaggatacatggatgctgtccagtttgtggggtaaacaggcctagaatctcttatttgtaggacaagtctgagcacattgtgctagagaagcaagaattgacttctrtaagaagaaggaacaaagtgaataaaggaatataggaaagataacagagaattggagcattgatgcagtaatttgcggaaaaatggtgtctggtgaagaaggtgtagagaaaaatgtccacctatgaggacatctgggctgttgctrccttttttgggtgttgctatcatcaagctttcatcgaaatggtttgtttttctaaatggtttttcttatatattctgattttttaaaaagacaatataatgaacatttcaaactccatagcattctaattatgtttgtctgttaagtgtctttaaaaagcrtagaagttgtattcagaagacatgccttagagtcccacaaacagcacttaccagacgtgcaatctagagcaatgcccttaataaattcaaatgatgcactttaaagccacttctaaaggctgaatatatgtatataatacatttaaataggagattataattgtcattaccgtatttagtaggaaatgttgagttgctgtagatagaaaaaataatagataaatttttttaatcacctatagttttatacatttttatttattagactcttatagttgcatacatttttgtatttaatttttaaacatataaaaaaacaaagcaaacaagatgacactcatgtagccaatactaatatttaagtatcaacattttgccatatttctttcaggtttctgttttataaaaaaataaaatgtaaagtaaatagatattaatataataaaatataaatagaaactcttacatggtccctgttacacgctctgacacaatggatcctaagtgctttatagcttgtaggagctgagaatatgtactctctgcagacagtctcccaaatacagatgcatgttcagcagcttctccacaactcatcaataagatgtcacttctgctttccaggaaggaaaatgggtagagagaggcaggaatatcactttcatttaggtcctgccagatagaaaaataaagccagaggaaaatagattcccagtgaacatatccatatccttttaagacttgccttgaatccactcagtattatgtttctgagatagtttccttgataaaatgtaaatctagtcataaatctagattattcattttaactattgctaatggagtggtttgctggtaaaccagctttggaggatgaggtagagaatccatgattccagcatttgccaatttctgtggtgttactatgtccactctggcaggtttcaggctatggatggcttaactgtcttacaaagttcctgaattttaacaattggctctcacaagccagtatgaaccagatctagcatgttactatatgtgcatgtgatataatgtgtattctagagtatgaatgagccagactctatcttctacctgtggktaattagagtgtgtccaatttttcattattacaaaaagtgattcaataggtatctttatacatatgtctttagataatrtaactaaaaatggtattcccagaccataggctatacccagtttcaactttaccaagcattaattagctgttcaaaatgattttaccaatctatgctccaccagyagtgtatgaagtgtgctattctccaaggtgatattgtcagacttactgttaccaatatgataggtgtggtgtgatttctaattgatgcttagtcagtttttaaaaattgatttattcaattttcacaactgtcctaaggaatatgtactattattatccccattttaaaggctggataatggacatctgtgctgctagagctatcagactttgaagcttatacttttaatactgtctaattctataccttttcattatgtattctcaaataatagtcactcaaaaatatttataaattcatgactaaggcatcattttcattagttttattgtttagcagattacatatttattgatgtactgatgaaaattaaactgtcattcttgagacagatttctattcagttggtttcttcaatacatagatgttgtcacagtaccaaaatctaattcaacatcatcattctatttaatgtagacatgacattacagactagtgagtagaagaccatggtctgtttgggtaaatataataaatgcttttctgtagaaattggttgagarcccacagccatgcaacatttttcatctatggcctgaatattaggttagagagaaggcttattaagttctcatttgatggaaagctagggaagcaaatggaaagagatgccaatagcttaatcagtaagattagaatttgaaataggtttagcataatgaacaagtagtaaaatagcaaacaatataatgtggtaaacagatgaatttcaggagaaaaaatattgctaataacaattagtaagtagagtggtgatatgtacaattaaatctcatttgagtcctactaatctagaattcataaaaattctattgaaagattcaaaagttgttctcacatcatttttgtcattgtaattttggttcactatttcttgcccatgattacgttttatgcccacaattagcataatatttacaaaattaatgaattgataaatggacatcttacctctttcaactcaggaaatcttaatactgttatggttatgtgtgaatactttgctactattaaatctttggattattttttcactactgcaaattgcactgttgtgtggatattatttttgcaaaaatattttataattttttccagtgtaagtgaaatacattaattgacacaattttcttgttgtgaattgattcttcattgtacttctgggaagatgtctgttaatctcgttagactttttctgtcactcacacctaaaatcactggtttataaatattctcagtaacattcagttagttatgttgtgttctttttttgagtggacaaacatttatgtcagtattatattttaatattttcagattactcaaagactgtcctggtttcgtgtttacccctcgatcaagggaggaacttccaccaaacttccctagtgaaatccccggaatctgccattttctggatgcttaccaacaaggaacaaactcaaaaccatgcttccaaaagaaagatgtggaagatggcaatgccaattttttaggcaaagcatcaggaatagattagcaacctatatacctatttataagtctttggggtttgactcattgaagatgtgtagagcctctgaaagcactttagggattgtagatggctaacaagcagtattaaaatttcaggagccaagtcacaatctttctcctgtttaacatgacaaaatgtatgtactcacttcagtacttcagctcttcaagaaaaaaaaaaaaaaccttaaaaagctacttttgtgggagtatttctattatataaccagcacttactacctgtactcaaaattcagcaccttgtacatatatcagataattgtagtcaattgtacaaactgatggagtcacctgcaatctcatatcctggtggaatgccatggttattaaagtgtgtttgtgatagtgtcgtcaaaaaaaaggtttttgaatagaaattacattctttgacaccctcagttctttcamactttcaactctgcattttattgcattttctcatttaacygttagtatatgtttgaatataggctgactttttttctctattgcactttcttctttttttctttttagaaaataagcaattaggggttagatgcaatatgaatataaaatagttctgtaaataccaaatattatttttagttctggaagttaaaaatactctccatagtaaygtgtgttataataataaatatttcttttgtttgacttttttaaaattctacaatggtaaaagctattttaatccatgttagcaatttaattcctattaattcattttactatcataatagcaaagtattcagaataaaagaggtttatatcttctattaaaatgcagtaatactattcaaatctaatttagctggaagcaacatgggagtaaagtaatcatccaggggacccaccataaaggacattggtaaaacatttacacacgtaaacacacgtgcaggcacacttggaacaatatggacccacttcagcagacatcttctattgccatgctgagctgtttaaagttttaagaagaaaatctaagtatggaagtagaaaataagacttgttcttttggtggatatctcatttttcttgagtatttgtgctgaacattttggtgtatgtctrtgaactaagaatcaagtttttgtctcattaaatatacatatatgaagtgtttttattctacttgaaatatcttgacttaaaaaaaacgactgttagtattgatgaagcaaatgaggcagtgactacattatggaaatgtctaagtattttttccggaacttcaactttttctttttgttttacataaacatttaagcagctaggaacttttagttttarttaggtcagttgaagttctctggtgaactaaaaaatctacattttggttggggataaagatttgattttaaaaacagcttgaatttaaagcaagaaaaagatgaacgttatagttttaaaatcaatattagcagagccatagataggctgagctcttatttggggttctgagaaataactcagtttaaaacttctttaactgcctcccttagtacccaggctagcccatggtgacatcagggatattcattactgattggcctctagtattccaagggtactactatagatattacaatgatgctgtttactaagtgataaccccgtatcttacaggactgactttgactcaataaaccactcagcctattattggaaagtgccataggccttgagaaagtatagttacatcctcacaaatatatgaagttaagtcactacttacaaggaaaaaaaatgtaaatacatttttctttctggaaccgaactcttattatggggaaataatagaaataaagaaaatgtaaaagcatgaaatggaatgtagtcttgatcaaacatttcagcagacctcaatttgcttacaatctgtactcaaaaagtttataattcaatcagaattcaaaaagtattttgtgtgtttgtgatgtattagcatatacacaaaacaaatgaggggaatgtatataatcttggtgaaaagttgtatgggagttttttgtacgattcctgcaacttttctataaacgtggcattatatctaaataaaaaawtaccaaaaaacatattttcacagtgaagttaaatcatctgtgataggttccccagaccagcctacaaaggcccattaaatacagaataatttgtggatcttcaaagaggatgaacatacatttccatgacagagtccatacgaaattcacaatttagatgctaaaaaatttaaggaatatctttttttctctatcttatctgctttgaagcatagcgattagcgagaaacttttcagatccagaccactgatggtagccagagtagagaccctggagcatagattcttaaaataaataaggggcccaagtcagagctttgaggtattgaagatggaaaaatagtggacaaacagcctgtaatcaggttggggattacgggtactgagttatgttgccatttaactattctaaaaaataagactgggtctcaagactgcttccctaacagactgtttctcctgaaaatgcaggagctattctttctgttctggttatatagtttccattcatggcttcttgtcctgttgttttttgtgtcgagtacactatataaattatctccttatacatatttctcaggcaagcacagagttatactgaacttttctaaagatgctttgcatcaagaagcaaagggaaatacagaattaaaatgtttctttccattttgctttgtttttctatatcgatctagactttgtaggaaaatgcaaagcgtatatttaagaaaacctaaataagaatagattcatttactcattttcatttattcattcatgaagaatttattgaatgcctactatgtgccaggaatattgctatatttttgaaatttaaggataaaatatggcccaatctatcaagaaaggaaagtgaaagacaaatgtaagacataattacaacattctgtgggagcacaaagtaggggactcagttcttagagaagtcttttggtcttagagttcatcaagcagagaaggggaaggacatggtccaggaaaataaatcagcacacaaagagatggggtcttgagggtgcatagtacattctggacagccagttacctgggatgagttgggagggaggagaataaggacaaaagaccatctgggcaaaaatcacgaaggggtatgtgtgtcatgtaaaggtgtgccatgatagttattcatattgctattgtaatattaatatatagtaattaactacacatgacacagctttacatgaccttaagtagttatcaacattaccataatagtaatattaataactacaataagagccattattattcacttgaggcacttgttcaaaatagattttacaaaagaaaaaaaaaaaagaagcaacatgagtaaaattagatccattggctactgactccctctccaacagttttaaagctactagataagagaagcatcaagtcttaaaggaagagaatggtatgatcagatgtgtgttttccaaagactattagaaacagcatggttaaggatagggtggatatttacttgcacaggtgactgaatgaacatctgtttatacatcaagggaaaatgattcattttatatcctggatattttaccataagtatgagcataaagctgggatgtctggcattggaattttatgtcactctcaaggctaattagtctttcagatcctttggtagggaggaaagaagagttgcttcagcattttgactaacatttcttccaaatttcttctccctgatatttccagccacgccaaggcaaagacttcccagctctgtctcaggttaggttaaaagaaggcataggatggaagagggtggtctgtggtaggcctagcaaatgaaagagatgaataaacaagagtgtctagtctaactagtgcctgaggaatagacatcagtcctctgagattacccagctggaaaactgcccagatggagctttacatgcaaagctccagtgaagtctagtgctgtataatgctttaaatccacaatcaagcccttgttgatgcaaatgttagtcgcccaaagcagaatgggttaacgaattactgcagtggttttaggtgcatgggtttgacccatgtaaatcattttaataagtaaaattgaatctttgatacatatttgttgaggagcttgtcagatcactacctttcactgaacagtaaaacatggatcatttatttcacctcattttgcacttcaatgcaatttcactctttaggtggttgtacttggacagttaaatgaagactgtctttaagggtgcagggatggagaacacagcatatatgagaggtgggagggcagagacgccttgcgattcctgtgaggagggacttaccgtctcctccaaaacagaaattcagtgctgcagagacggtagcaaagtgcagttctcttgttaaaacacaggctaaaagcagtgactgcttaacttattaagcagagaaaaccaaaatgtcattttcaaccaaaattgagtgttagagtttatggtctctgttatgatacttttcaagacctgggaaatatttgtatcctttagtgaaaaggggaagaatcaattactgaaagccataagcttacagtaacggagccaattaatcctttgtcatctttgttgagtttagttttcttctgttcttagcacgtcagctagtagatctttgatgaactgttgctcctctttaaatgtttcttttattatattgatgatgtgcactcattcagtattcttattttaagctgcagtaatcactgtacatttgattgccatctgtacttcccttgaagcagctttgcttattacagccacacctgcatctgttttgactagcccacataacctacacatttttcatccaaagctatcccattaccttatttatgtccatttattttcatatatagtatctgccaaaatagtagcaaaagttttatcaatgtgtagatttcaatcagaaaaacctaagcaaaaggaaaaaaaagtgatattctaaaagccacacttcttttatcaccagtgcagttttttccatcatcataaacttagttttatgaaaatgttaatatcttggatttaaacattggggtagaaatcaggacaaaatttaaatgtcatatccaggacttaatctcagatattctggtagaagatatttagataaggttgtggctgcctgtcaagttttttaattttttaaattatataatgtcagaaaattaaatcacaaatgagccttccagattgtgaggaaaattacttggctgaaaatgactttgcataatgcccaaatcttgaagtatctgctcagatgtttgttccatctgaaatgctgccaaatccatctgtattgaggaaagagctatgaggtagtttcagagaaagtgaaaacaaaacaaagcaaaacaaaaatgctattacagaagttggacagcccaatgtgttaagtattatacacctggaacaagagcagcaaaactgaagctctttggaaagttatggcaacagtggtctgggaattctgggcctttagaaataatcattcccagtgatacagggatgtgcagcatccagacactgcttaatcacagtgagctgccgtcttccctgaataagttgtatcttataacattgaagtgaatgaaaatgtattagtatttgagaatttactattccttcacctccttgcacatgtaaattaaagatgttttggaaaatatgagaacttgatgttcactgccctagagcactattctccaaccttttagattcctgcaatctgttaataaaatattgtaggacaacaactctatagactgatacatgctgctctcaatccatatactacatattaggacagcttttcttttctaaatgagcatgaatataaatagaaattctagtattttcttcacctaccccagtgaatcatctttatattttacttgggaaactgctacagttggctagtgggtcttcacttttattgctttgagaaatggataaaagacatagactatcacccctccaaaaatgtgcatatggccccatacaagacacatgtactgccagagcttggggaactccctagaatctactcctagaccaccctagtgaagtaccatagaccatattgtctagatgggacaaaataataaattttgactaagaacttactgtttagagagaaaaaatagtaaataatgttcaaaatgagaagacaataactgacaagtctgtgatttttgggttagatgagaccacttttgatttttgaggaataaaaggagttagttttttggtcctgatgtgtaaaatgattcatggggtttcacatacagacaagtagttttcttttcagcaaatatttaacatatctctcaatatatttttcaccagtttttggtaaatatgcattgctataggtataccaagttttttttgttatgtttagtaactaatttcattttttctgtatatgtaaatatagctattggaccctgcattgaaaaccttcttagtactaacaacactccttttattattaccttcatagttactttaaatgacatatttatttcgagttttacttctggctgagttgcaaagtctatgagaatgttacctcctgtctcagaagcttgttagttattgtgccacctaaatattgtaataaaagtgtttaaataaaaatcttcttaaaatttaaaatgagttatgtttaaaaagaaaaatgaactttatatcaaggaaaaacaccattgtcccaagttatacgaatatatttgctttgatgtaggtcttgctactaaagagagagaaaacttccaacgtaacagtgtggaaaaccaggattaacaactattatgtcaggcatttgctctgtacaggtcaatgtattcaaatcccttttcaaaaagttattgttaaatagtgtactaacataatcaaaatacatttatttctaaagctcctatttccaacaaaactcatattatacataaaatcacaattgttttaaaacctaaattaaaaaaaaatttatttctatttataaaaaacaaaattaaaaagtctcagtttttcaaatcatatataaagtcaaactttttagaaaacaccaaccgtagaaataaaactgtgcttggcttatccaagtgtagtggcttataacagaaactgggggataaatgtgtctccattgcactctgttgggagacagttttcta

SEQ ID NO: 95386 - DNA, 60647 bp, Homo sapiens
  misc_feature (1)...(60647): n = A,T,C or G
aagcataccagtaaatacactcaatgcaattcttttgcttcaaatgtcaataaaacttagtaagattttaatacattagcataagctaattttaactttttatgttgctgatgaagcacccattcaggaaaaaaaaagctcatgctttatgtaaacatattaatggacaatttatctccttttcattatttttactcatgctatatttgttagaaaactgataatatagttgtatgttatgaatctagttagatttggattttattttcaacaacaacaacaacaacaaaaccagtaatctgaacatgaaaagtcgatgtaggcaagagattttcttgcagattgtcagttgtcactcaatgtttcatatgtgagtccttggcttattgttactaactccaaacaatcggtaacagagttatgtagtcctttaaattttacaagaagctttcaaagatgtctcatttgatcctcttagtatcttagttgagcaaggtgggccaggcaatgctatcaccattataaaatgggaagttccaggctcagacaggttgaattgccaagcaagtaactgacaagggtgatctagatcttttagtttgacatggtgcagctcttttcactatgcattcactgtcagtggacatattacatttatataaggtggacaaaaggggtttagtttcattaatcattgacttcaaacacagcaataacaaccaccacctcaaaaacaatattaactaacagtttgtgaggacttaacattttgcaatcattgctttaagcatcacacttgcaaacctgtggggtaggtaatatttttaaccttctcagcactggagtatattgatctgttatttttcctgttttacaagtgaggaaactgtagttcaaatacattaagtaatttgtccaatggttgaaaacaggcagtctgactaaagaatctgtacaattaactcctacactaaactgtccccatagctaatttttgttttttaaatcaaataaagttacaaaaagaagcaaccaaatattttaattagtggctcttattccctgctattttctatttatatctataataataagtagtttcaacatagactagagaagaacattattttaatatagtatctagaggcttttgagagttatggacagcttttgaaatctagattccaacttccactgggcgagactatgggaaagaaagtatatttagctctactttgatgggaatcttaatatcctccacactttctgaggacaacaattcataactttactaattatacttcttggctaagattttaagttttcactgttccccaacaagttcataaagagatttccagatataggaaaatatcattgactaaatgacctccaaaatacctttcagtgctcaaagtcaatcaatctttgacataatcatgttagatctatccttactaaactaaaaaaaaagattaagataatctctcccagccatgtacaagcttaggctgtaaagaagatgaaaacaagttagtttttattttaatcaatttgacttcagaagcaaaactttatagctcaatctggtattcataagcttttcttgaaaatgaaacatatttttatttaatttcatatactcccagtatgttatagtgatgtgttgatttaacttaatgcttttacttattataacattgatactaagcatcatctttaattctcttttaatttcttttaattttcatacataattgtttaaaccttataaataaatggatatacatatatatgtatgcatgactaatgttttttgtttataagttctgatggcaaggtaaatattaaaagaatttgatgtagaaaaaagtaatttaaaaagtgcttcttttaatattcaatactacctttttcatatgacaaaacttacagttcattggcaagttaacaataaatctgaatgtcacttctttaggaatctgaattcttggatctctctttgttctattgatctagaatcacatcaccgaatgtgtcatttagaatttgcttttctctttgcttgtaagtattctgaattccttgcttgaagtattgagtgactatattagcaaaaataatgacaacagatgtgattattgtgcgactaaccaagaccagcagcagaagcttcacaaagaatcaatattcggctcttagccacagagattaaagaggcacatgaatataaagcaaatcattgtataagaaatagttgaaatgaaatgacatgctgctccataaaatgatctaaaaatggaagccacagaaaaaactggcaaaacaccagagctttgacaaacacatgcacagacctgggaacacccccaaatatatatgtatcttcctttatccttaatcaaaggtttctaattttcacattaactagcaaagccttgaaaacaatgattacaacactttatttatttatttatttttgagacggagtctcgctctgtcactcaggctggagtgcagtggckcratctgggctcactgcaagctccgcctcccaggttcacgccattcttctgcctcagcctcccaagtagctgggactacaggagaccgccaccacgcccagccaattttttgttatttttagtagagacggggtttcaccgtgttagcctggatggtctcgatctcctgacctcgtgatccacccgcctcggcctcccaaagtgctgggattacaggcgtgagccaccgcgcccggccgattacaatacttttaatacttaacttaccaaagtaatttatttttattcgctgaaaatgtgagtcacttcagctgacatttctgaaagccacatattgcctttttacttattgttcattcattagactgaacttcatgttgattttagggctggctaagccattccctaagctcttctttttcatctttaactgatcctcctcagcttggggcatacatacaagaatgcaatgcattgttcagagaatatagcataatctacttcctgatatgattcctatgctacttggccagcagtgatgacaacaggtagggagcttttatagaagaatggtgacccctcttttgagatcctctacagctggcaggcatccttctgtccctgaacatcacagcctgtgtaatatcttgtaggccaaacaaaagtcagtaaatgtttagtgtctagaacttcttttagattcagaatgaatataagacaattggaaaataaaacagtaaaaacattcacaaatgcaaaaatgtgttggacaaaaacaacaacaagtgcaaaaagttattggacaaaagggaaagtgagggtagaagaactgaaatagagagaaagagacagagagaaagggacattggcagaaatgctcattattcatttcctctcatatctttctctaagtgagctttcctcatttttcattcccagagaacaattcaatctccttatcttttgcctatgtaaagtttaaggtggaggacaccacaacacaccgtaaaccagagagcatgggtccattgctgctcaaaggtgaacagataagagacatagtttttttttttaagtttttttagcaagttaaaagttattttatgtatattattaaaaagtcaaataacaacagattctggcaaggttatagagaaaagggaactcttatatagtgctggtgagaatgtaaattagttcagccattgtggaaagcagtttggtgatttcgcaaagaacttaaaacagaaacatcatttgacccagcaatctcattattgagtatatacccaaaggagtataaatcattctaccataaaggcacatgcatgcatatacgttcatcacagcactagtcacatggaatgaaataaactattcacaaaatgaatacttgtgaatatatgtgaattaatatgtgaattcactatatgcaaagacatggactcaatctagatgtccatcagtggtagactggatagagaatgtggtacatatataccatggaatactatgcagacatcaaaaagaatgagatcatgtcctttgcatcaacatggacggagctggagactattatcctatgtaaattaacagaaacagaaaaccaaataccacatgttctcacttgcaagtgggagctaaacacggagtacacatgaacacaaagaagggaacaatgaccactggggcctacttgaggatggaaggtgggaagagggtgaggatcaaaaaactatttgttgggtaccatgcttagtgcttgggtgacaaagtaatctgtacaccaaacccccaagacatgtaattggcctatataacaaacctgcatatgtacccctgaaactaaaataaaagttaaaaaaaattcagttatgtaacagtaaagaaaattcatctgtgtagaaaaataatcaaaagatacagaaagttataaaaagtaagagtcatggccattccagccactggttctaattacagacgatagccatatcaacacttcctgtgtttcctcccaaaccattattcttacagcaacatgtatgtgcctgtgttattacccacatagcaccttactgtatactaactctaaaaaatggaaaatgattacattcttgtggtgttttgtaaacctgacaatacttttctgcatcatcattttctagtcaccctcctgctttttcatggttgtttaatgtgccattttaatggttcaaaattagtggttaattgttgttaaataatgattaatgttttaatagttgtttaaaacaaggtgttagattgtatgaaaggctgtaatctatttactcattccaccaataatggaaatttttaaagtaatttgttgttttgtttgtttgctacatgccactatttctgtatcagtttccttcatcatagctctctcggtgctgatgtcagcacaatcttattgttttgacatttttctctaaccatattgagactgttctcacaacaaaatatgcacatcttaaaataccatctggcttctcaggtccacttgagactggtgacctcacttttgaccttgccctaaaagtcaactggagtccatatacctcaggtacaaacagcttcaataagctgccacttcctgttcctctcatcttctctctatggcaggactcagagcattaactaacctaagggcctggtagaatgtaagctggaggtagagtagttaaagtctgtgcattttgtactggtcattttccagttcgtctgttgctaagaaacagcaacagaggcccgctctagagggttacaaactccctggaattatggctcccggacatggtgtagggaaaggtgtcccacagggatcaagcctagaatatcgctggatcttgtacagtttagtaaagggcaggactggatttaacataacgtccaccaaactacattactgaaaatttttggtgcttcactcaactagtctcattgactagaagtgaaaatatgtttttctcaatattaccagctttaaatttgccataaactgttgtgggaccaagccacagaggaaatgtttttccgctagacaaagataagcatgaggatgccagcaacagaggatattccttttaaggtctgtccattgcaaagtacacacgtacacgctcacacaacaaacacgccctgttgccttttgcttgtgttaaccactgagggcagatctctgaataataatacatttagtgggtccacaagagctgcatttcctctgctccagaattcatgcaaggagcacggctggggcttctccactgtcattgttatggcctcaaatgaaggccttgtcaccaggcgggggcgggaaggcactggagcgcagcagcattgagagcatcygaattccctcctctgtccctgattggttgaagaactggggagcaccgaccagccccctgcggctcgactcgccattggctgggaagaggtggcaatcagggcgggccaaggcggcwgttctcgctccagctcgatgctgcctccccggcccggttgcgctgtagccgctgccgcctctgcctgggtcccttcggccgtacctctgcgtgggggctgcctccccggctcccggtgcagacaccatggtaagtgctctcagccgggtgcggcccgaacctcacccctcctckgccggcctggcagcgagggaactggccgcgcagccggagcttggctcgggggccctgggcgctcactgccggccacgggagcagcctcactccttgccckcgcccagtcaggggaggtgggaaygccgcgagtcgtggcgggggcgatcggtgcctttgcttcccaggcgggtttgccgctccacaccgcagcttcctgagctcgggaaggggaggtgcggcggaggcgtggggtcttccyggctctggccggccccaccagtgtgggaggctgagcgccagcggaagggaaggctccgggttcgcgtccccgcgctgcccccgatgcccagcctctcccggagcggtgacaggtgaggagggtgggaagatagcgtgggggtggggcggatggtgacggggagaatccaccagggattggggggttgcgcccccacgatccgactcctttagtgcatagtacccctaagggagaggagtcaggggcggggtgaaaggttaagccagcgccatgggagcagaggcagcagcctcgcccccaagccgcttctcaggtacagcgggtccctgacgctcaagtctctccctgtccccgcagtacggatttgtgaatcacgccctggagttgctggtgatccgcaattacggccccgaggtgtgggaagacatcaagtaagtggccggctaccctggctgtggcccaggtcggcgcccagtgtgggaggccccccgcgcctcgcctggtcctcagcctgctggccgggtcgcgggcgcgcatccttggaggtgcctccgcgcctcgctcccggctcgctgcagctgcgctcccacgctccgggactggaaccaggaggggaggggcggctggggcggggctgcgagggcgagaaccgcggaaaggagcccctaggggtcaccacggcttcccgacccggcctgagcgtgggaacgcgctgccggcgctcccaggctcagcaggccgggcagctcccacgcgtgcagagccccgagggaccacacgggcctccgcgaggttcctgcgcccggaggccttagaaacaaacggaagactttggctcctttatgatttacacacctggcgtaagttaggcctttttggtatgctgaaacacgcgggagattatttcttgagcaacagtgaattaagckcatttattcatttttaaataaagtgaaaattggaagttttttgttttccccaaatcccactgcccaccccccccgccccaacccctatcccccgtttttttctactgtgttgaagacttacagttctaggaggcattctactttcagtcctggagctttgagcccagtattggggatgtgaacggaaataccacacccacctgagagtttaaacctgttggaatgactgatgggtcagcatgtctgcaggcaggttgactatttcactctaataaagttgtctctcctttttcctctcactctcaaaaaatttgcatttaacttatggtacagctgaccaccaccaactagctactccaaaaccctatttatggattttcatattagagcaacagtcagactatcacattgtaacaaaggtggaaggaagggtttcctgggtgggcagatgggaatacactgttattattcactctgatttcctgtacttagtgatttcattttgttgtctcaggtaggtgaggcttccatgctgtttttccctaagcacattacaattattagcaatcaattctaacaggccttattatgcagttacatgatggtgatttctcataacgatctgtttccatagaaatgaccagggttatatattaagcacgaaaatgtaacttttctttcccctggatctgtatcactgagcgtttctttcatgtttcagaaaccatttgtattatccacagggcatattacctacatattataaacagaagccgagatttggcaagtatgtggttgaatccaatgagaacataggcaccaaaagttactttaggatttgaattttctggccatcttaataccattataatttttattttgcttagtagacagatatcaacaaggcagacatcaaaaaaagattgttaacagtataacttaactaccgaattatttttaagccacttcctttgtaaatttataaatgctatatatatatatattctccatatgatgcttttgcatctgtaagatagaaattcccaaatttgctggtagatatgctatgacaatgaatatgcttagaatttttagagcagaataaaagatggctattatgattaaacagtcattatgtaatttaaccagatttagrttgtatatcctagccattatcagtttagatcactgttaaatacagagatgaaaaataatactttatagagtaatgtatcagacattttaaaaagttaaaattatccagagatttgtttatattgcttatattttcccagaggaagtccaaatatgtaaagattcaattgacgagaatttaactctgcaaaatcaagctgagaatattgttccattctactttaaaaaattatttattaacttactaatttatctttaagtagcttccaacagtattcataatttgtctaaaggataaaaattccaatcatccacaacacaatttttctggtaaaaatgaaacaagttatattggtcttttcttaaataaaattgcctcaaggttatgcccctgcaagggaaaaastgttagtcacactggtgttggtaatccaggtgttagtgttgattctttatttgtytaagcatcttttggtggaccccagctgatyttgggtgtggtttagtgtctgggctagagaacatggttgaactctctgcactgagggcattaaagctgctccttggtttccaacccaatacccctgagtaattactaaatgctccctgggagarcatttgctttccacagaaaagaatcttgctgcctggggagaggggaggagaacctggaggagtgtaattgaaaaatgctccttgggtgattctggttcctcctcccctccctaccctctgcttcagggaatattaaagcagtcattggtccaagatgctttcagttttaacttttataagaaattgaatataagaggaaaaacatttttttttgtctcagtaagtaccaaactcttattttttcttttggtctttgagaaactatctaaattgatgtttatacaaatttacattatacttttttgcttcactaggaaatggccatccatccttcatgagaaaggatgggaaaagatgccaaacatttaatgacaaataaaaccctaagtaacagattccagacagcagacagaaaattctaagtggataagggccaaaaatgcttcattgtaaactcagtatccacttacactcttaccaacaatataaccatttcacaaaagctttgaattcctcttaagaagaagaaaaattgtctagaccaagggccagcaaactttctcttaaagggccagatagtaaatgttttaggtgttacaggccaaggtaaaactgaggatattatgtaggaatcaatataactattaaaaatataaccacttaaaaatattaaaaccattgttagctcttggaccaggaaaacgcaaacaaacaaccaaaccagacaaagtgggctacatgtgatccatgggctatagtttgatgacctctgatttagaccataacaaatgtgaaaaagcaaaagagacctctgaatccatttcaaagttttttttgttgatttcatttcaatattcaaatagtccttttaagaggctatgatttctaagtaatgacaaaaaaattatcagggtagaaaataaataaagttaggagtgatacatcctagaaaagcacctaaatacttgatttcccatctctgttatccttccatcagccctgactaaactcatcattgcgtcaaattactgggtttaattttagattttttctctgctttctttccatattttttctgggtagcagcggagggaagcagttagagacaggtcttgctgtgtgcccaagctggtctcaaactcctgtcatcaagtgatcctcttgactcggcctcccaaagtattggattatatgcaccaccacgcccagcccaactttagattttttaacctcactgaaacatacaaattaggaagatagatccaaaacactgaaaaatcccaaatgattaaaagtctgtaaagaaagtacactgtcctgacttaaataaatcagataaaacgtttatctttaatgagtatagtcaagtgttttaggcactgaggatagaaaagcaatgatgtaatccttaccttcaaaaaaaaaattctagagatttcatgatattttagtcttattattttgtttttattttcctgcctataactcaaatacggtaaccttttgtctgttggatagcatatacttccagttttgaaattaatgtgtcttgttaaatttgctaatcacaaattaatcattatggttcaaataaggaaacactttgctataaactagttatgggactttccaagttgcctaaactttccaatcctccattgcatagaggaaaaaataatacttcacagagctgatgtaatgcattgaataatgtctgcaaaatgcttaacatagttcttgacaatagcttaataaatgatgatttttttttattttactctagaatcagagtttttaaactttccgttccccaatttacttgaaagatattaagccctcctttaaaaaatattattgcagtctatattctatcagtctaaatttttttatcactctaggataagtaatcatcatcatcatcatttttcatcattttgttttgaaatgcaacaaatgctcttaatatccattgtatcaaagcaaattaaaacaaacaaaagagcacatcaccatgttttgccgtgtttattcagattttcatatttttgaaggtgtgatttaaacttctatacctttctgtagatctgcttaagtagtaatgagcctatgtatgttttaaagtagtaaggatactttatattataaagcaatttcaaatttccaaagttttgttctctctataattttggttgactgctacaacatccatttgaaataggaaaggactttacagctcaatttttttaataacaaagttgrttttccaagaggttaattcccatatgtaattacttaytgtcccagagaattacatataggaarctgaaaagtcagaacttcagcccttgttcttctgttgccaggtttaatgcytcttttaagatataactgtgaaataggaactaatgtagtatacatacaaaaatgaaaccacatttattttcttacccagaaacttcctcagtacaaataaacacattaatatacagactaaggaaacaagtaaaccagatcattgttaggatcaggatccttttctgtagaaagatctgccagttagcctgaaatacagaggaaggcgttgcattgtattgtgtgttggctgttaagcttactaatgtttgaagttatcttttgcagctggaactggatgcccaagtgtatactccatcacatacctgctattgagctctttgcatagggctcttccagaacctggaccatgtctgtgagcagcatggcaggcacctaggtgataaggcgggtcatcacatgatctcagggagtttgtgggtgtttcttttgagttttattttggttctgatgatctgaggtatcccccagaaatcaagctgggtcttggagtctttattttccttgcattctgtgatttttgagaattaaaaaaaaaatcagaggagtacatcacttaatttggcgtgtcggaaggatctttgcacattacggtgagcatcagaaatcagaaaatctgtattctcactcttaatgtacccagatctagttttggcaaacatttactaagcattgttatgatttgcaagaacaaagtcctttctactttcttgcctttctccagaataaggggctctagcaaatgtttctctttaatgtgttggaaaactatagttatgggttgatgctctgcagacatcaataggaaaacacacttaaggaaatgaatgctataaagaaatctaactggctagatccgagggtgacagctcagcagacgtgagtacttgcagctttttcattctctcctttgcctccttgttcgttaaagaggaaatggtgggagaaaaaatgtctttattgtttatgtctagcaaaatgaagcatctttttctgtgtcaaactatatcaaaagatagtgaagttaaagtggattttattccaggtaaaagtagacattctgaagtatttattggacctcctcgttactgtggctttkgttctgttgcatattctggtctacttccccttcattgttgaatcatgaaatatgaaattgttaaatttattgaaattctttgtggtcaatcttcagataacccaaacatggaaacctttcactcaacttgtcctacatacccttagcattccagccccatgggcctgtttttagtttctcagccataccgagccttaaatgtgtccgtttaacacctgtgcttgctatggtctccttttcttcaccctcccaaccctcctgtaaatgtaaacacctctcagctttgagatgtcaaagcaaatgtcacttcttaagggaaccttctctcacatccaaacttttccctttccttcatagtgctgtaatgcaagagtttgtacttagtatttgtactactgattaatgtctatcctccatgacaatagcctccataactctttctagagtgctctctctctccctctctctatgtattcaataaaatatcaggctctctttctgtaataaaaatatggatgtttatatgtgaatgaagtatctttcacctttttcatttccaaagaatagagcacacacatatttttatcaaagattcttctctgcaaccagaatttatgtcagcatggtgacatattcaactactatttaaatataagctgttttcaaatagacatttctttttctccaagatttattgagatataattgacaaataaaagttatatatatttaaggtgcacaacttcatgttttgatgtacatatacattgtgaaataatcactgtaatcaagccaattgccatattcatcacctcacataggcaccctctttttttgtagtgagaacacttaagacctcccctcttaacaaatttcaagtattcattatagtattgttaactgtaattgttcattgtaattgttaatagtgacattgctgtgccaaataaacatttcttatatcagcaaaggcagaagatagagcaatatagcaatacataatagcaattccttttggaagtgtcagagttcttttatgttttctcatgtcatgtggatgtattggaaggactaagaactctattgttagaatgacaatttyatatgtcaaaagacaattactagattggattcaggacatgattgaatcctttagcaagtttctaaaaggcagggatgtgtggtgctgtttaaagtcagtgtcatagactgtaactcagtrtttagaatactgaaattaaatttgaaatccagctgagctctcaccatgtcatgctatttcgaatgtaatatgtcacgtatattaaacacataccatatggttctgcagtcacagtcctagatgctttatactcattatctcagttaatcctcatcaccaccacagaaaatagattccttcattatcctcattttgcaaatgagagaatagaggcgtaaaagaaagcctgcctcaaacactcagctattaattattagagctgggatttgaacacagataaagttgtaattatcatgttatgtgttttcctccaaagagaaagacctataaccttcttctttccaaagacaaccaatttagcaaggacatgtgccatgtttatgtgtattagtactgcctgctgctttttcttttttcttggaatgttcaagcatgcgtacaggtgatttttgacaacaatatttttaaaggcgaattgacatgaagcatatacacaagtgtctaagtaaatkcatttgtctgttaaagctgctgaaaatggctcagcagctcaaatgaagatttgtaagttttgtggatatgttttcaaaattggagaaattaccattaagggtctcttgtgactcaaaattggagaaattaccattaagggtctcttcctgacaattgcatgtcaggaagaaacatgcaattatgtatcaagactgttgttgtttcccctaaaactaaggtatgggtgtcactcaggagagyatttattgttactgtttacagtgattggatgagtgagtgaacacattgacatgaaaggactgacctttactaactaaaagggggttcaggcaggaagtcgttactggatttaaagggcctgtctctccacttggcagctccctcaagccagagtctctcctttggggttcaggcttactgagaatcattagattaggcyattgaaaacttagaggctattcatgctccacagccacttagaaaaaagcaatataaagttttacttttttagatgttatatatagttactatccacagtttatagtgggagattttagttttaataatggttggggacaatgcaacattatggtaccaattcagctcactacaatggaccattctaggatttattatcaaaacgacacctacgtactgttttttaatacagcatgtgttctgataatgttgtttatgggatcaatagtatcttggagctgtcattggtcagtttgattgtttgatcctgattgaccttttctgcccaagagcagaccttgtgttgagattatgttttcaacatgcctgtgttcaggctctcccatttcaaaatactccatggaaaacttctttaactgaaatatagcagtcttgtcatattcttaacttactctaaaaatgtacagtagcaggagctcagggtcagaatatgaattcagtttttctgtgttcacatattgtagttaaggaatatctccttgtatgtgaagttataagaaatgttacctggatattttggacaaattgtatacctagttttaaaaaataaataataaaaaatattctttagtttgaawgcaaatgatggacttttgttagtaatgtttgattacttgtttgttttttttttttttttgtagggagcttggaaatgtgtggggaaattgatttcattaattcattcactaatttttaaacatgtatacctttattaagcacatgtgcacctttattaagcacatgtgcaattccaggcacctgggttaggcaccagtaattacattaaagaaaaaaatcccracttaccaaacaccaccactataaaaataccaactacctctttgtgaaaaggtaattagtataaataaargatctgcttaaattccaacaaataagagtaagtaggaagttgattgctactgggaaactatttcacttatacgtattcaacttctaaacagttactgtggctacagatacaaagaatgtgattatttctgattttgttgccaggtgagaattcgatctttatttttaaagcccttaggggcracagagcttgtttgtttcttggctattttagtttgtaaattctatcagcaaatctgcatactaagtgcaccttaattatttgattctgactaaaaatgactaagattttgttgtcattcttcccttctcttcttccacttgccatttcctctttctcctttttcccttcttccttcatcttctccaactactataacttaccagttagaggaagtatcaggcattaagtgtgcaagaagtactaccctgagatttttgcataggttaattctgctaaccaacacaatgaccggaggtaactgctgctgttagcctgttttacagatgaggaaatgaaacaccaagagttgaatctgcccaaactgcacatgggattggcttagttgtttattttccatactgtgtgaggaaagactttgacttatgacatagatgaaatcaagggagtttctctttatctaggtttacttgttagccaatgaaagtgcttttaaacttgaacctctctaaatatttattattgtctgctgacctctttcattgagtaattcactgaatagaaaaatttaacgcttaagccaagcagagtcattgggtatgtaaatatggcaagtcatagtatttgaaaatagtgaaagactatgttcacttgggatttggtaggacttttaaaaataaaaataatagtagtaagcagcaacagactgtaatacaaactaggakgcatgaagattgtagtgctgttggttattatttgatagatgagcactcttgaacacagtttaatccaatttrcttagagttyatatgatattttttgtcatctaagaagcattgaaaaaaatgacagtatgtccaaaattttcagaaaaatcttaaattgtggttctcagggaaacctgtggtttttctcacatgtaaaataagtacaatttaaataataaggtaattgcataatttccctattatgtaattatataattacataataataatgtaacaatgtatacataatgcaacaatttaaacaaaattggagctcaaaaaataattctgaaagaatgaatgagtctataaaatttggtgaatgtacttggctgaatttggataatttaagcccatataaattctacttgtcacaaaaataaattttaaattactagaagtgttattcttgcctttgctcttgaggaaagaacttaaaagttatgggatagcaaagtgggagatgcagaattatgagataatattayttgaattatgtaaattgtttatgtaatctgaatattagcttacttcctaacttttcttaaatttactggtcgccctctgtgacttcaggtagcagataaaaaaacagccctaaagctaaggagagaaggaagcctgcagtgtgggaagggaagccattaaaactttcctcaaagaacagtggcagctatattttgcagagtgctgggaaatggttattatcacatctctgtgctttctggaggttaaaacatttgacagcatgaagtccgattatatataaatttacctaaaagttagaagaaaagttgtattgagaattgagagacaacagagaaggcttggttgattcaaaatttctactagcttcaaaggccatattatctgaaattaattctcttagttattattccttcattgtatattctccatctcagtttagtgtattaaactgcttcatactaaagagtttgcgatacctccaattaacttttgcagtatttccaattagcttttcccctgaaaggaaagaagatgaagaataggctagagaaggaaaggaagtggccccagaaaggttaggtataaggtggtaaggatggaggtttcctgctcaagtccttgctccggcgtcactgtccccatgaagcctaccatgaacacctatgtatattatcctcatatgtatactgcatccagccccttcctcttgcatttccactctcatgtctttatccagagctacctcttcctgtagtatctattgcttcataacatattatatcattttgttatatatcatgtttattgcttattacttgtatctgtcagctaaaatataagctttatgaggacagggatctttacctcttttgttcattgatatattaaaagtgcttagaaaagtgcttggacataataggcatccaaatatttgtggtaaaactgttccataagaaaaaaagaaaaagaaaaagggtagccccacattcccaaagatgtaaatagagtcctaagtactttgaataattcaaaggaattcagagtgaaatttttaaaagaagattattatttccttccatgtactactgtttaatttctatttcagtccccactggggagcattgacactggtcatttcaggaagtaaagctttgatgataagggagcttattttaataaagagagagaaaggaaaggaccaatgcattgacccatggttagggggtttctgaggaaatggctgttcccctgttttatgcagagggactgtggattctgcttgtaccttgtttatttatgggttactagagattggtgagtgtttcaaataaacagagtttattacagaaatttatgtgatttgatttattccaattggragaaacagaatggtgaaacatgaataaatttctacttattgtatctttaattagaatattctgtcagagtctccaaaattttaatctatagatcagtgttgtttcaaaataaaatgttaatagcaaaatgacaaaacataagktatccatatccgtcaaactatttatcccattcctargaatttgttctgtttttacatagaagtgtaagaagctataaagatattcataacattttttatacttgtggaaaaaataaaaacatctaactacctaccaagacttcaatatgtctacaatgcaattttatgcagccatggtatagaagtataattatgatatgaaaagatatccatcaaatattcactcaaatgggttttaaagcagtatgttctatatataagtatattcaagcatgaacaacttgaaaattataatagcagtgattatctcaggatagtggaggcttattttctctttttagtttttcctttcctgtactttatatatatttttacaattagaaattagaatgcagaaaatatatagtagcatttatcagaggataagacaatgtttgtatattacgttttcataattttttgatatctcactgacttttggtattaaaaagacttgaggtcttcgaagagttgtgttgcttttgtttaacagctgtttatgtttggaaaaagggagaagaatttaatattttatgtacagtgctataattgtttgagtagacatggggagtgctatattcactgggaatatgtatagtactttaactgcttagaatatacttttgtacactttatctctttactgttgtgaaaggtgaattatctgttgcttccacttcagaaaagagaggttttgtttgtttgtttgttcgcttgtttgttagctgagtcaggatctggctctgttgcccaggctgaaatgcagtggcaagatcacgcctcactgaggcctcaactcccgaggctcaagcaatattctcccacctcagcctcccaagtagctgggactacasacttgygccaccacacctgcctaattttttttttatttctaggagagaagaggtcttggtatgtcgcccaggctgttctcaaattcctgagctcaacggatcctcccacctgggcttcccaaagtgctgggataacaggcatgagccaacctgcccagccagaaaagagagattttaatgcttatgtgctttatgtgatttgctccggttcatttagctggtaaagcctgggctctgaaatgcagatctctgtgcttacagaaaacatgcttttaaaaaaaaagttatgaataaatgcaggcaaataaattataagctctgaaggacagaggatgtttttaagactatctgcatactaaggtatggatgtaagacataccaccatttggaatttttcccttgagcatacacagatatagtcatgagtggcagctgtgatagcacagcttctgaaggagagaaagcaactaaggactgccttgaaaatatttaaggagttatttgagctgctgtgttgcaagttcgcctaattagagtggctactttcctttgtattctcttggcaatgtacagggattccgatgaattggattgagagtaagaggttgacatccaagctccatgtatttttgtgaagttaacattggcaatgatatctggaacttagttcttttctacagttggccatgtgggtttttttatttacatacatttatgaggtacatgtgcaatttgttacatgcgtagtaggtggcagtgttttaaacaatggatttcacctctcctttgaatgcttgtttgagaaaagtaattcaaatcctatctaaataaatacatttatataatcatgacaacttttaaaaacaattataattttctttcactagtactgtgtatgttttgagctactgtgtttaataagctaaggatatatttgaagattttatcagtccacttggcatctcaaacttaatatgtttaaaaacatctcaaacttaatatgttgaaaacatagctcttgaccttgaccccttgtccgcctccaacaagtctttcccaattcagctactggtgacaacatccttttagttgcttagaccaaaaacctcagtgtcctccttgagtcctctcttttcacaccctgtgtccaatccatagcaaatcatgctgaatttacctttagaatatatatgagtttgaggcatttcttacctgctccacgggttcacgccattctcctgcctcagcctcccgagtagctgggactacaggcacccgccaccacgccaggctaattttttgtatttttagcagagagacggtttcaccgtgttagccaggatggtcttgatctcctgacctcgtgatctgtcagtccccgcctcccaaagtgctgggattacaggcatgagccaccgcgcccagcccaccaacacttcttacctgaatgttggcagcagcctcctaactggtctccctcctctgtcttgtacccctttagtctattttcaatgcagtagccaggtgaatccctttaacctagagcagtttatatcaccactcatgtcacaagtgctcaagcccttcacctctttcaagtaaatggcagttatcccaacgtccaaccaggccaagcactgtagcctcatgttacctctcctacccgttccctgatagctacttttccccctcctctgttccagccacattggcctctgctgtcctctgacaccccaggcatgctcctgccttgccctttgcacttgctcttccctctgcccagaacacaatctctctaaattgctcgtggcttactctcggagctccttcagactttcttcaaatgccagcttctcagtgaggccttcctggctgytgtccttgagctctccactgctctactctgctttatttttctccaaagtataatacttascattatatgttatttattaattttatgttgtgtctgttttcccagaatatatgtattgcaagaagtcagggatttttgtctgttttactaaagattgtacccctagtacccagaacaaygtctggcacctaatagggactcaacaaaacttgctaaacatctattaacccaaaagttatttaatttattatatttaatggcaggtattgtattgagcagtagagtactatgtactgttaatcttgctaaaatatacttaaatatatcattttaatttagggagggggatatgacatcatttctgctctctcactagaattttaggtacatgatgatgtttaaacaaatttgcccaaaaaaaccaaattctatttcagagataaagccattgtttatacaattattatacttatagtagctatttttttaacttcaacttttctcttctgtctttcttrtttttgttttccagaaaagaggcacagttagatgaagaaggacagtttcttgtcagaataatatatgatgactccaaaacttatgatttggttgctgctgcaagcaaagtcctcagtaagttgaatgcaactttccttctttggccaagttacacgtagaagctcacagaatgcatggttcaagatcacaacgcagggttacagaagtggtgcagagcatttgtacaacctgcatagttgtgtggtgggcatccacatatcatgttaggctcaggctatgccaagtcttatttttccttttgcaaattctttagagaatagaaaagagtaaatgtgctcttcttgttgttttttgagacagggtctggctctgtcacccaggctgcactgcagtagtggcccaactccggctcactgcatcctctgcctgccaggctcaagtgatcctcccatctcagcctcccaagtaactgggactacaggcacgcaccaccacgcccagctaattttttgtatctttggtagagacgaggtttcatcatgttgtccaggttggtcttgaactcctgagctcaagtgatctacctggctcagcctccgaaagtgctgtgattgcaggtgtgagcctccacgccaggcccagtcctttgtctcccccaacagaaagccatgtattcaggaaggaaagagaattattgatacttaatgtaacaacatcagttgtggtgtcaagaaaacggtagttattcaagtataatatgtgtttctccaaatctcttttgtagtcacaagttatattaactattggtaaaagaaacatgaaactgagatctaccacagataaatatctttctgaagaaggcaaagttttaaaaatttcatggagaagaagttgttctcaaagtagtatctattattcccacagtgcttaatttttaactgggcyatagtttggatacaatagaatgaagcttttagctttgccacatataactaggaaagcaaacactatctatagtagaataaaaattgttttaaaagattggtaaatgtttaatattaacaagaaaaatatctagcctccagcaatcaaaattgaaacaaacatgaaataactttttttattatcaatttggcagtcttaaaaayggaaatatctagtgtaatgatggagtacagttaatgggaaatcacatacattttaaatgtgatggtagttaagacaacttttttgagaacaattttgcctcrtgaaagccttttaaaaaaatattaaaaccttcagtaatttttcctaaataaattattagatctctttccattaagatttatgtatgtgttttcatgtcagagttccatatattatcaaaaactgaaaaaaagcctacattttcaataagaagggattggttaaataaattattgcatccatatgttgaataagatagcaattaaaactgatacacagcactttgrgaggccgaggtgggtggatcacttgaggccaagagttcgagaccatcctggccaacatggtgaaaccccctctctactaaaaatacaaaaattatccaggtgtggtggtgggttcctgtggtcccagctactcaggaggctgaggcaggagaatggcctgaacccgggaggtggaggttgcagcgagccgagatcctaccagygcactacagcctgggcgacaaagtgagactctgtctcaaaaaactaaaaaaaatgtgatacagaaaatttaagttttaggaaatattaatgattgtttattaagaaaaaagcaggacaccagggtacatgttatatgtaatcaagttattaaatatacatatttatataaagacttttgtatcaaaatattgtcatgtgcattcttgatgattttawaaatctgtgttttttggaaaaaagaagtagtatatcaaatatatgctttaaaatggycaaaattaagtacagggtgagtatctcttgtctaaaactcttgagaccagaagtgtttaggctttcagattttttttggattttggaatacttgcatatccataagaagatatcttgaggatgggattcaagtcgaaacataaaattcacttatgtttcatgtacaccttatagacataggctgaaggcaattttgcacaatattttaaatgattttctgcatgaaacaacattttgactgcaatccattacacgagttcaggtgtagaattttccacttgtagtgtcacgttggtgaccaaaaagtttcaggttcttgagtatttagaatttcagattttcagattaggtatgctccacttataatttgtaatagaagctgaaaaactggttgctttgcttgtaaatgcaaatgtacaccattaacatgtttataygttgtcttctctgatttcattgtattgtcctggcgggatttttttcatatgatctatgcttgccatgcacaaaaattgaagacattttacattacttaataaacacttatcttcattttttctattaacaatatttcacctattatatgctttttttcccctcttgaattygtaaaatagatctcaatgctggagaaatcctccaaatgtttgggaagatgtttttcgtcttttgccaagaatctggttatgatacaatcttgcgtgtcctgggctctaatgtcagagaatttctacaggtaagcaatttgaggtcctatagttaaaagttctgtgtttataactctcaaatatagactctagaatacttttgttcactcagctgtacaagagtgtcttgcttctgaaatggaatcgtagtcacctttttctaattcacataaaatcatcgttattggagcgtctcgaatacattttagcattatattttttctttaacttctggttgctgatactgaatatgcaagttgtaaattaatgttccctgaaraactccagrtggtcttttgtgatctgttcaactgccctttttttggggtaatggctctatatcctagtgattgtggttttatgtgttagacatttaatatggccttattttcyatttacaaaacattcctagtttgtagatataatcgagcaatgtatcagtatttatgaagttctacctggagctcaatgtttaggaaaaagtagtagggttttcaggtgttctgtcaccaaaacatacttaagatccattatcattagttaaatattaattaatctactgtacgagggaaaataggaaacagtccaaagtcagtttcaggtgaaaaagttaaataatgcaatcacaggcctttgtcttacattcttgttaaaattaccttaaaagattgtactagtaaattacacattagatgagagactatttctggattgactatactattttaagcattgacatttgtgagaccctcttcttgaaatgtgttaacattgaaaattatatagttgtttgcaaaggatatttctaaactggctgctttcagcagccagatcttgctggaaaatgatgtcagtgcaatactagctgaamcgaagcccagttttgagggaatgtaaactactttcartccagctgcattattgatttaacagccaaaataagaactttagtgtttaatcaaaatgtctgttgtttacatagtgacatttttcttataaacttaaaacagcattaaatcaagttggaaactggtttgcaatctcctgccatggatttactaaactactggtgtcaaaaaaagctgccacttccaaatgaagtagctgccaagagatatttaaataaaattgaacaggcagcatttaatgggattattttaaatggattaaaatttgatacttaaatgttttgggggattttgggtttttgaatacatatttcactttttagtacttttgttggccactatcaacttatagcaaagtttcaactttcagttgttctgacttayaactctctctctcaatgcccatgtttacataacaaaacaaagattcaagtggttttattaattccttttttttttttttaacctctactcattgtgaccatctgctaagcttgttatggcacagtaagagagcaagcggccttttaggtgtgtttctctgtattccagagctgctttatccaataggacagccactagtgcatgaggctactcagcatttaaaatgagatgtgcaaactggggagtggctcacacctgtagtcccagctacttggaggctgagatgggaggatcacttgagcctgggagatggaggctgcagtgagtgagctgtgatcacatcactgcactccagcctgggtgacagagtgagaccctgtctctacatacatacatacatgtgtacatacatacatacacacaacaaagtgcaatgtgctgcaagtgtaaaatatacaccagatgtcaaagacagtacaaaaagaataaaagatggctcattcacaattttatattgatkgatttcatgttaaaatgttaatattttggatatatttggttatataaaatgtagttaacatagctttaaattatacacaattttattttatttctctttcaacgtgagagtgaaaaatgaagaaactagaaagttagaatactgtagttttcatcaatattttacattatgattcagttcttttattttctcctggttttgaaattatacattttaagggcaaattgaatatgttaaaatactgcttttctaaaaagtagatatttatgttatcattaggctgattacacagaaattaaatggactttttctgtgtgactataaaacaaaatcattaactttcatacattgttttaacatgccagcacacatatattgacatttttattacgtaaattagtaaaatattctttatggtgacttcaactcttcactaaaaatttaaagactttctttctgtttcagtcctggttttaatcagtcacagcatctttagattctatttcccaaatactgagctttgggaattctgccacttttctctatttccccccacacttctttgggagagtctaccattatctagaggttgaatggattccctgcttctcttcatgactcctccaatctcttctccatcctataactctagtgctttttctgaaatgcaaatgtctctcgtcgtatcgttttcttgcttaaactctggagtaattttttattgctcactggaaactgtcaaaatatttaaaacaattgaaacctacatcctttctgcatctttcctctccctctcccccagtccagccaaacttaacctctttaagaaccttgtatttatcttgttcccgctatcctctcagcttttccactgctcttctctttgcctggagcatgtttccagcactttccccatagataaattctattaattctgcaggtaaaattacttctctgggaagacgccactcctctctccaagctctgccctatcctagtcacggtaactaacctctctcttattttcataggacactctatttccccagccacagtagttttcatactgcattatcattcccatttgatggactggaatgtaaacttcaggaagccagagatcatgtataatctcttaatgtttgtaccttcacagatgcaatctgtatatctgagaataaatgaatatcttttttaaaaaagtgaatatttgttgtttgtgcaaaagcagaaaacacacaataggaagcaaacacaccaatagatcaagctgaattatttgcctcaggataacccatttcgagtgagatcctgtaatttttttttacggatgaatcatagattgaaatataaaagaagagacatacactagaccaatttccttttcaggtgaacatcctaaattactgtttattatttaatttacagggtacattgcttgtatctgttgacacttttaaaatggtcgttctgacatttccattttaagcttttagggaacactaaaatagctactgaaatcataacatgggagactatttgattatgccttagctgagcaactctgactcactcatcatagcaagcagaatttccttggaagttgcctgtccacagcctctcagttagatacattattaagaataggtctgtcttatatatgtatatacataccataccattgtttttacttttcttgaaataatgaaagaaaatttctaagtactagacacagcatataataggcaattaatgaaacagtctttaaataatagaattaattaattctgaagtatatgtgtctttataattatttggtccagcctgttttatcaggataatacctcttttgcttaaattttttattcgaggatactgtatagataatatctgtagcttagctccagaaaaatatttgttttctcacatggaggttatcatttccattcacagttgacttaacgaatactaacatatctttccccttgaaaggctttggtgccaatatccaattcatgaccctgcttatgcagtctctcctgtgcttacaaattcaagtttaaaaaatttgcattatgcgtattttaagccacactgagactttaacaaaaaaatagctagaagtcctaaatggataaataaaatataatgggatatatttaggataaataaaatttaggataaataatatttaggatatatttacgataaataaaatttatcctaaatggataaataaaatataaaatttaatggataataaaatataagaaatatttttagagaaaactttgtagaaatactcctcttctctaggcatttcacagtttagaattgattttttcttaaatcaccagtgaaagcatcaacttgtgggctgatgaaaaaagtaataatctttggcatttattctttggttgatttaataattgaaaatataatgtatcaaaaagagaaaaagaagacatttttaaaatttgatttttggatcttatatattttacctgrgtatattgttttaaagacaagaccatatttcagtaagaattttgtctagtttttccacttttttattcataaattgacaataaaatgtgtggttccatgctattgctatagtcaatgtctttttttgcgttttttaatgttttattattattattattatwgagacggagtcttgctctgtcgcccaggctggagtgcagtggcgcagtctcggctcactgcaaactccgcctcccgggttcacgccattctactgcctcagccgcccgagtagctgggactacaggcgcccgccaccacacccagctgatttctttttcttttattttgtattttttagtagagagggggtttcaccgtgttagccagaatggtctcgatctcctgacctcgtgatccgcccgcctcggcctcccaaagtgctgggattacaggcatgggccagagcgcctggctgctatagtcaatttctatctgaagcttctagtgtactgatgaaaagactgcaaagaatacatgggatttgaaagcttcataagaaaatagctgataaggaatgttcagtttaatgttatttctaccttaatccacgctcacctctactctctaatgtcctattgcattatggcacattctattttccctaaattactgcaacagtctctcccatctcacatgcatttctgtagtatgattttgcctcttccttgcgggaggtaaaattctcttttccttgaatctgggttggctttagtgactatttaaccaatcgaatggggcagaagtgagatatttaaacttcctaggctagagtacaggaagtcttggtttccttcagggtatcttggaacagttgctgttgcgatggtacctctagaaacccagacacatgaaatgagaagcacaagccacatggagaggccacgtgtagactggcagatagcagttctagctgggctctcagcaaagagctggaaataactaccagccatttgaytgatccatcttggaaaaccagcctgctccggcattctgataatttcagcccagtttccatctgattccgtcccaagggtagaactttctaatttagccagacaacccacagaaccatgaaaaataacaaataaattattaaagttgtttgacatacagctatggataactagaccactactctgtgcattatttttccctttatattttatgtctgtgttaatatgtgtgtatatgcttgtacaatgagtcaagagctttgagaaagctgtatttgataagataatctattacccctgggaataggagccatgtcagtcccaaacagggctaccaattcaatttcgatggtattacattattattacattatattgtttttacctcccctacaaatttacagagttaaaatgcaattaaaatgagcagcgaaggctgccaggttgactatgaaaatatacgtgggcaaatgcaattttagagaacagttaggatttaaattatgacctaatttaaattagaactcaggtgaatagttagatcagcgttctttcattatttgctggagacactggcttcttcaactaaccttgatatgttgacagtttcagtcattcactcaactcagatatatttgagtttatcaactagcgcctctgttcagcctgccatgggattttcttcaattcctgttggctccaggttttgacttattaaatacaacattgtgatttggccaccaggaacaatctgagattgatgactgatctaattcttaaatgtttgtgcaaagggttattttaggaaatatgaggattttcctgaacagctgtaaaattctaatacttccctaaattatttatatttcttaagaaaaaagagcaccattcactttatttttaactttggaattttaaaaaagagctgttttctcagcatccacaacgccaatttctataatccaataataaaaatagttttrttttttaaaaacttatgaaggaagataagaagtattccagaattgtaaggcttttcagtttgaataactggtatatattttcataatttttcaaaatattgattaattgttacatgtagtattatatagactggatcttttttaacatgagtttaaaagcartagaataagagaaatattttaactgtttttctttaattaaaatatttccttggagaggatgktaatgataaattgatatagctttaamgctatttccatttaaataattttagtgactctggtacagtttctttttaaatagagattttcaatgtttcttttagaaaagaatctctatatcttttcagttgaaaagctatttaattctcaagaagcagctccaggaagaaaaggcaggaaaagtattatgaaagcattcacttcctactccaatctcatgctatttactttggtgtttctcatcatctagggtttgatgttccattttacttaggtcgactttgtttaaatgttttatcttcaaattccaaaatgacttttttcttataaaacttaacaaaatattttttaaattacatgactctcattaaagaatgttggtgttggtcctatttttcagaggtgtgagggatagaaagaaaggaaatactatacctcatcctccttcattgaaaaacaaaaagaggtttgcaatgactggttttaaagatttcttgcagatctaaactgcagtaatattctcaacacagacaactcccttctccccatccactaaaacaaggattcttggatactgaaaatgtttttctttaaaacgttcaaggcaaggtcttacccatttctgtggatcctttaaaaaatttaattagatgtccttgaaacaggaaaatcaggtagttgacttctggggactttgcccctgtaattatgtaagaacttatttttggcatgcatattacaaaaagaaaatgtgcatttattttgaaacatcccaagatctttaaaaatgtgacactttattactcaaaggaatgataaattgtcttttgttttctaaatctgtgaagtgtactatgtctgaaattccagtagagtaccccagaataccagaactaatttttcttttataaatgataaatgcaaggtgataaaataaactagactgacagggagcagaattcctgagtagaaaaaccacattcatttgcttgtagaaaaacaataaaatgatattagaacattaagaaatgaaattattaaattaaaacctttaggtatctcaagatatcaaaatagatgaatggacctactctctatatttttcctgttttttgattttatgaagcctagaagaatgaatcaaagcatatttcagatttacatcattgtttcctgggaatctacttgtgctgcaatrtaagagtttacattttttcagtgtcttttttactttcatacatatggacatacttctttgcaattggccacacagctctttactttctgtaagtgcttctgtgggtatatttagaaataacacagaatatcagttttgatatgaaactcttattccccagaatacattgttagagcaatgtggatgaactatcatctttgtttagatagcattatcaaatgtagaaagggttttctcttggccattgtaagaatctttttgtagcaaaaaaaaaaaattgtagcctgtatatgaggatgacacatttattagcaatataagtgtacttaaatgaaaataacttttaatcattaatctcatttcttgtaatagtctggctgtggtaattactttaaattttgaaagagtaaagccaagtaaggaaggttgtaactcaagaaatcccaagagtattttttatattagatactatctaaagaaaatcaatattacattaagtggtgttcaatcttttatgattcaggagagcactttacttgttcaattaactaatagtaaattcaataacacagtaaatctctggagagttggttactgcaaaaagacagaaaaggtgaacattctcatttggtgtttttggtatcctttggtgagggtgcagtgcctatctttagtgactcaggaagtactgacttggatgattgtgtccactctctgacttgccccagcataagtggtgccagtgacataagtggtgcaagtcgttattgccttatgccatctgcttgagtgaaagtagaaatgttttaataatccagtaaaaaagatgagtatgaaaatgatataagcacattggtacattgatttatgaaatatgtaagcattctgtatagaaaaaatattaaaatgcctttttgaagttattgtttggttcaatttcctttttttttttttttttttttgaggcagaatctcactgtgtcgcccaggctggagtgcagtggtgagatctgggctcactgcaacctccacctcctgggttcaagcgattctcatgcctcagcctcccaagtagctgggactacaggcatgccccaccacgcctggctaatttttgtattttctttctttcttttttttttttttttttttttttgagatggagtctcactctgtcgcccaggctggagtgcagtggcgagatttcggctcactgcaagctccacctcccgggttcatgccattctcctgcctcagcctcctgagtggctgggattacaggcacccaccgccacaccctgctaatttctttttttttctcttagtagagacggggtttcaccgtgttagccaggatggtcttgatctcctgaccttgtgatccgcccgccttggcctcccaaagtgctgggattacaggtgtgaggcaccgcgcctggccaatttttgtattttcagtagatgtggggtttcaccatgttggccaggctggttctcgaactcctgacctcaagtaatctgcctgcctccgcctcccaaagtgctgggattacaggtgtgagagcacgcctggcctcaatttcttttttaagtgagccaacaacacagtacctgggcctgactctattagaaacattttctaaatgcagccacaagctcaattttgactttgtgagaaatgcagataaaaataaaactctctcagtgattttttttttctcacccgattttctttcacaaaatgtttcacaacataagtagaagtataaggggtctgagagggctatgaagcagttctcaggtcgtcccttctaagggaagagtcctaatgagaatgattcatcattggaagaacctctcatactattcaaccaagtaaaacagttttaggactccggggtttgtaggttatatatacctcttcaatacttagtggctgccatattggattacttttacatggcaatagcagcctctagaggcaatccggatgaactgatgtttttgctaagaattagcttgactccatcaggtataattgtggggaaggaaacagtagatgcagacggttcaaaaagtcaccagatttatcgagttgaggaggtcattgaatcatttatctggattagattgtcaaacttcatgacctagctcaaatcacatcttcagtttgaagtatttttaactccattctttcagtctgaattgttggcttcctcatttgctcatcaaaagccactctacacatccatttgtgatataaaccatgagctgcttaatcctcatcatgcagatctgcatccaaacatctaccctgcacccaagcccacatgacacagtgtatgatatataatgcacatacaataacattatagagtgaatgcatgattgagtggatgtgtggaagggacagaaaattaatgctgtaagtgtcctgttagagtattgctcaaatgtggacacccgcrgaatcatctcattctcaccgtagtttcctcccagtaatctcactggatttttctgtttttctaaattgacctctttgagacatttggaatgaaagccatagtttaattttggcatatctccagtactttcattttaggtatgttcttttatgcccatgacattttgaaactgttytgttgtttttcttttcttctctttaaaaataatcaccagttgtgaatagattactacttgcttggtgtatttgttttttattgctaccataacaaatgaccacaaacttaagtgcttaacacaaatttattaccctatggtttcataagttggaagtccattgcaggtcttactggactatattcagcgtgctgtgctggtgggacgggactgtgtttctttatgttggcttttggggataattgttttcttcctcattcaagtattgacagaattcagttccatgcagttatagggctgaggacccagtttccttgactgtcagcaggcagctgccctaaagtcctggagacctctctccagtccttcaacagtctcctacatctcagaaccagtcgcatggtgttgaatccttctcatactcccatctctttgaccttttgtcattgcacrtctctctgtcaccatgtagcagggaaagcttcttgacttttaagtgcacagtcacccatgtgactaggttgggctcacctggataatccaggataatcttcccaactcaaggtccataaccctcatcacatctgcaaaatccctttcaccatgcgatacaacatattcacagggattaaggcaagggaatctttcagagacagttgttttttcagcctcgtctgaaatgtgctaagtgctttatatacatgtttaaagttatctccattttgccagaagaaataaagtcttagaaaaattgggcgaattggctaccttcctatgaaatgacagtcattatttaaacccatgtctacttgatcctaagtcatattgctcttaattcctataccatgctgtgctgtgtgtatatcctactatatatgtgcagcacacacacacacaccccaacatgttatgaactgagtgttatttgaaaaatcatcttgggccacataaaatgtatagcttacaccgtttcttctagtactctttacaccaattagttttgtatattagtaatctgagactcagggaaacgtggcatcttccaaactaatggcaaggctacaaaaacagaaaatatttattggccaatttattagttttcctagactttcaaaatgtagttatttcacagattagctatgaaactccaccttgatgatagcatactaaagaacatgaagaaattacattgttttagtttctaaaatagatttttaatttctaagatattagaatagttaaatagaaatcacaaaataatatgcttatgttttatatgcttataatttgggcatagttttttgagttgacaattaagttttagaattgcagtataaacagaagggaaatgtgtgagtcctttggccattccctgttgttgatcacaacacgtagaaacagctgccccaagctcttgtaaatgtatctttgccttagcccttaactatgtttttttctgttttagccatcctttttaatcccacttgtttatcttttcttaaaatgtactaactattcatagctgcagatatttttcttaattctgctatcttagtttcattttctctgtggcacttgctttacagatatctcagtggagtgaaggatgtgctacatgtgctgcttcgctgatctgcccactagactccgatttgactcgttttcatatcttgctttcccagagtctgctgtcattgcgaaagcattgtttattggtctccctttcttctttgctgcagaaccttgatgctctgcacgaccaccttgctaccatctacccaggaatgcgtgcaccttcctttaggtgcactgatgcagaaaagggcaaaggactcattttgcactactactcagagagagaaggacttcaggatattgtcattggaatcatcaaaacagtggcacaacaaatccatggcactgaaatagacatgaaggtaacaaacarcaatggagacttctgaacacagatgacatmtaaaaatattttaaatgacactctctaaatttacctgcagttatcactgttagtgctcttccctggaagtatatataagccaaaacagtggaaagaccagcaatcttctatatttggcctgggagtgcattatacaggatatttttttccttctggcagcagatttttctttctaattatatagtgttcaaggctacaagaaatttactttgcattccctgtgaacacacaccagctgggaagcagaaggatatgtgacgactgagctgtgggtttcagcatgcaaaatatccataatatggatagtcaaattctaaggcaatataaaattaagtattattttatagatcattttctctttgtcgatttttgtctgcccygaaatatagttggaatgtctaattttgtgaatgaaagtgtttgtttttgtttttgtttttaatcaagttacttggtgaaagaagccaggtctggtactttaaaaattgtgctgttattgataatacacactcttagttttgagtgatgatttcaaggtactgatagggcaaccgtacaacaaagagaaccactgtttctctttacctctggcccttacggtttctcccagtcaggctgctttttatgtgttcagcatgttcatacccaagagtcaattctcagtagctttaaacttgaggccaaagtggggagatagatacctttttccaacctttctttgtttatagaaaacctawtagacagttctttcttatagatcatagatatattgtaacacacttgggaggtctaaaacccttaagtggagtattatccaaaattaaaatagtaacatttaaataaattagaaagatattccacatatttaatctagtaaagttatgttagagttcatggttttctttctttcagaagttggtgttagttcttacgtggcacyttttggtgatttccaggtgcatcgttagttttctacaaccattagtaatggcggaaaccacgattactgttgcaccaacctaatagaaagtaggactgtgtataacatggcattatcaaatgcagacatttaaaaattaaagccttgggtaaagtatcacaattcatccatgattgggaatctcactggtattcaatcaaaatagtatatacctcacatttccaatctttttttttttttgagacagagtctcactctgtctcccaggctggagtgcagtggcgcgatctccgctcactgcaagctccacctcccgggttcacgccattctcctgcctcagcctcccaagtagctgggactacaggcccccaccaccacgcccggctaatttttttgtatttttagtagagacggggtttcaccgtgttagccaggatggtctctctctcctgacctcatgatccgcccggctcggccttccaaagtgctgggattacaggnnnnnnnnnnnnnnnnnnnncgcgcccggccagtcttttgttcttgacattaaactaacagtatcgcctgggcgcagtggctcacgcctgtaatcctagcactttgggaggccaaggcggggggatcacgaggtcaggagattgagaccatcctggctaacacggtgaaaccccgtctctactaaaaatactaaaaaaatagccaggcgtggtggcgggcgcctataatcccagctactcgggaggctgaggcagaagaatcgcttgaacccgggaggcacaggttgcagtgagccgaaatttcgccactgcactccagtctggttgacagggtgagactccattatcaaaaaaatagaraaaaaaaaaaaaaataaagcaaaacaaaacgaaaaacaaaaaaaaaacacagcatctatactgagtgaacgtatatgcatattgtatgcactgttggttttatttttatttaaccagactgagaaagaggtaggttcrtagaaacttcagaaagaaacacaaattaggacacacttggaaactactattactgtggtattagaatctttggcatgggagattgatggctttagcaaactgtatgaaattcaagtatttacttaattatatggttcactttataaaatatttaaattctcttctgaccatttattcaagtgcttcaatatgaacttctgaaatatttgcattttataggtatattttatgtgtttaattttttcaaaagcactgttttgacttctcgagggattctcacattaagtttatcaggtccagagataccagacaatttgaaccacatrgttaatactagatcatgtcataaagtgatataccaatgagaagttaaaaatatgattagaaaagctatttgttttgccagtttgatcaaagcaaaaaaattagaattgaataattaattcataagtttaggatacatataattcaatttctctagttaaatagaaacagagtagaacatcaaaagtaggcctgtcatttaaggttgactctcttgccttgtctatgagttagggaaatcaaccttaatgtggtaaaattttcaaattataaataaggatactaatatttaaccagtatagtaagttattctgacagtgaggtagtaacatcccagttttgctacaaaatatatctaaaagaatatatacaatagcatctatagttattgtgatttgtttttaaaaattgcagagaatgcgacagggtactcctgaaaaaaaaaaaagaaaagaaaaatgaacaacattttgtttttatttagctgtaactgaagaaatgttgtcccaaactttttctgttttgggtctggttgcmgttgagatcgagttttccctttgtaagagggctcattgcttgcaatttcttaacccaaaaagaagaggaaaatctatactttaataatgtatttgcctgtgaataatactttagaaaagtaggatttttttacattatagatattagctcacaattacgattacttctttagaatgaattcctagatttgcaattaaatcaaagaatccacaaaattttaaggaatttttatgcctattgtcaatttatccttcagaaagattaatcaaaataccccctcatcagtggtatttgagatgcctctttttcagtaccttacccaatttaatattgtaacttttttttctttttttgagacagagtctcgttctgtcgcccaggctggaatgcaatggcatgatctcgkctcactacaacctctgcctccccaggttcaagcaattctactgcctcagcttcccgagtagctgggattataggcacccaccactgcgcctggctaatttttgtatttttagtagagatggggttttgccatgttggccaggctggtttcaaactcctgacctcaggtgacctgtccgccccaccctcccaaagtgctaggattacaggcgtgagccactgcacctggcctggtattgtaactttatgtatttgatagttgatggttaaaaatgacattgcatttatttttgaatatgaatctctatcattttatttcccattgttttaaaatagtattgtaatcttatttgatagtgctagcttgcttttagctggctttcaggttgttcactatacaagtgtgcttggctaagaaggcagagcccacaagtgctttttttttctaattctaccaaagagaccatataggatactggggaactgataccagatttgtaattttacaatgattattcaatcttcaaattttatagatcaaagtccagaaatattttcctattttagacatatggagtatttgcatatatgttttgaatttttgtaattaatcttctaaatgcagtattcataactcattttttatatttaggtatttttattaaactgaaatgaagacaattcatgccatttccccctttgatatccaggttattcagcaaagaaatgaagaatgtgatcatactcaatttttaattgaagaaaaagagtcaaaagaagaggatttttatgaagatcttgacagatttgaagaaaatggtacccaggaatcacgcatcagcccatatacattctgcaaagcttttccttttcatataatatttgaccgggacctagtggtcactcagtgtggcaatgctatatacagagttctcccccaggtaaaatgacagcatacttccttggggcctgagacaaaagcccatagaaatactattgttacaggcagccatccattcatttaaccctctgactatgtattaggtaatatgcagtttattgtaagttacacaaattgtttaattgtgaactaagtgtatttgagcataccacaactttccctaggacaactatttttttataataatcacatacagaaacagtaggaatgttatgtaagaatagtatacttgttacagtgaaaaaaaatgggtaactttttagtaacagtcacctttcacatgtttatttattcactgaataaatattcattggatatctaccatctgtaaatagctttaaaaatcaactattgatggtgttaagggaaaaggggrgattttaaaaagaactaaaacacaaaatgatagagatgatgatggattcagtagaaaaagcatcaaaggaagcagttgggatgatgatgagaaactgctgttgacttctatgacagatccattggtaaaatcctttatgcttactctttttttcttaaatactaacttttggagttgtatatggcatacgtttagagatactttttgcttrtaattaaagagacttgaaaattcaggattagcccagttggatcaggtgaaatggaagcagagtagtgtgctgtcctggctctggtattgactctacctgtcccttactgtatgaccttgaacttattacttcacttctctcagcctgtttctctttgttctggcatgagaatagaaagcatatgaaaaatacttagttcattgtaagcaatcaatcagtgttacctattgttttcacttttagccctctagataaatattaagagagkgtttgctcatgtttttggtattttaatttcatttcaagccatacacatttaacataacactgtacattttaaaagataaattttcattttttctccttctgaaaatgcattgtaaatttatgctagcttacatttgaatattagtcatctgaatccatatcagatttcatgttcttgtaactatttaatgtccatttaatcactgagttgtatagattgagatttgagttgatagttcagctaagtttcccttgaattataataattataattttctagttttaaatataactgagctgatttaatcaagcgattaatatcaaagtataaaaactattttaactgatgtgatactctttgctctctatctatattttagctccagcctgggaattgcagccttctgtctgtcttctcgctggttcgtcctcatattgatattagtttccatgggatcctttctcacatcaatactgtttttgtattgagaagcaaggtaatcaagatattatttcattaaatgtgagaaaggtatgtcacaaattagaagtattcaggggggaaaattatcacattctctgagaaagtatagagagataaaacccagacctcaaaggaagatctatttaaaaggcaataacattgatttttggtttgcctgaggagcagtggaactctatcaactgattaaaattaacagaggtaaattttagagactgtctttctgagacggccttgtttcacatcaaaaaaccaacatcttttactccctgtacagctacagtgccttattytagaaatcagaactaaaaaggatttttttttttggaacttcactcaaaaccacttatttattctttcttaaattgtctattgttcttagtagcgtttttgtgggtgaataaaagwgatgaaatattcacacagttgataatttagatagtgctgggatctcacggtttctgttcttgggatagatacagcaaaagtcattttcctagagtacccrttgaatcctttctgtatttggaactgactgtttgcagctgctctatgaatacagggtgggagaatggggaggcttggcttattctttgagagtctggtaatgtatgttggaaccataccggaaaatcagggggataaaaaagattcacaaaagcttgaaataattatgtgaagagtagcacagttactgtcctgaattcagacgggacagtcacttttctgcagtgttgcaaggcagccactaggcttattacaggcagaactctgacagaaggccctctcctgttctaatgatgcacttattctgctttgtggtttggtgggaaatgagatatgcgtgtccttgttgctgaattcttaggtagggagaaaggcattcattaatggttgtatcttgccttttcaaggaaggattgttggatgtggagaaattagaatgtgaggatgaactgactgggactgagatcagctgcttacgtctcaagggtcaaatgatctacttacctgaagcagatagcatactttttctatgttcaccaaggtaatcatttttagattaattatagtggctatcagtacctatctttagctaacaaaggaatgccacaatattttattccattaaatttacatattctctgaggtgtaattagattttacagcccttgttgtgtattactttataacaaggataatcttatttaatatttgctaataaactcagaagaaatcacatactctatgttatttgccatgtcttaatacatttgtggagtgtttatgccattacgccatgggacaaataatctgcattaagctaattctatagttttggaccttcaaaataggcattatgtagaaaagtgattttttaaagcagctaataggatggcataataaatacattggtatatttgacatcaaaaattatcttttctatagtatgttagcaaaaaatctaaaaggtctctttctgggtttgaactattttaaattaaaaatatttacctactctaatccaaatacactgttccaaatatattattcaattaaaatgtatgtaaaatgtgatttttaataaacgtcagagaaaaataaaactatagattgttgttttccaatttaggaaagcattttactaggagatacatgggaattcagaaatataaaaattatgtctaaatttgcttcagaacaatagaaaagataactgtggggattattgtgagatgatattctgtgtattcataattttgtataaacaaagtgtaggtgcattatgtagtaacacagtcaagaaggcatgttttggtgagctattggttaaaaatttaatctgaattccaccatgatcacttttcacttaaaaatgtggtcttaaaatttctgaaaaatgtaatacactttgtaacaacctcctgttatattattactattgtattatacattacataacaataatatataaggccaaataagaataatatattgttggcacagtagttcacacctgtaatcccagcactttcggaggccgaggtgggtggatcacaaggtcaggagttcaagatcagcctggcaaacatggtgaaatcccatctctactaaaaatacaaaaattagccaggagtggtggtgggcacctgtaattgcagctactagggaggctgaggcaggagagtcgcttgaacctgggaggcagaggttgcagtgagccgagatcatgccactgcactcctgggcaacagagcaagacactgtctcaaaataataataataataataataataatatatcgttaatttttaagtacatttaagattaattaaatattatttaactatgacatataagaataatatatcagataatataaggatatggatgtcttttccctgagaaataaatatcaggaaaataaaagaaacaaaactaagaaacataaacgctttttaaaaaaattattaagctacattgatctaaagatgtcccatctgctatcagtaagtgttttcttcttctgcctcttcacaggttgagcttaggagaatgtcagcttctcattaggggcaatttctatttatggaaagaaaggttttcttcagaaataaaagcagaaaatttggagtttatttgttaattcccatatgcagacattggtcacccagtgagaaaattgcagattgtcctatgagacatgctcaggtgtgtaggaagatttgtactcacactacataaacaaagatcaagtaaaagtagttttacttgtaaaataattctaagatgattagtttgaatttagaaaaaacttaatggttcattaaaataatgatatagggcatttttagaaccacgagaccgttatgatttaagttttgtaactcagtatgagcatttttgaccattcatttttgaacgtacaatcatgttttttctctgctcatgggcaggtctcgtatacctttggccgatgatctggcttctttctagatgtgtctttttctgcaagtggatttacatatccattttaacgaaattaaaagacaccgtgtatttcattagtaaaatctttgattgttttattttctttataggtatgctaatttttgttttgctttatgaacattgctgctgagaatatattgcattaatccaaaattctgcaaagtcaccccttttaaagaattttggataggattaattcaaaattcttcaaattattaatcccagattctccaaagacataactaaattttttccttttagagtaattattattcagagtggccagaagtaatgactttgcattaaaaaaattcaagccaaagatataaccttatgccattttaaccarttaggttttgttgtcgttgttgttgttgtttgagatggagtctcgctctgtcacccagactggaatgcagtggcatgatctcagctcactgcagcctcctgmtcccgggttcaagcaattctcctgcctcagcctcccgagtagctgggactacaggcgctagccaccacacccagctcatttttgtatttttggtagagacgcgtttcaccatgttagccaggctgatcttgaactcctggcctcaagtggtctgcccacctcgcctcccaaagtcctaggattacagatgtgagccactgtgcccagcctcaaagagtacatttttaaaaagcagttaactttttacttgtcagattatcactaaaataataaacattattatgttgttggaaaaatgacacaagttacaatgatgacgcataaaattcagcaggattgaataatgtttcaaataaatgagaaaaatttgtcaaagtaaaaagaagacatgagagccagaagtaagaatgacacatagttttagatacataaattacatgctgaggctgggtcataaacgtggttgggaatttttactcattgtttccaaaagggaaaaataagcagttacaagattcatagaatacagaaagcaaaatgaaagtttctcaaaagaagcattattattcttgagagagagaataaagatagatttttttcctctccttatgatgagaaaaaatttgagaataataaattacagcctgtgttaaatacctcarcgtttatcatagagatgttttctacatgatcgtttcaatttagactgatggcaccaaaaagtgcaacctggcaaaaatgcatctcaagttcactgctttttggtagatgcttaaatatctaagagaataaactcacaatcttcgttcaattctccataattctattgtcttcagcctgatgttttgaatggtaggaggtggcaggatcagattccttgacagaaatcgggatkgcattgtcatgtatataagttgagactgatcttgcctcatttctccatatgacagtgtcatgaacctggacgatttgacaaggagagggctgtatctaagtgacatccctctgcatgatgccacgcgcgatctygttcttttgggagaacaatttagagaggaatacaaactcacccaagaactggaaatcctcactgacaggctacagctcacgttaagagccytggaagatgaaaagaaaaagacagacacgtaagaatgtaacgcttggagcactactgttattcataacataatgtgactctactatatttaagtttgagaaccagactaaaaagccatgtgacctgtaatagctctggtgtagtaaataaaatctttcacattgcttttaaaaagaaattatgcttaaggaaataaaccagtcttaatggtrgtggaaatatgtctgctatttttagaagccaagttggaataatataggccaaaatatcttttggaaaatcatgagaataactcaaattcaaatttagttcaaaaattgaagtttaactatcatttattcctgcattctttcatacaagagttatatattgaccatcttcagtatgctgggggctgccgcgtgcagagagctgctctgcacaatgaacttaaccactggccattacatgtttaaaaatttattttctgggaccttgaatttaggattagaaagaaatgaatctgacaaattgtaatattatatgtaatgacaacaattayatctatagtgacatacattagcaaaaatatcaaaatataaaacatttctatgagtggtggattcaattatgaaatattgagcaaggacatgaaagataatacttgattttcaagaaatgtatttaagtaagtacatagcatgcatactacttggccttgctttcatatgctaattaaacgcacatcactgacatttataagctattttacccaggttcttatgtgttcgttttttaatgtttatataaacatttggcggagcttctaagaccttaggactaacgttcaaagtcacatgggtttgtaggtttgagttactcaatattctgttctggctgtttgtattagaaaatcatctaggtttcattttttttgtattgtgactcaatttgctaatatctacattcatgataaatagataaataaccagcactataaataacatagcctttaaattatgacatatgcagatattctgtactgaaaaagctcttaattcacttcttttcctaaattgtcagcttaagcagagtattagcttctcttcctagaccaggagtccaaaactgggagttgctgggagttaaacagcrgccttgtctttaatacgagtagctgataagtacttattacagaactacttctttgtttggattccccaaggtgggtttcacattcaggaactatttgcaccatttcgagttactgtgcttcaaaaatccttatattattttttagattattagatttagaatttggtttttgtagatatttgggtttcaaggtgatgtcattagaaaccatttactattaattttctttaaagctaagtagttttactgttcatacttactattcaaatatagctttaatatttcataaaacattcaatgtttaaaagttgaaaatgaaagaccggagaaattctactatgactaggaaaaacattgagagctcagctccattttgcatatttaaacttcccacatatgcccttttgctttagagcaaaaggcaggaagaaaaaggcaggarggcttcatttgttcctcttcagtcttccaatccagagcccataggtctagtttctgcttctttccctctaaattcaccagctgtcatcctcctcctgtgtgctcacatttgtcccttagcatgatcccatagtagtctcagttgtacctaaagaaatacaataatttattttctagaccaacttcctctggttttatcagtttcttctatggaggagtgaggcatgaatgagactggagagaaattctgcttcttttaatattacttaccaaaaatagagacatatttcttattctaagaggcaaacctgtttccattattgtgctattcataccatgttttaggtgctggtaatgacagtcttcatactgtgactatcgtaatagcagggtcagaatacaggactacaaatgaaaactttgattttctattaccagtctttttgttttgtctgtttgcttggcttattttgatttggtttgaactagtttgggcttgcggatgtcttatgtgattaggatgaacaaataatttatgttttctgtaaatccttgcttataaatacagctaatrtttgatgctaattttagaggatgtcctgctagaatccaggcctttaaagtacaaacgacactgatgctgtgtgaaaaggacagcagaagcactaaaggctttcccagtatttcttacagtggctttctgctgatcccactgaacagattgctgtattctgtccttcctccgtctgttgccaatgagctgcggcacaagcgtccagtgcctgccaaaagatatgacaatgtgaccatcctctttagtggcattgtgggcttcaatgctttctgtagcaagcatgcatctggagaaggagccatgaagatcgtcaacctcctcaacgacctctacaccagatttgacacactgactgattcccggaaaaacccatttgtttataaggcaagtgttctttatygctgactgcagagctatccagaggctggcgttctgagactcccctccagaggccatgtcatcacagctctctgactccagcactgcagccttgagtacagtgagcctccatgtattcactctttaccatgttcttaaataattgcctcttgttataaaactgtctcttccttgtaaccacaatgaatgtttcatgaagtgggtgattccctggttaaaatgaaatgttcaccatcttatttgcacttaggctaacaaatctggacaggctgtttatcacatgtagtataaacatagcattcattttagtcctctgcaagagacatttttactgagatatataaatgctttgtacagtaaagaagtcatgaagcatgagaaggactcagatttgcgtttagataacatcaacttgaagaagataaacatttataaggcgtttttgccctttgtttcatttagaaataaatataatattggaaaaaagaagtcagtggaatattgctacataaaggcaagaatgttaagtaaaccatctctagatatctggggtaatataactacacaaggactatttattttatagtcattttctgaggtacactctagcatgtggtgagcacatcatacaaacaaatgattaatgaccgtgataaatcactgaacttgaaatggtggctctccatgccgtcaagccatcactgttttaggtagaaatgtaaaaaattattcttctgaattataaagttatctgaggtgagaaattaattgcttactaaaggaaaaataattctatgtctgtacctgcccgtcatcaaagaccccaagtgtccrtcatgtgtgtaaattataagtaattgcaaggtttcattttgttggagttgaatatattagaattttaagagaattaaagggggagggaagcttaaagttgctggtagacttgaaaaaatatgttttttgttagggtaataaatgaaacagtcttttttatgctaaccgtgaacatctaaatatatgtactgttaggtggagactgttggtgacaagtatatgacagtgagtggtttaccagagccatgcattcaccatgcacgatccatctgccacctggccttggacatgatggaaattgctggccaggttcaagtagatggtgaatctgttcaggttagtaaatgaagtagatattgtaataatggtatgtaaacctttttggacaattgattcatatcgttgtccggaaaatcattaacrtgtataaagaagggcatcttgacaacaaagactatagcatttcatccagcccactgtactacattctttcatagacatggagatttatctacctgtttgaaattatctagtccgtttcatgtactgaaagtcatggggatgagaaaaaaacctcttgtaccttctagtttattttttaaaacctctttcatgtctcatgtaagttactagattcacatctttgaaatcttcagacttcaaatgtttctcttgagataggatatttccctggggagatagagatttcatggagggcttttgaagttgtccataatatgcttgaaattcttatagacatctcttacgatgttatatsatgactctacattattctgtaatataaagtaagcaaaaattcatgtgttacaggaacagaaaaccaaacaccacatgttctcactcataagttggagctgaacaatgagaacacatggacacaaggaggggaacatcacacaccgggacctgttgggagtttgggggcaaggggagggagagcattaggacaaatacctaatacgtgcggggcttaaaacctagataatgggttgataggtgcagcaaaccaccatggcacatatatacctatgtaacaaacctgcaccttctgcacctgtatgccagaacttaaagtaaaataaaaaaaaaaaaattcatgtgttagtgatcaaaatgattgaagcaaagctttcttttttgcagataacaatagggatacacactggagaggtagttacaggtgtcataggacagcggatgcctcgatactgtctttttgggaatactgtcaacctcacaagccgaacagaaaccacaggagaaaagggaaaaataaatgtgtctgaatatacatacaggtgagagaaaatgtcttggtatttactgatttgcaaagaaaatgtgtctttgcatgtggtttaattctctgagagattttgttgctttaacagagttatcaccttcactcttccccactgcttgtagagttgtttactttttatttgagaagattgtgtcattatttccattttatatgatttcacatcatcttaggaaatcctgatatgatcattgtttctaaagctttgagttacctttcagtacaacttcagcatttgttcttgccatcttggtttataacatgatacatgtcaccttctctataaaacttgtgtatacttctctctctactccccttcccttgtcttttagatgtcttatgtctccagaaaattcagatccacaattccacttggagcacagaggcccagtgtccatgaagggcaaaaaagaaccaatgcaagtttggtttctatccagaaaaaatacaggaacagaggtatgactaatcaaagtgtaatttgcgtacttaagacagagtataagtatggaaaactaaagcaaaatcactgaaaatgtatttcatttgaaaagaattcttgctaacagaaattaacttctaagtaaagcagtggaaataattgaacattaatgagccaattacaatcataagtactttttaggggatactttagtgatttttgtcctctaatgaaatgaaaaccaacagactggattgagaaggctgctttttttcttgctgttgtggttgttttgctcttcctctgtagtctggctcaaaggtaagtgggctgtgaggggctcccctgacccctttcctcagctctctaagttggctctgagatcaccacagataagggctgtggttcatgggaggtttcttaaccatgaagcttaagatccttttaaggggcaggctatctttctatggagtgattggggaattttggaaatcctagtccctcatgtgtttctcctagatagatgagtgatttttaacttgctagaatctgattaattccttagggaagatttaagttctttctactactatggttatactccaggcagagcccatgtgctagaatggacttcagaacagtggcacatccaaagtggaatcacacctctcatagaggccttgcacacactaagatcatggctagcctcttcctagccttttgtaaggagtggcatcagaagcaagtttgatactttgttaccctgttgatgtgttgtttcctcatgggggataagactgcatgctcatatttctcttttagtgtgtataaactctctaaagatgcttttagggcataacaacttctaaagggaatagaatgccagggtttgaaatatttatcttctttcacctggtttaacattaaatcattttcctatgaggtggacatgcttattgatgttcttctgataaactaagccgtaattacctcaaacattggtcatcttagtcgtgcggtcctgtttttcccagaattatggtgggaatgatttacagaaactgtagatgtgaacgtggatcacactctcataaagagaaaaatatatttaattgatattataaacctcactatcactgtaaatcaatccctcttttcttctgcctatttaaggaaacaaagcaggatgatgactgaatcttggattatggggtgaagaggagtacagactaggttccagttttctcctaacacgtgccaagcccaggagcagttcttccctatggatacagattttcttttgtccttgtccattaccccaagmctttcttctagatatatctctcactatccgttattcaaccttagctctgctttctaktactttttaggctttagtatattatctaaagtttggcttttgatgtggatgatgtgagcttcatgtgtcttaaaatctactacaagcattacctaacatggtgatctgcaagtagtaggcacccaataaatatttgttgaatttagttaaatgaaactgaacagtgtttggccatgtgtatatttatatcatgtttaccaaatctgtttagtgttccacatatatgtatatgtatattttaatgactataatgtaataaagtttatatcatgttggtgtatatcattatagaaatcattttctaaaggagtgaattctaagttttaggggaaaaaatgcaatttattttcagactcccaaagtaagaattaacatatcatgctaagaaaatagtgactattttgaagtatgctacttccctttcagaaatatagaatacacgtttctgttattaaagtatttgattactaattcaaatcatatggcaattataattcttctaaaatgctatcatttgtaactgtatcccctgtattaaatctcattaaccacaggcagctgttacagaaagctgcattgtttcacattgagctgttacattagttcaggctaaatgttgggmgctccaaccacatccaagaataaatctggaaacacactgctgggayactgctgttagagcccttcttggccttgtaktcccagaaatgagctccctttccttagcttagaagaatgtgattatatccaggacatcatgttcagaaaacttagtttactttcagcatagaatgcattactgttggaataattggcctctagctcttaaatgtctctgataacttattaatatctatctttataaaatagagtgcaactacttttgtgtaaaaatgtttgcctttaaatttagtatttcatatcagcacatcgatatatgtataaatgttccatgttaatgtgtaaaagagtctgtaataaattatttttttcacgtgtctctatacagtttttatttcaataaaaatattaacattatttttcattttattaatgccattattttgtaaatacattttacaattttgcctatttgctaccattataaattttcactgactcctcatagacagcatattcttaaatgctatatttctttttaataccaacagagtgacaggaaataaagactgggcatggaaaggggaaacagttaaatattgaatgtcatcagcttatttaaagagctctgaatcatttagggatgatagacatgtatacaagtaatgaaaatatgcgatattcataatgaagaaatatattcaaatgcagaaataatacttagagaaagagtaacttgaaagaaaagaggtgaagtggggatagttgttatgcttattttggggggagagttaggaatactcagaaactacattgacactgtcatcttcccagaatcctgcatatatttatttagcatctactttgggtaggyactgctcaagatatttgagaaatgtcattgaacaaaacatctctgcctttgaatacctcatattccaatttttacatcttgcatgtttttaaatctctactttattccgccaacactcttcgaagtccaggcactcatcatgtgtaacttgaacaattgcaagatcttccctataaatctgtctatttcctacctttgccacctccattccacactctcaaattgctgccagagtggtcttttacaaatccaaattgctctcctgcgtacaatcacttaaatgctactcattgtctgtacaccttagcaaagcatgtaaacattgtcaccttaaccagccttatctgctagttgctacctttgtaattctatgctctgctctgtctgaataccctctacccatactctgctgcaaattcatttcttgctaagactcagctcaatatcctcttgttggaaatttccctgttaggaaagtttagcttcccctattgtcccaggatctttacaatggttcacatattatctgtttatatataggattccttattaggctttaagtttcttatggctaaattagttcctcttacaccagatattccttgaaccttccacaaaataggcacttgacaaatatttgttgaacaaaggaatggagggagcagcctcttcgagcagtggggctagaagccagatttaaagggaaggaggaataagaaatgagatagattggagaaaagaggaggcacaaaaatggcactgttaaacttgtgcttagagaaaatcatgctgacattggtgcaggggctaatttagagggaaagagcctggtttaaggttggcattagggggctactgtacttcatgcataggcctgctttaaggtgatggcaggacaggaggctaattgaagagcagtcaagattcacattaaaagtgcataataacgcacaggccaaaggggatgagaaggttagggccaagtagaaagcttctggcttgcttagtgggtagttgatggttccattacacgtggtggaggatgtagaaaggtaactgagcttagaggaaaggtgcctaatattaggcatggctttgaagttctggtgaatacatttttaaaaaacaatgattttcaggtagcattaatgcgaggagagaatagaacttttttttccaagttgggccaaactgctttgaatttccaaacaacctgttactagctccatgatattggtaaagtcatttaacctttgtgtaacctggttaggtcattgtaaagacagagattataataaccactcactagagttgttggcagatcaaactgaaatacgaagaagtcagaggagttggaactttggcttgccatttcagaaagactaaaaggtaatctaagaaatgaaaacttacaaatctttggtaacagatattgttatagttgaatcatggacagcacatgtcatgaaaaaacaggagggtcaacaagaaaaatcawtaaatacatttatctttgccaattattgaaacaaacccagtggaaaccaccaaaaaattagaaccaaatgttgtgaaacgataacagtttatcagtttgaactgaattgttttaaactttaacaattaaataccattttaaaggtatgtatttttaattatataagttatatatttattatattatagattacatatattatatgtatcttagcactaattcactatttcattcagtttaaatctgtatttgattcaccaaatgatatgttctatttcctttgtcattgaaaggaaaaataatttgcttacctccctcataggtttctttctttctttttttttttgtaccaccctcactaatggtttatagaacctctagagggcagcagagaatgctgtttgtaattgaaatctgaaaaagaactgaaaggagacattctctcacaggacagagttcatcttgtctcctagctgtcacttcctgtgtgcaaccttgaattcactccttccactctttctcaagttcaaaggaatataataaaaataattatttctactcattaagaccatttgtatagcatgaaatctatccacacgtatcttgctctgaaatgtcaccaaaatatttcctgctaattctgcaggaaggtaaaaacatttgctaaaacaagcaatttgtaataggaacaatagttttgtacaatatttttatgagtaaactaacttgcttgtagctcatgttaaaagttattaaatagaaataggatactatttacttataaggataaaattggaaaaaaatttattttacattaatagaaaatgcttttgtgattcttccttgctacttataccgtatcaaagagaagaaatatagtgtgagttaacaaaacaaaatttaacaaaaaacaaagcaccgtacagagaatcaagaacctgagtccaattctggtgaggaaatcttgtggcctttacaagtcacttaactttacaactcagttacctcatctgaaaaaaaggagctggttaaggtgatatccaaactaaattattgctccaaaattccatcatttcgttggtaacaattccagggtttttgtatcagaagcattctaaccaaagtgactccatctttacagaggctgggtaaaatgaggctgagacctgctgggctgcgttcccaggacgttgggcattcttagtcacagaatgtctacagttaagggaataggttaataatgtttaccaaacagacccaggacttaacagacccaggaaatgtccaggtgtcccaatatcttaggaataaatgtattcttaatttaagaatacgttttgctttaaagataataatacagattattgtagaacagtagttaagcaaatactcagctgataaaacaccatgcagtaaagaagcaggccgaaacccaccaaaaccaagatggcagtgaaagccacctctggtcatcttcactgctcattatatcccaattataataaattagcagtttaaaagatgctcctactagcgccatggcagtttacagatgccatggcaacatcagaagttactctatctggtctgaaagggggagtaactctcagtcctgggaattctccactcctttcctggaaaactcatgaatattccacccctcgtttagcatttaatcaagaaataatcataagtttactcagtccagcagccatgccactgctctatggggtagccattcttttactcctttactttcctaataaagttgttttcactgtactctgtggattcacctcagattctttcttggatgagatccaagaactctctcttgtggtctggatcagtacccttttccagtaactcttgtgctaggattttggcctgaaacttttgggaatacaatctaaagttttgacaatctagtagtgttgaatagatcaaccgaaagactgaaagctaacttccaagaaataaacaaatctgaggtaaacacttggtgaggacttttgactccaagctaaaatcaaaatgactaaggtcctgattagtgtatatgagtattaatgttatgtatgtctactaaaaatgtgccctataatatttaattatgttagctaaatttaagtgtttaataaacagtcacattcttgatgacctgaaaacaaggagagaatgtatgtctctatttcaattatatgtactcacacaattgctgtggtacagtctatcccaaatagggcttaaatataggggccaggcatggtggctcacgcctgtaaaccagcactttgggaggccaaggcaggtgaatcacttgaggtcgggagtttgagaccagcctagtcaacatggtgaaaatgtctctactgaaaatacaaaaattagccggatgttgtgatgggcacctgtaatcccagatactcgggaggctgaggcagcacaatcacttgagcctgggaggcggaggttgcagtgggctgagatcactactgcactccagcctgggcgtcagagcaagaatctgtctcaaaaaaaattacaggtaaaaaatatcagtgagtattacatataggttggggtttttaaaatgttattcttatgaaatatatttcccaattatgtaaagtagtgaccacagttgcctaccaaacagttttagatcattagggggaaaggagtcacataaaattaaagtattaacttagaaaacacttttaaactgttgtaaatactgtcccttttgtggttttctgcatcacatgaataaatgtcaatatattaataatttttatatacccatgaatataataccatcatattgttctggacaacaacagtacctaaatctgacactgtgactacatacagttttagatgtactagtacaaataacgtaatcaaagatattttgtttatttttgtgtaaaaatcattacagtctaaggcaggcatgggtgaaatcagcgactgagtcctctgctcccgggcaactggggctctgaagagkgggggtcaggggagtcccctgagaagtttgtgtcctggaatccaagacaaggtgagggcagggcctgaagaaaatacaagtctcaggaaatatgtagatttcaaattgatctgacaaaaaaccctagtggtctgtccaaagaagccagtagccagaagaagcattacaggcaggaagcattatgaagttaagtgtgtctggtgttggaagccttttgcacagtgctagtttgtgtgtgcagtggtgattttggcacctgtttaataattgtatatcctcaatcgcaagtattggacaggatattgaataatgggaggttgcaatttcttaatgtgttagtataactattttttcctctaaagcacagtgtttttaagtctgtttagaaaacttccaggcgcggtggctcatgcctgtaatcccagcactttgggaggccgaggtgggcagatcacgagatcaagagtttgataccagcctgaccaacatgttgaaaccccgtctctactaaaaatacaaaaattagctgagcgtggtgtcacgtgcctgtaatccaagctactcaagaggctgaggcaggataatggcttgaacccaggaggaggagattgcagtgagctgggatagcgctactgcactccagcttgggcgacagagcgaaactccatctcaaaaaaaaaaaaagaacactgcaagggtaatgtctaacagcatggtttaatagtaatacaatgtgaggcccaaatataagtcacatatgacatggatttttaaatttaaaaatttctagtagccacacttcaaaaggtagaaaccagtgaaattgactttaataatatgttttatttaactcagtataagcaaaatatgatcatttcaacatgtaatacatttaaaatcattaattaaatatttaaaatcagtgtgtattttaaaatcagtgtgtatttatacactttaaaatcagtgcgtatttatacactttaaaatcagtgcgtatttatacactaaaatcagtgcgtatttctacactttaaa

SEQ ID NO: 95387 - DNA, 59746 bp, Homo sapiens
  misc_feature (1)...(59746): n = A,T,C or G
agtggcacgatcttggctcactgtgacctctgcctcccaggctcaagtgatcctcccatctcagcctcccactgaatagctggaaccacaggcacacactcctcactttctaagctccagtcctaagtcatatcattctcattgccatacctcaaaagcacccaagtctcaggcacctggactttctacctagaaggtccaccccagtttgtttactgtcctgatgaacattcagctaagccaccatgtccccccaggatctcctgcctctggacagcctgtgctccccactttcttaggcactgtgctagaactgttctacccctgactctccagttcctgccatagaggctgacaagtcatcagtgttcccgaggttggaataaatgaatcacaatctatctcatggcttcgtaggtccaccagaagaaaggttatatgtggccgggcacagtggctcacacctgtactcccagcactttgggaggccaaggcaggggatcacctgaggtcaggagtttgagactagcctggccaacatggtgaaaccccttctctactaaaaatacaaaaaattagccaggcatggtggctcgcacctgtaatcccagctactcaggaggctgaggcaggagaatcgcttgaactcaggaggcagaggttgcagtgaggagagattgcaccattgcactccagcctaggcaaaaagagcaaagctccgtctcaaaaaaaaaaaaaaaagaaggttatctctgacatgctggaagtacagcaaaggccttgatctgtgatggacatcatgaagaaaacttttctttggttatcataccagtaatgctgacttcctgggaagggaaatactaattaagtgggtattaattctgtcctagacacttttagggctctctatgtaagtcttattttacagataatgacatcaaagctcagaggttaagtgacttgcctaaggtcattcattaagtcagaggcagagccaggatttagaacccagggagtcacactctgcctgcactcttttttatatatattttttttttcccaagacagagtcttgctctgtcgcccaggttggagtgcaatggtgcgatctcggctcactgcaacctccacttcccgggttcaagcaattctccctgcctcagcctcccgagtagctgggattacaggcgtccaccactgtgcccagctaaattttgtatttttagtagagacggggtttcaccacgttggccaggctggtctcaaactcctgacctcaggtgatccgcctgccttggcctcccaaagtgctgggattataggcatgagccaccgtgcctggccctttttcctttgagacagagcctcgctctgtcacccaggctggagtgcggtggcgtgatctccgctcactgcaagctccgcctccctggtttacaccgttctcctgcctcagcctaccaagtagctgggactacagacgcccgccaccacgtctggctaattttttgtattttcagtagagacagggtttcaccatgttagccaggatggtctcgatcccctgacctcatgatctgcccgccttggcctcccaaagtactgggattacaggcgtgagccactgcgcctggcccttttttcctatttatatagagacggggccttgccatgttgtccgggctggagtgcagtggcatgatcctgggttccagcgatcctcccacctcagcctcccaagtagctagaaccataggtgcatgccacaatgccacgnnnnnnnnnnnnnnnnnnnnnnnnnnnnnnnnnnnnnnnnnnnnnnnnnnnnnnnnnnnnnnnnnnnnnnnnnnnnnnnnnnnnnnnnnnnnnnnnnnnnnnnnnnnnnnnnnnnnnnnnnnnnnnnnnnnnnnnnnnnnnnnnnnnnnnnnnnnnnnnnnnnnnnnnnnnnnnnnnnnnnnnnnnnnnnnnnnnnnnnnnnnnnnnnnnnnnnnnnnnnnnnnnnnnnnnnnnnnnnnnnnnnnnnnnnnnnnnnnnnnnnnnnnnnnnnnnnnnnnnnnnnnnnnnnnnnnnnnnnnnnnnnnnnnnnnnnnnnnnnnnnnnnnnnnnnnnnnnnnnnnnnnnnnnnnnnnnnnnnnnnnnnnnnnnnnnnnnnnnnnnnnnnnnnnnnnnnnnnnnnnnnnnnnnnnnnnnnnnnnnnnnnnnnnnnnnnnnnnnnnnnnnnnnnnnnnnnnnnnnnnnnnnnnnnnnnnnnnnnnnnnnnnnnnnnnnnnnnnnnnnnnnnnnnnnnnnnnnnnnnnnnnnnnnnnnnnnnnnnnnnnnnnnnnnnnnnnnnnnnnnnnnnnnnnnnnnnnnnnnnnnnnnnnnnnnnnnnnnnnnnnnnnnnnnnnnnnnnnnnnnnnnnnnnnnnnnnnnnnnnnnnnnnnnnnnnnnnnnnnnnnnnnnnnnnnnnnnnnnnnnnnnnnnnnnnnnnnnnnnnnncctggccaacgtggtgaaaccctgtctctactaaaagtacaaaaattagctgggcgtggtggcaggcacctgtaatcccagctacttgggaggctgaggcaggagaatcgcttaaacctggaaggcagaggttgcaatgagtcgagattgtgccactgcactccaacttgggtgacagtgagattccgtctcaaaaaaaaaaaaaaaaaaaaaaaagcctgggcgtggtggctcacacctgtaattccagcactttgggaggccaaggcaggtggattacctgaggtcaggagtttaagaccagcctggccaacgtggtgaaaccccatctctactgtaagtacaaaaattagccaggcatgggggtgcgcacctgtagtcccagctaccggggaggctgaggtggcaggatcacttgaatccaggaggcagaggttgcagcaagccgagattgcgccattgcactccagcgtaggcgacagagcgagacagtctcaaaaataataataaataaaaataacacacaaaatatctttttatcttttattttattattgtaatcccaaagtgctgggattacaggcatgagccaccacgcccagcctactttttattttttttgagacagagtcccactttgtcacccaggctggagtgcagtggcgcaatctcggcttgctgcaacctccgcnnnnnnnnnnnnnnnnnnnnnnnnnnnnnnnnnnnnnnnnnnnnnnnnnnnnnnnnnnnnnnnnnnnnnnnnnnnnnnnnnnnnnnnnnnnnnnnnnnnnnnnnnnnnnnnnnnnnnnnnnnnnnnnnnnnnnnnnnnnnnnnnnnnnnnnnnnnnnnnnnnnnnnnnnnnnnnnnnnnnnnnnnnnnnnnnnnnnnnnnnnnnnnnnntcccaaagtgctgggattactggcataagccccagcgcctggcctggctttattattcttcttcttacctctgaccccccccttccctgcagctgcaaatagggcaatcgcgttgaacagcagtcttagaccccggagagttgagtgtggtgacagctctcagactgagtgggcatctttgactgccttccaaagtcaaatataaatgactgaggattatctgctgctttggatcataattacttatgcttatgccattgatataaaaacagagttgagttggccgggcgcggtggctcacgcctgtaatcccagcactttgggaggccgaggcgggcagatcacgaggtcaggagatcgagcccatcctggctaacacggtgaaaccccgtctctactaaaaatacaaaaaattagccgggtgaggtggcgggcacctgtagtcccagctacttgggaggctgaggtaggagaatggcgtgaacccgggaggcagagcttgcagtgagccaaaatcgcgccactgcaatccagcctgggcgacagagcaagagagcgagactccgtctcagaaaaaaaaaagaaagaaagagttgactatatttagttctgtgttttatttgtgttttctttccctgagtcagatgggaactgtttcttcccgccctgccattcttcccatgttgagatctttcccaaaggcaaagatcatttccctttttggccatggagcactctgatggtaagaattagtcctctcatcacccaccacactcaacccgaataggaaatttccaagaatgggaaccatgtctttgggcacttaggcgagattactcaatcaaaagagtgagactcagggactgaaacattcaatcaaggttaaaaacagattaaaatgtggcagttaccttttttcccctgatatagaatacgcactggagtcacagttaccttttagtaactgatttccttgagtgaatagtgtatcagaaaatgggacttttatggtggcaaagaattcagagggcctggggcacacagatctggatttgtataccgatttgccacttaaccagctatgtgactgtgcaatttaccaacctctcagggccacattttttcatctgtcaaaaaggtcaatatggccaggtacggtggctcacacctctaatcccagcactttgggaggccgaaatgggcagatcacgaggtcaggagttcgagaccagcctgaccaacatggtgaaaccccgtctctactaaaaatacaaaaattagccaggtgtggtggcgtgcgcctttaatcccagctactcaggaggccgaggcaagagaatcgcttgaacccaggaggcgaaggttgcagtgagccgagatcgcaccactgcactccagcctgggagtcagagagagactccgtctcaaaacaaaacaaaacaaaacaaaggttgaataataataataggacctatattgtagacttgttgagaggattaaatgagataatgtacgaaatgccttactacagagtctggcacttattaaagaaagagttgatgtgggctgggtgccgtggctcacgtctgtaatcccagcactttgcggggttggggtaggaagatccttagaggccaggagttcgagaccagcctgggcaacaaggcgagaccctcgtctctacaaaaaatatataaattatccgggtgtggtggctcatgcctatagtcctaggtacttgggaggctgaggtgggaggataccttgattgcagtgagctgtgatcttgagccattgcgctccagcctgggcgacagaaggcggccgtatttaaaaaagaaaaaagaaagaaagaaagaaaagaaaagaaaaaaagggtcgttgtggaaaattcttgtggggaattaaagggaccacgtgtgcgcgaaagagcttggcgaagataagtacctggaggccaagatgaggcggcgagccctgcctccctagcagtgtggtctcctggcttagggtcagtgcttcgcacaaaaaaatccactgcctctcatgagaccttgaactgccaatgaccgcaggttgcccagactcccgagtgaggaaggcggccaggagtcaactaggcttcttgcggaaaagcccactctaagaaggcctggggcattccggctccaggcaggtagcacccgcgggcctcaggccctttcacttacccgggaaacgtaacggtccttaacggcagccaawaacggctcccagcggcccaggcactggcaagggcaggctgaaatcaaacctcggattttggaacctccacgcctgaaaccctaaaccagcatcgaactacaactcccatcatgccaggckgccgcccggttcccaagggtcggtcccaccaaccttgcgccccttctttcctcaaagcgtggccgaatgcctaggcttccgggtatcagtggccccgcctcttaatccgaccggagccgtccctcgtgattcctgggtattgtagtcagtttcctgggaaagagtcgctcctagtggcagctcgcttcgccagaaaaactacaaaacccagaatgcagcgcaaattccccttgtccaataggaaccccccatgtagtggggcgcggagccctgctctcgcaactcaagatggcggacgagagtgagacagcagtgaagccgccggcacctccgctgccgcagatgatggaagggaacgggaacggccatgagcactgcagcgattgcgagaatgaggaggacaacagctacaaccgggggtaacgaaatcctcggagtccaattcccgtccagcctcccacaacctgggtctctggggtgcggggaagtcaccgggagcttagtctagccccaccctcatgttcttattggctaagtcactaggattctgcctggcgattggttattgcctttgtcatttaccaagggtgggtgctctggatattaagggccggagacgttcagtacttttattatataaaagttctatgcagtgttccactcgtgtgcttcaggccattcctgggaaaagagcatgttggacgatggttttcgatggtacaacacaggacagtctagtaacagtacagttcaaagggaacgttacttatagacgtgttgtttgaacaacgtgactagcaataaacgaatcataaaacatttcgcagcagttcaccctcagtgaggaaactcatcagactatacaaactgtatgtataattatattgtaaaatatcactaccagagaatcccaaaatataaactcaccttataaacctatgtaattaacggtatggtaatgctttgatttacatagtttccattgctccaaataatccataagtatcctgaacgatatattaatataattaagtcttcgaacatctttgccttgttacctttgcagagcagccccaggcttcaagaaatgagcgatgttgtttcttggagagtatttggaatcctcgggctccatactgcctatcctgtactttagggtcttgccattagttactatttgttcctagggatgaagaaacacaccaggcatttgaatgttgaattcttttcccaaattagtttttacttctgtaagccacagcttattcatctttcttcacatggttagtgcctggcactggcactcacgctgtctctccccatcttcctgtctatatttgtagatatatttttaaactgaaagtcgtgagagatttttgggtgtataacttgctgagtctgaggtagtctgattttcgtagccagcttgttattcgcagtattggtggcagtgcagatataaaggtataaagaccaaggactgcgtagaagagatggtcccacaagattatagtacatatttttattgtatcctttctatgtttaggtatgcttagatacacaaatacttaccattgtattatagttgcctgcagtactcagtaacatgcagcagcctattgctcctaggctacaaacctgtatagcatgttactgtaatgtacaccatatagcctaggcatttagtaggytataccatctagatttgtgtaagtacaccctataatgttggcaaggcaaaaatcacctaaccatgcatttcccagcacatatgcctgacgttcagtgaagcatgactgtatttaagtggtttataatctgcttgtggtaaatcttaggttaaaagatctagcttttatgttcttcagccggcattaaaaatcacaggaagggccgggcatggtggctcatgcctgtaatcccagtactttgggaggcagatcacgaggtcaggagatcgagaccatcctggctaacactgtgaaatcccatctctactaaaaatacaaaaaatttagccggrcgtggtggcgggcgcctgtagtcccaactactcgggaggctaaggcaggagaatggcgtgaacccaggaggcagagcttgcagtgagctgagatcacgccactgcactccagcctgggcgacagagcgagactccgactcaaaaaaaaaaaaaaaaaaaaaaatcacaggaagaaagtagaggaataggaagcttgccaaatttagtttttataagactgttctgttgctgtaactcacaacagatctaatgtaataaaagtcttcttttgaagtttgatattcctaaaaatggaagagctgagaaagaggaagtaggaacaggaagaagggaaagtgaagctctcctgagtagagatctgaatcacagatgagagttggtgaatgtgaaagtcattccagaagtgaaagtgtggcattttctttgctctttttgtagttgcttttatttttatcttcttaactgttgtcctgaccagtgtccttaggtttgtgccctataatctgtgaatcacttttcaaaactgtgtgccagaaagttattttattggcctggcgtggtagctcacacctgtaatcccagcactttgggaggccgaggcaggtggatcacttgaggtcagcagttcgagaacagcatggccaacatggtgaaaccccgtctccactaaaaatacaaaatttagctgggcatggtggcgtacgcctatagtcccagctactccggagactgaggcaggagaatcacttgaacctgggaggtggaggctgcagtgagttgagattgcaccactgcactccagcctgggcaatagagcaaagccctgtctcagaaaaaaaagtggcacacagtggctcatgcctgtaatcccatcactctgggaggccgaggcgggtggatcacgaggtcaagagattgagaccatcctggctaacatggtgaaaccctgtctctattaaaaatagaaaaattagctgggcatggtggtgcatacctgtagtcccagctactcgggaggctgaggcaggagaatcactcgaacccgggaggcggaggttgcagtgagctgagattgcgccactgcacaccagcttggcaacggagcgagactccatctcaaaaaaataaataaataaaattattttatttgtagtagaagtaagtgataaccttaaaaactttgacagtttgcagtggtgtctctgtgcatggttatggtctgggtgaaaaaattatgtttattagcgtcccaaatctaaagatctgtgaaaatgagtttggaggtagtaggtgaaaaaccaagggcctagtctggaggagagrgtctaattctggcactaagaatctggggtagagtcaacatttttccatgaactttgagaggaaatggttttggggagaagcagcaatgtgggaaaatgcagcacggcacagtagaaaagcatggactttggaataatttaaatctggtctgaggccaggcgcggtggcgcacatctgtaatcccagcactttgggaggctgaggtgggcrgatcgcttgtggtcaggagtttgagaccagcctggccagcatagtgaaacctcatctctactaaaaatacaaaaattagctgggcatgatggcaggcgcctgtaatcctagctacttaggaggctgaggcaggagaatcacttgaaaacaggaggcagaggttgcactgagctgagatctctccagtgcactccagcctgggcgacagagcaagcctctgatctcaaaatctcatctcaaagcttggctctgacacttaacagtcctgtgaccttgggaaaggtacttaactcagagttgtagggattaatgagataacatctggaatgcactccttttcctccctcctcctctttcttcagatcgtccctaacctcccagcttgcccctctgctcttatcacatactgtattgtagcttttatcgtaacaatagttataataacaataaatataactacatgtttggtaatttttcttaatgtgtctggtacctgtctcatctgacagtaaggagcatgtaaacaggattgtgtcttcgaaatgcctagcacttagtgggcattaatgagtatttgctgtatgaatgaatggcagatattaaagtgcctagcccagtattagtggagtttcatctcccctcaccaagtgagaggatgtcagatttttcttacatacacattttctctccccaaataattctcattgtaagcctcactacagtttttatgaaatacctacagaggcagggcatggtggctcacacctgtaatcccagcactttgggaggctaaggcgggcgggatcatgaggtcaggagatcgagaccatcctggctaacacagtgaaaccccatctctaataaaaatacaaaaaattagccaggtgtggtggcgcatgcctgtagtcccagctactcgggaggctgaggcaggagaatggtgtgaccctgtgaggcggagcttgcagtgagccgagattgcgccattgcactccagcctgggcgacagagccagactctgtctcaaaaaaaaaaaaaaaaaaaaagaaatacctacagaaaccaggaagctccaatttgctgtggagctttccactgttgtgtgctttccactgtgttttgcttcttgaaatgttttttgtcttaatattatttaaaatgttctcaaaaatcatgtaaaaattgacagagaagttttcctttcaatgctagagagtctaaaatgtgtaatatataataaaggttaatgatagttcgagctaacccttattctcctgggcctttttttttttttaaagagactgtgtctcgctatgttgctcagactagtctcaaactcctgggttcaagtgatcctcctgccttagcctcccaaagtgctgggattgtaagcatgagccaccacacccagcctcctgcccctttttttcaggaactaaagtcatagtactctatgctaataaaatgagctaaattcatgtactggattctgttgcccgggctggagtgctgtggcgcgatcttggctcactgcaacctctgcctcccgggttcaagaaattctcctgcctcagcctcctgagtagctgggactacaggagcacactgccacacccggctaatttttcatattttagtagagacggggtttcaccgttgttgcccaggctggtcttgaactcctgagctcaggcaatccacctgccttggcctccgaaagtgctaggattacaggtgtgagccaccacgcccggccagttgtattagttacttatgtctctttgtatatgaatttagttcttgacttttctggtcttgtgtttcctccgtaattaaatcagcataaacatttggtgaatataaaacttcatgtggttgtgtgtagtggctcatgcctgtaatctcagcactttgggaggctgaggcagaaaaatcacttgagctcaggagttcgagaccagcctgggcaacatggtgagaccccatctctataaataaaaacaaaaaaacccaaacccttcatgtatacatataggtatacatgcatacatatgcagtgtgtatgggtgcgtctcttcagtttttctatttaaaaattttttaatttaattttaaaattattgttattactttggaaacagggcctcgctctgtcgtccaggctatagtacagtggtgtgatcrtggcttactgcagcctttgacctgggctcaagcgatcctcccacytcagcctcccaagtagctactaggattgtagacatgcaccatcatccctggctaattttctttttaaaaagtttctgtagagatggggtctcactatttagcccaggctggtctcaaactgctggcctcaagtgatgctgccaccttggcctcccaaactgctgggattgtgggcataagctcctgcatccagctggttttgtttgtttttttactgcactcaatttcccccagttacgtgcctagcgtaattatcctgaacaattgagaggagagtcagataagataacctttatgcagcatccccctgtagttcgtgattcatctatatggtttaatttgatttttttttttttttaatgagagtctttccaagaagtattgccaaagaataaatctcatcagttggcagattttaatttgggggtaataagtgaagattgtctgagtgttttggaacaaaaaagaacttttagactattgtgttctaggaatctttcggaatttattttgcagtgtcttcagtgtcattgagatcctggtaagcacgggtcaagagccctctgacaagaggtgtctcatctccatcctgctctcttactccctgggacaggttaacatggattctttataagttctcctcatttcctggttgtgagatactatcccttatgaaaacttaggaggagagaaaagtctttctgaaaataaattccataaagctagccttacttgtttttgtttttttcttcagcttctccaagagtcgttctttccctatttatttgatggcttatagctgcagctagctcttggaaataagaaatctttttagttcctttttaatttctcccttcaacttttggtttttcaaaactagatcaaagcagaatggaaagagaaacctcatcactgatatcaaataagtgttctaattttgtttcccaattaaatggcaattaaaaagaaactaatcaagagctgcttcaaagagaagagactggaaagcagaagaaatggaaagtaaatgagagcctatttcagggactcgctgctcatggcacagcagttttgctgatttttcacattgttcaactaatatgctcacgctaaaattccccagctttactaagttggcagttaaccctttccctatagagcccatagatttatgagccatacatttagtaacttcaggaggatgcttctttaactctttctcttcagctttttatctgaaatctctacccttcaggcctctcttccaattcctcaaagaagatgtccttgtgattgttacatttaagggacaaaaatatggtgttctctattgagagcgccaaaaatactaaaccggaattcctccataggctcagtatttgcctcaaaaatgtcccagcactttgagaggctgaagtgcgcagatcacttgaggtcaggagttcgagaccagccgggccaacatggcaaaaccccatctctactaaaaatacaaaaattagctgggcgtggtggcacacacctgtagtcccagctacatgggaggctgagacaagagaatcacttgaacccgggaggcagaggttgcagtgagcccagatggcgccattgcacttcagtctgggcgacagagagagcctccatctcaaaaaaataaacagaacaacaactttctagagctgctctcttgagagacaactgaggagtcactatggttaagtgtttagtaaatgttactattattactacgtagtgggcattgtgctaagccctttacttggattatatcctccatgatttcacttatgaagactttagcgatttttgtttgtttgtttctttttttgagtctcactctgtcgcccaggctggagtacagtggcacgatcttagctcactacaacctctgccttacaggttcaagcaattcttgtgtcttaacctcccaaatagctgggatcacaggtgtgcaccaccattcccggctaatttctgtatttttaatagagacacggttttgccatgttggtcaggctggtctcgaactcctggcctcaagcagtccacctgccttggcctcccaaagtgctgggattattacaggcgtgagccaccatgcctggactttagttttttgtttttttgggtttttttgagacagagtctcactctgtcgcccaggctggagtgcagtggcgcgatctcggctcactgcaacctctgccacccaggttcaagcaactctcctgcgtcagcctcctaagtagctgggattacaggtgcstgccactgtgcctaactaacttttgtagttttagtagagacggggtttcaccatcttggccaggctggtcttgaactcctgacctcgtgatccatcctccttgtcctcccaaagtgctgggattacaggcgtgagccaccatgcctggccagactttattttttattatttatttatttatttatttatttatttatttttgagacagagtctcgctctgttgcccaggctggagtgcagtggcgtgatcttggctcaccacaacctccacctcccaggttccagtgattctcctgcctcagcctcctggatagctgggactacaggcacatgccaccacgcccagctgatttttgtatttttagtagagatggggtttcaccatcttggccaggctggtcttggaactcctaatctcgtgatctgcccacctcagcctcccaaagtgctgggattacaggcatgagccaccactgcgcccagctagactttagtttttatagtgaggcttgagatttgcatctccactggtctctttgacatctcagaggatccattctgaacttgctaggtttctttcccctgctgaattgagttctgcatcttgagtctgcagcagtgtgaatcctatctttggctccatttaacagcctatggacgttcccaaacttgggacccagtttgtctcttcatgatagacaaatattattttcagaagtcattctaatcgcaccactgcactccagcctggcaacagtgagactccatctcaaaaaaaaaaaaaaaagtcattctagtrggtgagatttctgccagcattgagccactgctcaacatattcttgataatggtctctgaacagcatttgattttaycttggagttgcaaagtcaaagtctaactcgccaaacaaactcagtgtggaatatacacatttgtctcattccggttttaaggagtttagtataccagagcttttgtgacctctaaaaagcagttatcgtccatgacaagaattggctcgttcaccctcagtactctggcttactatcccagggagggccgagggtggcagcaaaagtggtcttttgtaatccctttttatracctgctgttctcttcacagacctcccagggtacctttttttgtgtgtgtgtgtgtgagatggagtctcactctcacccaggctggagtgcagtggcgtaatctcggctcactgcaacctctgcctcctgggttcaaactattctcttgcctcagcctctcaagtagctgggattacaggcacccgccaccatgcctagctaatttttattttttatttttgagacagagtctcgctctgtcacccaggctggagtacagtggcgcggtcttggctcactgcaagctgcgtctcccgggctcacgccattctcctgcctcagcctcctgggtagctgggactgtagtcgcccgtcaccacgcccggctaattttttgtatttttagtagagacggggtttcaccgtattagccaggatggtctcgatctcctgacctcatgawccgcccacctcggcctccctaagagctggaattacaggcgtgagccaccgcgcctggccaatttttgtaatttttagtagagaagggttttgctatgttggccaggcttgtctcgagctccagaccttaggtgatctgcccgccttggcctcccaaagtgctgggattacaggcatgagccactgtgcccagccccagggtaccttgatggcagtactaaagtgtttttatttttcccatcatttgggattcacaagcagtttttgatataactaattggtgggaatgtgcggagttgggggtattgcactgagtgatccttagccgcagaagtacagagactagacagctgatactgattcatgccatgtcatttccttctgggcatctttgccatttcattcacctctctttggtctttctgagtactaataggattattagtgaacttaccatacttcaagagttaattgatttgcaaaaggatttcctgatgtctaaaagtagaatcaaaaggatattagaggttagagtttattttaataagtttctctggaaaatttgaatttctgcccaaaaaattcattttttatttgagacaaggtttcactctgtcacccagatcgtagtgccatggtgcagtcctcctacttcagcctcccgagtgactgggactacaggctaatttttttgtctgtgtgtgtagagacaagatctcactatgttgcccaggctgatctctaactcctgtctttttgtttttcagaggtagaaaacaagtggtggctggtccaagtgcagtggtgtttacgactaatttgtcataaccagttatagatttctttgttccttttccactcccactgcttcacttgactagcctttgaaaaataaaagtaaaaagcaagtggccatgagatctgagagctacagtgaaaaagaaaagtggccaaatttgtgaattttatttcccaaacttttttttcttatgttgtaaacctgtggtctgtgtttaagacattgaaaccattagaagtagttacattagagcttttttgtttgtgctttatttacttattagagatggggtctcactttgtcacccaggatggagtacagtggctattcacaagcgtggtcgtggggcactactacatcgtgagactcctgggctcaagagatcctcccgcctcagcttcctcagtagctgggactacaagttcacaccaccacacctggctggacctgttttagcttctcaaggagtaggacagagcctaaggagagagaagacaatgaataagaaaattagggctggacatggtagctcacatctgtaatcccagcattttgggaaattgaagcaggtggatagcttgagtccaggaattcaagaccagcctgggcaacatagagaaactttgtctctacaaaacatataaaaattagccaggtatggtggcgtacgcctgtagtcccagctacgcaggaggctgaggtgagatgatcgcttgaacctgggaggttgaggctgcagtgagccatgattgtgccactgcactccagcctgggtaacagagtaagaaactgtctttacaaaaaaaaaaaaactcagtatttttttatttgagatggagtctcactcaggctggagtgcagtagtgtgatctcagctcactgcaacctccccctcccaggttcaagcgattcttctgctatannnnnnnnnnnnnnnnnnnngttcaagcgattcttctgcctcagcctcccaagtagctgggattacaggcgtgtaccaccaccacacctggctaatttttctatttttttagtagagatggggtttcgccatgttggccaggctgatctgaaactcctgacctcagctgatccacccaccttggtctcccaaagtgctgggattacaggtgtgagccaccgcacctggcctatttttttttttgagatggagtctctctctcttgcccaggctggagtgcagtggygcgatctcagctcactgcaagctccgcctcccgggttcacgccattctcctgcctcagcctcccgagtagctgggactacaggcgcccgccacgatgcctgcctaattttttgcgtttttagtagagacggggtttcaccatgttagccaggatggtctcgatctcctgacgtcgtgatccacccgcctcggcctcccaaagtgctgggattacaggcgtgagccacygcgcctggcctattttttttaataaaaaaagaaagttgataatttaaaatcccaatcagtagctcaagagcacagcatttccattgctctcatagaatattaacacagctgtcctgtgcaaacagaactgaagatgttttgctgaccctcttttgggctctagcttttcaaggtcttattttagtctattatgcctgtaaagcatcagtcaagcatataattgttgaactgttaactgtgtgctcagcacaactagaggcgctgtgggaagcagctgtataagatgtagtctggccgggcgcggtggctcacacccgtaatcccagcactgtaggaggctgaggcagatcacttgaggccaggagttcgagaccagcctggccaacatggtgaaaccctgtctctactaaaaatacaaaaattagccaggcatgatggcacatgcctgaaatcccagcttttcaggaggctgaggaagagaatcgcttgaacccaggaggcggaggttgcagtgagccaagatcacgccactgcactccagcctgggcaacagagcaagactctgtctcaaaaaaaaaaaagatgtagtccctattcttaggaaattgttaatgtcatcgggaagccaagaaagcaatatattattatatattaagtgttttaggagattatagttttaaaacaggcagacatcagagaactagaatagtcagagctgactttctggataaaacatgactcactttcctcattacttctaatgcttgctcctctcaaayaccaaagctgtgttctatagcccagtgtgaggaaacaatattctcttggctttggaggattctcaaatcaattcttacagggaacgaagccatagcctttggggggaaatggccccaagccaagtctttagagattgatggctcctccctagatgctagttggttggttgataaccaatttgcctcacatctctgggccttagtttcctcatctgtaaacaacaagttaagccagatggttctgagattccagtgttggaagctcagcttcccctcccctacgatagagctttttcttcccaggcatgcagttttgagcggattgcatcatccagtaagactgagaggaggcccacatatggaccctcgctgctcctgttgtctagaagttcctcttctcctgcygttcatctgccagcttacccttacctcccacccgctcacatacccagcattgcgctctatttctagaaataaktactgaagttagttttccatctcctccccaaggtctgaatttatacaggagcatccttaggatgtcttacatctttgaacttgtaacattttggtcttcattaaaagatgactttttttttttttttgagacagagtctcgctcagtcgcccaggccggagtgcagtggctggttctctgctcactgcaagctccgcctcctgggttcacgccattctcctgcctcagcctcccgagtagctgggactacaggcgcccaccaccacgcccagctaatttttttgtattgttttttagtagagacggggtttcaccatgttagccaggatggtcgcgatctcctgacctcgtgatctgcccacctcggcctcccaaagtgctggtattacaggcgtgagccatcgtgcccggccgagatgacatttcttgattgcttttctgctctgttcctggatcttttattctaattcaccctgtatttgctaggttggtcattgatgacttcttgagttgatcaactttagaatataagtctcacaatttttgtatgaactgccatctgccttctgggggaggaggcacttctgttgctgcaccaaggcaaactttactgaattctctactctttattttggaaccaagtgaaacaagttggactttggtttgctgtattctaagattctggttctggccaatctcagtttgaaataaggtgactggcagcttagatctgtgagagatttctatttcagtgtgccgaatcgcagcatgccctaggattcccacccagtgggtgtggacttcaaatccctttaaaaaggatgccagccaggcacggtggctcattcccataatcccagcacttttggaggccaaggcaggaggattgcttgagcccaggagtttgagcccagcctaaaattagccaggcatggtggtgcacacctgtagccccaattactcaggatgctgaagcaggaggattgtttgagccaggagttggaggcaggagctggaggctgcagtgagccatgatcgtgccactgcactccagcctgggtgacagagcaagaccctgtctcaaaaatgaacaaacagccaggtgcggtggctcacgcctgtaatcctagcatgttgggaggctgaggtgagtggatcacttgaggtcaggagtccaagaccagactggccaacatggtgaraccccgtctctactaaaaatataaaaattagctgggcctgatggtgggcgcctgtaatcccagctactcaggaggccgaggtgtgaggatttgcttgaacctgggaggtggaggttgcagtgagccgagatcacaccactgcactagaggctgggcaacagagcgagactcttgtcttaaaaaaaaaaaaatggctgggcgyggtggctcacgcctgtaatcccagcactttgggaggccaaggctggcagatcatgaggtcaggagttcaagaccagcctggccaacatggtgaaaccccgtctctactaaaagtatgaaaaattagccrggcatggtggtagtcccagctactcaggaggctgaggcaggagaatcgctgaacccaggaggcggaggttgcagtgagctgagaacacggcactgcactccaggctggcaacagagcaagactccgtctcaaaacaaaacaaaaaaagaggccaggcacggcggcttacgcctgtaatcctagcactttgagcggctgaggcaggcagatcacctgaagtcaggagttcaagaccagcctgaccaacatggcgagacctcatctctactaaaaatacacagattagctgggtatggtggtatgtgcctgtattcccagctacccaggaggctgaggcagaagaatcactggaacctgtgatgaggaggctgcagtgagccaarattgtgccattgtactccagcctgggtgacagagcgagactccatctcaaaaacaaaaaacatgaatcaagaaacaaacaaaaaatgatgccagattcctggagaaggattagcctggcttctgtggggtcctctagttttgttttcccttagtccaaattgaggccattcttctgtgaagtggcgttggcttgctaggatgctttttgaagttctactctcaaggcctctgagcttggttccctatgaataattaaaattattataattaccatgaaagctaactggagtgggctccttggaagtctggttttgctgaattggttgtcttctgtttgggggtgttgactgtaagactatgtgtactcataatgtgtcctcacggatggggctcaatacttggtagctcagtgaaaatgactcattaaagaaaaaaaaaaaaaagtggccaggcacggtggctcatgcctgtaatcctagtactttgggaagctgaggcaggtgaatcacctgaggtcaggagtttgagaccagactgaccaacttggtgagaccctgtctctactaaaaatacaaaaattagctgggtgtgatggcacatgcttataatcccaactacttgggaagctgaggcaggagaatcccttgaacctaggaggcggaggctgcagtgagctgagatcgtgccattgcactccagcctgggcaacaagagtgaaactctgtctcaaaaaaaaaaaaagaaaagaaaaaacaacttccctgtgttcttcagccgtgtgcttgatgtacaagttgaaacaggatttttgctcagtaactggctgcttgtacaaattcaagccaatataaagaaaatgaaatttgctctctgattttagtttcggtcttggagatttctagatacttgtattggcaatgcataaagcagaacaagagttcagcccaagatccttccacaaaaattgggttcatgaggtgatagctacatggaagtatctccgctaaataggaagaacaaaggcaggaaggtagtttttacagtgattttgcatatttgtaaagacttttaaagttggaagaagtaattattttccccatgtgaaattatgtttagtaagtatccagttggttaatctacagcagttcttcaccttacctttttgattctttcttttgtagaattataaaaagttattcttatggtaattcatattaccataatttgttccataagctgttatggaaccagctaatttgtggttatggaccagataatttgttccataagctgttatgaataagaatttatattataaattgtatccaacaatgggacactgctttgtctcctaatatcagccaggtcttgtttgtttgttttttgagatggagttttgatcttcttacccaggctgtagtatagtggtgcaatcttggcttaccacaatcttcacctcccaggttcaagtgattctcctgcctcagcctcccgagtagctgggattacaggcatgtgccaccacgcccggctaattttgtatttttagtagagacagggtttctccttattggtcaggctggtctcgaactcccgacctcaggtgatccgcctgccttggcctcccaaagtgctgagattacaggcgtgagccaccgcacccagcctatgagccagtttttaaatcttataatgcttcacgtaatcctgagactgaagtgaaaatatctggagtaggaaaaccacagagttgtcctaggctgcagatggtcctgtgtgcaataacaaaattgagttactaagaagaagaagttatctttaggccataaatgactttatggtttctgttgtttgccatggccttgggggttttgctgagcatctggttttaaggaagttaccttatttcccctttgaatgttctcagtcttccttccatgttaatgccttctgggtctcattaatatcataccaagtaggtgtacttgcatctagacttcatgaccttatgcttggactaaaggaaccttcagacttaactggatctctccctgtcacagtctttctgcatcaggggcactgagaggcccggccagatggaagctgtgggaggcaagagtggacagcgtaagtgggaaatgagggtgataggcctagggaaaaattgggcttgataccttccaagttaagaagccgctgttactctaggatttcaagcatgggggggacacatggaaagccattttcacagaggtgagtcccacagctatatagagttcaggtgatgcagaaagattgtgaaggcaaagagatccagaaaaggctggaggtaacttaagtccaagggtaaggtcatgaagtctggatgtgagcattcctcccaggaacaggaagagataggagaatctgaagacattctgtgaagagaattggcagcatgtgatttcagatcactttctccctgtatatatatatatacacagtatctgtctgtgagatgatagtaatattcataataactccaaggcattttgagaccctgaagtctttctgaattataaattgtatttaacataatgttaatggaaaattgtattttatattgttttaattcttgggggttttggtgtttttttgtttgtttgtttgtttgttttgagacagtgtctggctgtattgcccaggctggagtatagttgtgcgattttagctcactgcaggctcctcctcccaggcttcaagccaacctctcaactcagcctccccagtagttgggactacaagtgtgcaccaccacacctggctaatttttggatttgtgttagagacggggtttcgccatgttgcccaggctggtctcaaactcctgagctcaagtgatccgcctgccttttcctcccaaagtgttgggattacaggcatgacccaccatgctggacctttcaattatttgaaaattgattgtctaaaatatacagttaaaattacctctgtgtttagctgattctacagattaggattcactgtactcaggttggactcctaattttgacttttctttttttcttttcttttctttttctttttttttttttccccaagatggagtcttgctctgtcgcccagagctggagtgcaatggcatgatattggctcactgcaaccacagcctcccgggttcaagcagttctcctgcctcagcctcccaagtagctgggattacaggcgcatgcctccacgcctggctaattttgtatttttagtagagacggggtttcaccatgtgggtcaggctggtctcgaactcctgacctcatgatctgtccgccgcggcttcccaaagtgctgggattacaggcataagccaccgcgcccagccaattttgacttttcagtgtggctaagaggctgagcatggtggctcacacctgtaatcccagcactttgggagttcaaggcagcaggatcactcaaacctagaatttgagaccagcctgggtaacatagggagacccctgtctctattttttaatttaataaaacattaatgaggctaagaaactttttgcttcattcatggggtgtgtcatgtaggggaaagcagcacaaggaagtccccttgatcacgtgcacacatgcacacgtgcatacacacagacatgtttcttttatttatttatttatttttattttttgagacggagtctcgctctgtcgcccaggctggagtgcagtggcgcaatctcggctcactgcaagctccgcctcccaggttcacgccattctcctacctcagcctcccaagtagctgggactataggcgcctgccaccacgcctggctaattttttgtatttttagtagagacggtgttttaccatttagccagaatggtctcaatctcctgacctagtgatccgcccgcctcggcctcccaaaatactgggattacaggcgtgagccactgcgcccggccacatgtttcttgtaatctctccatggcaggagtaactgggtgctattgttgttttagtttcccaagattcctaatgctgggttttgccagtggtgatccctcagtctgagcttgccgacagttgtcctcaatcctgcagatctggtttaggcatttcttttttttttccctttttttttgagacggagtttcgctcttgtttcccaggctggagtgccgtggcgcgatcttggctcacaacaacctctgcctcctgggttcaagcgattctcctgccttagcctcccgagtagctgggattacaggcatgcgccaccatgcccggcttattttgtatttttagtagagacaggctttctccatgttggtcaggctggtctcgaactctgcacctcaggtgatccgcctgccttggcctcccaaagtgctgagattacaggtgtgagccaccacacccagccttttccttttttttttttttttttttgagacagagtctcgctttgtcacccaggctgaaatgcagtggcatgatstcggctcactgcaagctctacctcccaggttcacaccattctcctgcctcagcctcccgagtagctgggactacaggcrcccgccaccgtgcccggctaatttttttgtatttttagtagagatggggtttcaacatgttagccaggatggtcttgatctcctgacctcatgatctgcccgcctcggcctcccaaagtgctgagattacaggtgtgagccaccgcgcattgctgccttttcctttttttgagacgaggtctgtctctgtcatacaggctggagtgcaatgacgtgatctcaactcactgcaacctccacctcccgggttcaagcagttctcctgcctcgtcctcctgagtagctgggactacaggcatgtgccaccaggccccagytaatgtttatatttttagtagaaacagggttttgccatgttggccagtctggccttaaactcctgacctcaagtgatccacctgcctcggcctcccaaagtgttgggattacaggtgtgagctaccacgcctggctgatttgggcatttctcatgactgaccattttggacacagattgtggcaatgttaatgtgcctttttcctcatccctcactcccttttcatactgtcttgtgctccagatccagctggggaaaatcatgaaacctaatacatttgggaggtggaggaaggaagggcaaagcattccagaaagcccatcactgccttttggctgtcatccttttacattcagagttcaaggaagtattgtrgtatgaatgccttgttaacaattatcattcgtctttggtgccattaccctggcaatataaagaaaataagcaacataaaagcaagaacggaaaaggccctttcacacaaataggacatcccttgcccagcactccctccctgaaagccgagggggcgcgagtcaggaggagtgctggtgtcctccaaatgccctttctggacctgggttcttcagcctgcttctgaarccaacaggcttgattaaggaaggtctggctccacagaaagctctttgtcaggggtagcacaaaacagattttttttaaaccctgcattagtatttactttttgttacagtggtttgagtccagccaatgacactggagccaaaaagaagaaaaagaaamaaaaaaagaagaaagaaaaaggcagtgagacagattcagcccaggatcagcctgtgaaggtaacaaggaggttctgttttttgtgactcagtcactttttcacatgagagagttttgaggtgaatgtataggatcaacttggattgacgttctccactggtattacttcaagatggaagagttggatcccagtgctgtcctctgctgccctagacctaggtgatgaaactgctctcagtaccctaaaagacacagcaggtcagacactgactcccaagcatggtgcccatcagaatggacaggtgcgtactgcatgtgctgctgtgccagtgccctggggagctacgtgtgacagcccctggcgcctagagcagtggttctctgtcttaagtccccaccgctctgacaatgaaaggccccccctttctttttgagacagagtcttactctgttgcccaggctagagtgtagttcatgattatagctcactgcagcctccactcctgggctcaagtgatcctcccacctcagcctcccaagtagctgggactgcaggtgcatgccaccacacctgtccagtttttttttttttttaattttttgtaaagatggagtctcactatgttacccaagctgggtcttgaactcctgggctcaagcaatcctcctgccctagcctccsaaagtgctgggattacaagcgtgagccactgcattcagccaaagacttcttcttaagacctttatatatttgcaaacattctcttaatgccatagtcattataatgaaagccatgagtcccacagagtctttctgagttctactccatgagaaccactggcctaaaggcttacaacctgagagtgatgcactggcatgaaacccagagatatgggtaaggattgttttgtttcttaaataaaacaacattacaaaataaaacaattgcaggtaagtgttgtcttcttcaaagtaggctgacagaggcagggggacaactcaaacatattcataattcaccttttaaaactgcctctgagacctggggtggtggtttatgcctgtaataccagcactttgggaggccaaggcgggtggatcacctgaggtcaggagttcaagaccaccctggccaacatggtaaaaccctgtctctgctaaaaatataaaaaattagttgggcgtggtggcaggcgcctgtaatcccagctacttgggaggacaaggcaggagaatcgcttgaacccaggaggcagaggttgaagtgagctgagatcacgccactgcactccagcctgggcaacagagtgagactctgtctcaaaaaataaaaattaagtggccaggcatggtggctcacgcttgtaatctcagcactttgggaggccaaggcgggtggatcacgaggtcaggaatttgagaccagcctggccaacatggtgaaaccctgcctctactgaagatacaaaaaaaaattagccaggcktggtggcacgcacctgtaatctcagctactcaggaggctgagacaggagaatcacttgaacccaggcggcagaggttgcagtgagccgagatcacgccattgcacttcagcctgggcgaaagggtgagactttgtctcaaaaaaaaaaaaaaattaaaaaaaaatttaaaaaaaggaacagcctctgaaacagtttataagcctcgcaaaaatccatattcattccaatatacccacactttgctgtatgcctcaaatgttatgcctcagcttgaatctgctaccttattgagatatgacttcaagtaatttttttactatttccaatataaaacccgctatgaaaaaataccattattatttaataccatgttgcacttcatttaaattagctccaaaccatcaccatccctacaaggtaggtaggggtcttccctttttattcatttaatttatttttgagactctgtcattcaggttggagtgcagaagtacgaacatggctgaccgcagcctcaacctcctgggctcaagcaatcttcccacctcagcctccygagtagccrggactacaggtgtgcaccacgacacccagctaatttttttattatttgtagacatggggtctccctgcattactcaggttgatctctaactcaggctcaagagatctgcctgccatggcctcctaaattgctgagattacaggagtgagccatcacacatggccgagaatttatttaataaactgcaaggggaagaaaattaaaatgccacttcccaggcctaagcaatatgaacataytggtttatattctttctttcctttataatctaagtgaaaaacagaaaactaaataaaaatattagaagaaaatgtatgtagttttattaatctaagtctgacataggacccagaagccataaaacagaaattgacaaatttaaaactttgtagaagtcaaaagataaacaataatctgggaaaatatttgcaacatatgtattagtttaaaataattgaatgaataggcagttcagaaagaaaaaatgtgtaatcagtaaataataagatggttaaagtcataatggaagaaatgaccattaaagcaataattatttctcttagattggcatagattaaggcttggtaaactttttttttttttttgcgagacggagtctcgctctgtcgcccaggctagagtgcagtggcgcagtcttggctcactgccagctccacctcctgggttcacgccattctcctgcctcagcctcccgagtagctgggactacagccgcccgtgaccacactggctaattttttgtatttttagtagggacggggtttcactgtgttagccaggatggtctcgatctcctgacctcgtgatccacccgcctygacctcccaaagtgctaggattacaggcgtgagccaccgcgcccggccacttttttttttttaatagggacaggggtctcactatattgcccaggctggccttgaactcctgggcttaagcagtcctcccgcctcagcctcccaaagtgctgggattacaggtgtgagccaccaagctcagctgaggcttggtaaatctaatggtgagggtcaggagctactctcatacactgttcgttggattactgatagtctctttttagagagcaaattgatgataaatcatttcaaaagtgcataccttttgacccagcaggcctctttcttaacttcatcctacagaaatatatatcccagtgggtaaaaatagatgtataagaaaatttatgctgggtgtggtggcctgtaatcccagcattttgggaggctgagttgggcagatcgcttgagcccaggagttcgaggccagcccaggcaacatagtgagaccccgtctcgacaaaaaaacaaacaaaaaaattacctgggcctggtggcacacgcctatagttccagctactcaagaggctgaagtgggagaatcccttcagcccatgaggttgaagccgcagtaagccatgattgtgccactgcactccagcctgggcaacagagcgagaccctgtctcaaaaaaaaaagaaattcactgcaacattgttgtattactaaagaacaaaatcaccaaaatgcccatgagtagggggctggctaaatatactgtggtccatacatacagtggacttggtagaatgggtaggtccaggtgttttcacctggaaaggtctctaagacagtctttaaagagcagtttgtacgataatattatatgatccaattttagtttttgaaaagtgtgtgtgcatttggaacttgtatgcaaaaaagtctggaattatatttgcctcttctcaccttcccaagtgaagactattgatcacaaagattatatttgggggatgggattgttgggtgtttactttctatgtgtcttacacatttctgcattgtttgaaatttacattgagcatgtattacttttgccatcaaacaacataagactaataaggggagaaaccctgcgggcagcacccacccatcatatagctcattgtcaaccactttttctctggttgtaatgacctctgggattaggacagaggaaccaaaccccttctttgaattgtaccctttaactctttttttttttttcttttttgagatggattcttgctctgtcacccaggctggagtgcagtggtgtgatcttagcttactgcaacatctgcctcccaggttcaagcaattctcgtgtctcagcctcctgagtagctggsattacagggacacgccgccatgcctggctaattttttgtattttagtagagacagggtttcaccatgttgcccaggctggtcttgaactcctgagctcaggcaatccacctccctcggcctcccaaagtgctgggattacaggcatgagccactgcgcccagcactctttttttttttttttttgagacggagtctagctttgtcgcccaggctggagtgcaatggcgccatctcggttcactgcatcctctgcctcccaggttcaagtgattctcctgcctcagcctcccaaaatagctaggattacaggtgcccgccaccacgcctggctaatttttgtatttttagtagagacagggtttcaccatgttggtcaggtgggtctcgaactcctaacctcaagtgatctgcccgccttggcctcccaaartgttgggattacaggcatgagccactgcacccagctccccttaactcttgaactcataattaatcaaaagtcttactaacataatgggccttttytctccccaactttgtcttgtccagatgaactctttgccagcagagaggatccaggaaatacagaaggccattgagctgttctcagtgggtcagggacctgccaaaaccatggaggaggctagcaagcgaagctaccagttctgggatacgcagcccgtccccaagctgggtatgtacatgcttgctttctttgccaggtcaggggcgagggatctgcctcagctgtgccttcatgagggtttcatgctgaattactgtagggagggcagtagagtcctggagttccttggtagttgttttcagagggtggtttttaaaaatgcagcataaagactatcattcagagaccttaccattttatagcagcacaccttgagaacaaataatgattcttkccaacagcactggctcacacctataatctcagcactttgggaggccgaggtgggaggattgtttgagcccaaaagttcgagaccagcctgggcaacatagaccttgtttccacaaaaagtaaaaaaaaaaaaaatagccaggcatagtgacatgcacctgtagtcccagctactcaggaggctgaggtgggaagatcacttgaacctgggaggtcaaggcggcagtgagctgagatcacgccaccgcactccagcctatgtgacaggagtgagacccccaactcaaaaaacgaacaaaccaaaaaacccaaaaaaaaaacaaaacaaaactattggcacatgaagagtgggaatgtctgcccagaggtcttttttccacttaggtttatagagactttgtcttgtttgtctgggcacatgtttattcctggaatgggcaaagtccccagcctcttcccctttgtctcctagccaatgcatgcttactaaatgcaaagtggtttgagattttgcttagcagtgatggttcaacaacaggaatactatatatagatttcattagcaccccttaaaaaagctataatgaattgctaaaggggtggaataggcagaatatctaaaaggattctggaagggactggatcctgttagacgtgcctgccaagactgagccaagccaaccttgatggctgacttcaggactcagctgacaaagtttctgaagtggttgtaacatgattctggacccattggtggcctagttcctgttttctttgtgactgggaaagtaagtatgttgaaaaaaacatattccaacaccaaatgtaaatgactttcagcttgtccacattactgctcccctccagaaacacaatgagacttcactagtatgttcggtgcagaggaggagggtggggcagggccagacagggtagggcyaaagactggtgaggtgaggaaggcagctgtgcccaaggagatttgtttgctgcagaggttgggagcagctaatccatgaggcctgcagacctgcaggatgggcattgcctaattgctagtagaaatgcagtttgtcgggccccaccccaaagctgcagaatcagaactgccagaggatttctgtccactttgaaagttwgagaagctctgctctagagcggatgcagttcttagaagcttggtcacaatagaagcaagctgaggaggtgcatccccacgggtgagggagagcagagcactgcccaggtggacaagaggggtgctgattcccccatcaccgtgtgtgtttggctgccctcatcggccaggtcccaggcccactggctaagccctccagcaaggctttgggccacagggtagggtcccagtgaccagtttctcgctgaggagcaggaaagatgcagagagccacacatctcacctctgaatgaaatccctgatgaggtgttgtgtggtggctgccatgtatcttggctctgttttcagatggcattttggagttttggtttgattttatttttcctgaggaatttgcaaatgagtaaccttgctacattcttcacagatagtggcacttgggaaagaggcagattgaggctgggcgcagtggctcacgcctgtaatcccagcactttgggaggycgaggcaggcggatgacctgaggtcaggagttcgagaccagcctggccaacatggtaaaacctcgtctctactaaaaatacaaaaactagctgggctggtggcatgggcctgtgatcccagctacttgagagtctgaggtgggagaatcacttgaacctaggagacagaggttgcagtaagctgagatcgcaccactgcactccagcctgggcagcagagcaagaatgcatctcaaaaatgaatttaaaaaaaaaaaaaaagaggcagcttgggattaatttgcttctgttcctcttcagcccagcatactttgttttcctttcayctgtaaatgtagaaagtgcttcagtttagttctcagaaagctcaagagaaaaccacacagttgctcatacgggccctgacactttgaggaaggaggaacaaggtctggttttatttcttctggctttgccttctgtgcagtgtgtggtgtcggactccatggaagagcagtcaccctgagcatctgactagtctgcctttgaggtccagggtcagtcaagccccagttagattcctktgtttgtgtcagcctgtaaaaagtgccaccttggcaggcgtgttagcctgcatggctgaggcgtcaccctagttctgagttttctcaggggtggtggtacctacagcttcttgccctaatttttttttcacttaattggaggactaatgattataaatctcgtgcatatcagctgcactgtgtttttacagtactctccaccttcttgggagagttttaattagatggtattccactaaagaaacctacaagtctctctkatttatttatttatttatgagacagagtctcactctgtcgcccaggctggagtgcagtggcgttttctcggctcactgcaacctctgcctcccaggttcaagcagttctctgcctcagcctcccgagtagttgggattacaggtgcccaccaccacgcccggctaatttttgtatttttagtagagacagggtttcaccatcttggccaggctggtcttgaactcctgacctcgtgatccacgtgccttggcctcccaaagtgctaggattacaggcatgagctaccgcacccggccctctcttttattttcttgagacaggatctcgctctgctgcccaggctggagtgcagtggtatgatcatggctcactgcagccttgatctcctgggctcaagcaatcctcccaccttagcctcctgagtagctgggactacaggtgcctgtcacatgcctggctaatttttaaattttttgtggagacatggtttcactatgttgaccaggctggtctcaaactcctaggctcaagctgtcctcctgtcttagcctcccaaagtgctgggattataggcgtgcactgcacctgactgagacctgcaattctttagaagcttaaaattatcctaggtttaccatggaaaggccttcttaggccgggtgtagtggctcaatgcctgtaatcccagcactttgggaggccaaggcaggaggattgcttgagcccagcagctcaagaccagcctggacaacagggaaagacctcgtctctacaaaaaaatttaaaaattagccagacatggtagcacatgcctatggtcccagtttctcaggagactgaggtgggaggatcgtttgagtcctggaggtcgaggctgtagtgagccatgatcgtgccactgcactctagcctgggtgacaaagcgagtccctgtctcaaagattaaaaaataaataaataaaaatgaaaggccttcttagcagaagtgttttagtctgtgtaacaactgtaagagccgcagatgaacttttgatcccccactcgagatcatgtcgttcttctttttaaagtcacccctttcccactcatgtcaacggaagcagtatccttttctgtctttggtcagtggaatgcagtgtggccactctgttttaaaaagtcactatcaaagggaggatgtgcactcacctggtttccatgggtcccagagagaagcttcccctctctttttcctctccttggcctttgtttggtttaatgttttccgcatctcagacattctcatttctccgaagtccttcacagttgcaccgcattgcttagttttgggtctctgatgtttgatgtcatggagagaattttgagggaagagtgtgcagaaagaaacccattgaaagctcagggttttctttaaacttccagattcttttaaagcaagttcgaagtgtcatccttagtcatttattggttcatgttggccttgagagaatcagctgcattcttgctgtgctctgcagagcagccttccacccctgctcagcaggaggtactcaaaggccrttgtaagggagaaggcaggctgctccccacagagcaggacaagcagaggccatgatgctggcaccacaccgaggacagcacaggagccttgggctgcttcttggcatcgagggcactccacagtgggagtctagtaaaagtggctgctcccttttcagtgtttcctgtagctctactttttcacacccaccctgccccacatagtccacctgcagcctggctgattcctaattatccttgaggtcttgtcgttagatatttcctctgagaggtctttcctgacacacacacacacacacacacacacacacacacacacacacacacacgtcccatagcaccctgtacttcattcttactggccctcaccatgccgggtggcatgtgcatccttgctcatctctttggtgtccatgatggtgaggacctgtgtctgtttcattcgccagcccctgccacagaactggcacattctaggattcagtgaacacttggtgaaggagtgagtgaatggaagtgcctgttgcgtgtaggacctagtagccagcctaaatgagaagatttagccttgaggttattttagtacaatagggaagaccatcagtattcttggccatggaaataattcagggggaaaaaaagaaggttctgaagtgtataggaaaaggtataaattcaatacaagttgggaaattagcacctagataagactagagggtctggccctcagttttgtaggctcaaaaatgtttttttaatatacatagctgtcagttggaagcggattgacttaaattcacaagagctactttatgaataatcaaatggtgggwtttggctgggcgccgtggctcatgctataatcccagcattttgggaggccaaggcaggaggatcacttgagtctaggagtttgagaccagcctgggcaacagtgagacctcatctctatgaaaaataaaattagccaggcgtagtggcgcatgcctatagtcccaaccactsgagaggctgagatgggaggatcgtttgggcctaggaggtcgaggctgtagtgaaccaaggttacgccactgcattccagcctgggcaacagagcaagaccccatctcgccrgtcatgagtttcctaactagggaagaaaaatatgacctctctcccaagcaaacctgttgggaagcctgattaccaacagagcaggctgcttccctgttgtgtgtccctgcactttccagatcctgacctgcagcacgtggataatgactcatttatttactatttccccagaagatggtatgtctcatgaggacagggacttggtcctttttcctgctgtacactaggggctggcatggtcactgagtcactggtgcacggttggtgctcagtaatgtgtctgatggaagagggtgagatgatcagtgccagcggtggtgtcrtgtgctgcagcctgatgcagccctttccaccacacttgccccacagattatcattctgggaaggtctagagcttcctgttacatgttagaatgaaatgtttggactttgggaggccgaggcgggtggatcacttgaggccaggggtttgaaaccagcctggccaacatggtgaaactccatctctactgaaaaaaaaaaaacaaaacaccaaaattagccagcrtggtggcggacacctgtaattccagccactcgggagtctgaggcaggagaattgcttgaaccagggaggtgaaggttgcagtgagccaagatcgcaccactgtactccaacctgggcgacagaatgagactgtctcaaaaaaaaaaaaagaaaagaaaagaaaaaaaaaatatttgggatcaggagtctgaaagtcagtaaaagcatgaattgagtgcctagtctatacagagccctttgctaggaacactgttactgggttggtcccttttgaagactccattttccaaaatgcactaaacattgcattcttcccagtgtaaacatgagtgagcccattgtagaaccgaaatcatcccaagggccagaattcagtggtgaatctctcagcatatatgagtccgattgagctctggataggaatgagggctgtgtctttggagcactccccacatgctcccacagaggaggggcctatcctrctcagggaggggatgttgtgtcagggtgacttcccggcagcactgtgtagacttggtgattcagcccaaaggcacttgcaggactctaaacactgagggcctgagttggcagtagcagttaactggctcacgctgctgaaagccaaggctggcagggccacgattgagcctggcgcctagaagccatcatctggttcagaaatgggcccagtacattgttgttgctgttgacacaaaagcagccttgttgtgactccttacaaacccatccagactgatgggcctgggccagggccctgacagcactctttacaccaaccaggaggcaggaagccaaattactaaagataaatgtttgtcattcagtgacccaagggagatttaaatggatttccaaaacacgaaccaccttggatcccagtgattgtcctgaggttttgccatgaattggccctcagttaggggctaagggtagctggaaagayggtttgcagttgccaagcacagaatgttcttcagatagagggctcctagggacaggaggaatttgctctggttgagttttgaactgagccctttactgccccgagggggcaaagggtgaggctcacagctgtgstcttctttcaggcgaagtggtgaacacccatggccccgtggagcctgacaaggacaatatccgccaggagccctacaccctgccccagggcttcacctgggatgctttggacytgggcgatcgtggtgtggtgagtgggccctcagaaggttacacctgcgggtaggagccactttcacagtaagccctgcagtctcacctagactacgtttactcgagccctagagagctgagccaaggaggtctgaacagactcccgtctrtaacttcctggggcatggccaagactccacataaatagctcttagcttttctggcaggttggaagttaacctctgtaggtccccgatgtggatacctgtttttcatttattcttttttgttcattcatttcctcattttctttctagtctgtctcctgactggagcagctggggctgctaaatgaggccctgtcctcccctttccaccccggccacscagagccccttgttttgacctgagggatttatttcccttataaagaatgatgaaaatgtcgccgggcgtggtggctcacacctgtaatcccaccgttttgggaggctgaggcaggcggatcatgaggtcaggagtttgagaccagtctgaccaacataataaaaccccatttctactaaaaatacaaaaaattagccaggtgtggtggtgtacgcctgtatcccagctactcaggaggctgaggcaggagaatctcgtgaacctgggagggggatgttgtagtgaactgagatctcaccattgcactccagcccaggtgacagtgcgagactctttgtctcaaaaaaaaaaaaaagtcaacagaattttttttttttttgagatggagtctcgctctgttgcccaggctggagtgcagtgacaccatctcagttcactgcagtctctgcctcctgggttcaagcgattctcctgcctcagcctcccgagtagctgggattacaggtgagtgccaccacgcccagctaatttttatatttttagaaaagatggtgtttcaccatgttggccaggctggtttcgaactcctgacctcaggtgatctgcccatcttggcctcccaaagtgctgggattacaggcaatgagccactaggcctggcttttttttttttttttgagacagagtctggttctgttgcccaggctggagtgcagtggcgcgatcttggcttaccccaacctccaccttccaggttcaagtgattctcctgcctcagcctcccaggtagctgagattacaaccatctgtcaccatgcatggataatttttgtatttttagtagagatggggtttcactgtgttggccagtctggtctcgaactcctgacctcatgatccacccatctcggcctcccaaagtgctgggattacaggcatgagccactgcgcccagtcttttttttttttttgagatggagtcttgctctgttgctcagactggagtgcaatggcacaatcttggctcactgcaacgtccacctcctgtgttcaagcaattctcctgcctcagcctccccagtggctgggattacaggtgtctgtcaccacgccaggctaatttttttattttttagtagagatggggtttcaccacattggccaggctggtcttaaacttctgacctcaggtgatccgcccacctcagcctcccaaagtgctgggattacaggcttgagccaccacaccgggccaacagaattttttaataccaaagttgggccagcagatggagatagctgagaaggcagaaaaaggcctttgtggttgggtgtggtggctcacacctgtaattccaacaatttgggagtctaaggtgggaagatcgattgagcccaggagttcaaaatcaatcagccgggtcaatatagtgagactgcccccgctacaaaagaaaaaaatttaataattagccggacatggtagtatgccccagtagtctcagctacccaggaggctgaagtaggaggatcgcttgaaaccaggagttggaggctgcagtgagccatgatcacaccagtgcactccagcctgggtaacagagtgagagtctatcttgaaaagaaaggaaaaaaggcctttgtttgggccagatggtaaaaaatcagacaaggtgggaaacagcagtgactctccgtggtaattccttgactagcttcgagagtcgtccctctatagcacttcacagaagytgagaccagtggctctccattgttgatggcgcagaatgatgaagtggttggttagttaggtggcattctcggtctgccactctaccacgtgatggctcagttttctactataactagggtgtttgctccaagagttcctaccatgccagggggcagaaggatttgtgagactccacgtcgtttttggtagtttgcttcatccttctgaaaagcctagagccccagggtattggagttggtctrctaccyggcagaatacctccaagtgagctgcttatttctttacagctaaaagaactgtacaccctcctgaatgagaactatgtggaagatgatgacaacatgttccgatttgattattccccggagtttcttttgtggtaagttgtgggggctttcttgaggttcttgagaggaaggcatagagcagatccaccagagggcaccagagttttcatccctgccaggggccaacctttgaatggcaaattagtgtgtcatttttgagttcctgcatctgaaggacacttgctttcattagcacttagaattgcagccttgtttaagacaattgactgggtgagggagaccttcgtagagctagtacccagggaagaggtattcattgtctggtgactttatataagaaaggaacgggcatgagacctactaagactgaaagaaaagaaggcacattttctatctagttcctgagcatgctcagttgtatagccttgcctggctgagccatccacctgcccaggccacgtttaatatccaggaagagagaggcatgggccgaaatggagagggactacctgaaagggaaggaaraatttgtaccagaaagagggagacaggacaccagagctccagggttgccacagtcagctctcaaccatgggacccactggcctccgaaccaaagatgccagtaccttggttcaagctgtcaaagtgaacacagaaattggatcaggcatgaaatcctcagtatgataaccttgggttggatgagtaactaggccaaatgggatgagcagccagaaatggtgatggctcgattctgtgtgtccaggagggcttggccctaaagagaatccagctattaaccctcagggaggtggtagcaccaggtccgaaccaaatttggctgtggagcccaagcggcttgtccagcctgccggcaagcagcacaaccaccccagcctctcttttccagggctctccggccacccggctggctcccccagtggcactgtggggttcgagtggtctcaagtcggaaattggttgggttcattagcgccatcccagcaaacatccatatctatgacacgtaagcacctgcacctacccccaccccccacaacaccgccatcctgcttggtctgggagagagtagaaaaaggctgcacaatgtgccccatgaaaggaagagggaaggtctcaggaagggaggatgcccaggtgcggggactgcagattcatcctaggaaccacctgttctgctcagagtcccagccagctcccttgtttgtggcccaggttggaaggagcccaccctgaggcctggtgtgcctgctcagcagaggcttgtttttgtttttgtttattattttttacattttatagaggcaaggtcttgctatgttgcccacgctagtctcaaactcctgagctcaagtgatccactcacctctgcctcccaagagtgttgggaatatagacgtgagccattgtgcctggccagaggcttttcttagtctcactctgttgcccgggctggagtgcagtggtgcgatcttggttcactgcaagctccacctccagggttcaaacgattctcctgcctcagcctcccaagtagctgggattacaggcatgcrccaccacacctggctaatcagaggctcatttttgaacgcctgtaccagtcacacatggaagcacttgaacagcagcagaaatgggccagagcgagtgtgacccagattcagatagtccttggggcctgtgatctctgctcttcattttccctggaagtgttgaaaccatctgcctgccacagtcttcagggcttattaccagctgtgttcttgagggaatcagaacccttgaaaccctagaattgccttgacctgccccgtgggttccctgtgctgcttccctgcatgctaaaggtgggattccccagccaactcctagggactcatcagggagatgctggtggtaccttcaaataaaggtgtttgcttgggtcccaccttcctttggaaatagattctgttgaagtgaggcaggctccttgcctggtggagtgtggtggggagtcccagtactgagtgcaggtggcagctaaaagtacacccgtgctgcagacctggtccttctaggtgtggctgcacgtgcttgatgggatcaccattcccttccctgttaaaaaccttgtcacctggatttttccccctcttagagagaagaagatggtagagatcaacttcctgtgtgtccacaagaagctgcgttccaagagggttgctccagttctgatccgagagatcaccaggcgggttcacctggagggcatcttccaagcagtttacactgccggggtggtactaccaaagccygttggcacctgcaggtaaaactgtcttcctgtaaggccccaaaaatgcgggtgtctgcactgtagttgaggagcatgtgccactgtgagtcacagctccgcccttagcatcccacctctggcgtatctggtaaggcgggcacttggtgcctgcaggagccagatggggagcatggagagggcgggagggttgtagggatggcagattggcaagtccctgccttgtctggagggctcttggtgtctgctggctgctgccatttggagatggtggggggcggtactggtggtttgtttttgtttttagggatgagcccaaatctggatttttatgggaaatgtcctaaagttttaaatggttggctcaaattgttttgaatattgtgtgcaccaaatagagcaagtcagctatgtgatctaagggcaacctctgccttagaaagttgtttaaaacaattgaataatctctccttagagaactttaaaagtaaaaacaccaggtgtgaaagcagaaggggaggagggaggagggtgagtgcctctgccatcatcttctgggcatgactacagtccttttccgttgacttgattctaggagtgaggattggtctccccagacaaccgctgtagcaaaggaatagtttttgaaattgagcaagaaaaatagggagaaagaaaatccaggaggagctttggcagcactcactgtggggaggrggaggctggmgagcagggtgacaccactgactccggaggcacctgatgtgtctctcacgccacctgctggccagctggggtctccctgccattgtccttgtaatagggattggccagaaccctgaggacaggacatttgtgtccccacaggtattggcatcggtccctaaacccacggaagytgattgaagtgaagttctcccacctgagcagaaatatgaccatgcagcgcaccatgaagctctaccgactgccagaggccagtgctgccccgggtggtgggcagggggcagagagagggcaaggagagcctggctgtcagcaggagagaagggctctgggtggagagggagctttctcctactggaaaagcgaaccagcccatagtcttcagatttcctggactttctatttctgttatctgaagcaggattttattttagtttaactttctcagttcctctgagtctgtgcctggactagcttctctgccatctgttgaaaggctcagagaacacctattctctgtaattttagcctaagtaaagcataaatagaatgatgaatccacttagtgaaccttcatacacacggcagcgcgttccaaagcccagcgcagatgcactacagggtctgtgacgcccctctgccgggtcaggtaaagggtgacctgagcttgtgagggatccccgatttctaatcccaatttccccacccagatttggctgaaggactgggcaaccttaaagtgagctgcttttctgttctgggtctcagttttcctagtttcccaaagaaacaaatgctccaactgtggctggcttcaggtagggattcttttttttttgttttgagacagggtctcattctgttgcccaggctggagtgcagtggcacagtcacagctcactgcagcctcgacctcccagactcaactgattctcccacctcagcctcccaagtagctgggactacaggcgtgtgccgccatgcccggccaatttttgtttttatagaaacggggttttgctgccaggcgcagtggctcacgcctgtaatcccagcactttgggaggctgaggtgggcagatcacgagatcaggagatcaagaccatcctggctaacacggtgaaaccccgtctctagtaaaaatataaaaaattagccagtcgtggtgtggtgggtgcctgtagtcccagctacttgggaggctgaggcaggagaatggcatggacccgggaggtggagcttgcagtgagccaagatcacgtcattgcactccagcctaggcgacagagcgagactccgtctcaaaataaaagaagcccgggcgtggtggctcacgcctgtaatcccagcactttgggaggccaaggcaggcggatcacgaggtcaggagatcgagaccatcctggccaacacggtgaaaccctgtctctaataaaaatacaaaaaattagctggtcgtggcgtggcgggcacctgtagtcccagctacttgggaggctgaggcaggagaatggcatgaacctgggaggcggagcttgcagtgagccaagatcgcaccactgcactccaacctaggcaacagagcaagactccgtctcaaaaaaaaaaaaaaaaaaaaaaaaagaaggccaggcgcggtggctcacacctgtaatcccagcactttgggaggcctaggcgagtggatcacgaggtcaggagatcgagaccatcctggctaacatggtgaaaccccgtctctactaaaaatacaaaaaaaaattagccgggcttggtggtgggcgcctgtagtcccagctactcgggaggctgaggcaggagaatggcgtgaacccaggaggcggagcttgcagtgagctgagatagcgccattgcactccagcctggcccacagagcgagactccatctcaaaaaaaacaacaacaacaaaaaaaggattttgccatgttgcccaggctcatctgaattcctgggctcaagtgatccacccacctcagcctctcaaagtgctgggattacaggcatgagccactgtgcccatcccagtagggattcttaaaatcccttctcaggtgggcggtggctcacgcctgtaatcccagcactttggcaggacaaggcgggtggatcacgaggtcaagagattgagaccatcctgccaacatggtgaaaccctgtctctactaaaaacacaaaaattagctgggtgtggtatgtgcctgtaatcccagctacttgggaagctgaggcagcagagttgcttgaacctgggaggcagaggttgcagcgagccgagatcgcaccattggactccagcctggcgacagagcaagactccgtcgcaaaaaaaaaaaaaaaaaaaaaaggaaagaaagaaaaaatctcttctctttcctcggagtgcttcttcctattggtcatcagtgcacacagtcactgcgttcctgctgacatgaggctgcctgcctggactcctcagcctctaaacaggattgatcactctgaaatcaggctaatccacctagtgattggggtcattagtgtcccatcttgagagactgctgcagtaccgttagacactgccaaaagcacaggcttgggggactgtggtatgtgtcttctcccttctgttctcatgacagatctgccttgcgttctaggccggtgggcaggcaggcagagagcattcttagagtgctgcagcagcagaagaatgtctcacccatgtctgggtggaaaccccagcatggctgtgttttcagtccaggatttgaggtatcattgtgggagctgccatgtagaatgaggtcattgagcgttcccctaaagagacgaggatttagcaaggaattttagaggctggaggttctagaactgaagttttaaaagcaattcctgcactgggaagcattgtgtcaggcactgactgaggcctgtaaactgtgacaccaccctgtttgcagattgccccaaggccacctttgtgtatctgagcctctggggatgttctaccagccccggtatttgctccacaggatcacatggtttcattccactgaagcatttttctagcaaaagcagctgccgggtgggacgctgactggggataaaatcctgggagtatgctgcttttcttctgaatgtaacccacagccgtgtctctctgggaagtactggtgtaatagtgtctgggtgggcagaccctggctgggccctggggtctgtccgcgaagtgctctaagtctagcagagaaagagcagtgagtgtgggatggcatcagtcacagttcagtgagaagcctgtgaggactgttgggctgcgtgggcagaaggtacagctagaaaggccaacctggcccaagggtagaaattcttgtcttctggggtggggagtttgaaacaagggtggagcatgaagggttgtgttttcttagggagtcagcctggggccatgtagatggttgattgatgtagcagtctgagtctgcctggactaggagggaaagggccagaagatacggaagaggcaggccctgtgcctgaggagatatgcacgggggtgcagggagccgccgaatgaccagggattctctcttgagggcctgatctgtccttgccatggatagatccagggtgatcagctcatctcactccatctcttctgtcttgcctccagactcccaagacagctgggctgcgaccaatggaaacaaaggmcattccagtagtgcaccagctcctcaccaggtacttgaagcaatttcaccttacgcccgtcatgagccaggaggaggtggagcactggttctacccccaggagaatatcatcgacactttcgtggtggaggtgagtcagggagtggtgttccaggtctctaacacgttcccagagaggcacccccctgagtggccgggttcccagggctcgagtgttggcaccttagacttccttgaccatccgtgtttggtcctccctaaaaacagggagttggtgcttgaatttgctgaaaagatacctctggatctggcttgagcccttctccccctctgccccactttgataacacaaaatagagagaactgagccccgcttaatccttcaggaaagcctgcaattccctgcctgtcccagcttaacccagtgctgaccagacataggagacacagtctggggggatgtgagctgcaagaagaggtccctggcggtgcccatgctgggaaagaggtctggcaggttcagcccacgatcacggctctgtcctcaagtgccctgagccaatgtccctcctcctccccacatgtcctgttgcagtttccagccatttatctagagggkcagagctgcctgaaggtggagtgagagaaacattttgttcccgggccgcagtgccactgtgcatgcttgacattgcctctttattgccttcccttcagaacgcaaacggagaggtgacagatttcctgagcttttatacgctgccctccaccatcatgaaccatccaacccacaagagtctcaaagctgcttattctttctacaacgttcacacccagacccctcttctagacctcatgagcgacgcccttgtcctcgccaaaatggtgaggagcagacgggggkgtctctggagatgtgcagggaaggggcagtggagccatggtgagcacagctcccgggacgcrgcctcccatgggctggaggctctgagccctcctcatctgttctgcttaggcagggttcccgcagtttttaggcagaaactcaaaacttggagggaacaaggagcatccgaagtgaaggcattgaactcctcctgattcatttcagtgagtttcgttctcacaggaggcgccaccaaggagcctgaatagccaggccttccctgggaggacagggcttctcctcacagctttcccagcgtgggaaaggggtgattgctgtctgtcgtggtgagtcattggagcatccaactgccagtagcggatggcgagcccgtctgtcagtgctttgctgtgggttctggtaacctgtgcccagcccagcccagcctgctgtaggcaatctggtccctgccctgtgagagcttctgctccagttggtgaggtttaggaagcatcttcacagtctccaagcaacacagcaggtgtcatacaacatgaggtgcactgagggcctgagagttggggcatccatggagtaaggaagcaacacaaaccccatgtagctgaccagagccagcttctcagaggaatgggctcagggtttggactccagagaggactgtggaaattactagagtttcagggaggcataaccaggaatagcaagagccccggcctggacactgagtacatatgtgtacactctgagggacactgggcagaggccaggctggagggggcgctcagagtgtcctgagaaccacccggagagcggggattaacgtggaagcagcggagcttctgagggaaccttgttcttgtggctgcccacaggacagctttgaaatggcagcaaaggggtaggaaggaggctgtccccacctgtcctcacctgttcttgtttgtccctgctgctttgcagaaagggtttgatgtgttcaatgcactggatctcatggagaacaaaaccttcctggagaagctcaagtttggcataggggacggcaacctgcagtattacctttacaattggaaatgccccagcatgggggcagagaaggtaggcgacacatagccagagtccaggctgcccggcccagggtgtccatgtctccagcagaaaccgggccatgggttgaggagacagccgcagtctgggtccttgttacctcgagttgaacctttgaaaatgccctccctctgctggccagaccagcaggtcagcgttcccctctcagcaactggtgtgaggatggcagaggggacagagccacacagtagcacgaagatcatctccaatgaggccttcccacgtgagggaaccgtggaagttgagttgcccacggtttgccaggagggtagggctgggggaactctgaggaggtttcctctcctgagctgctgccctcttctggcatgacactttcttagcccttcctcccccagtgccacaggggacataggggtgagctggagcgtgggccagttttccctgggaggtctgakggacgtgtgaaccctggtgtggaggttgagtgtggggccggctgggtgtgagtctgctcccacagcacaggcggtggacccrggcccagccactcggaacttcagggatagggggtgtgggagagtctttgggccactgtcaactcagctctgcctctccctgttggctttcctaggttggactggtgctacaataaccagtcaccagtgcgattctrgataaagccactgaaaattcgaaccaggaaatggaaccccaccactgttggtccaattttcacacacgtgagaatccctrgcaaagggagcagaactgaaccggctttaccaaaccgccagcgaacttgacaattgtattgcgatggcgtgggctgcgtgacgtcacctccggtcgtgtctctggtctccgtgttttccagttaattacatcctcatgcagccgtgatcaagggaatgtaactgctgaaaactagctcgtgattggcatataatggagttaacgggtgaataataaaagtatatatatatattatatatatataaatattttaaatatctttcatgttccaaatgtacaaggatgtttggtctttaatgaaaagctgaatccagatcattcctcagaatgaggacccgaggacagtggcagacagacgcgttggcacagttcatggtttcctccagaggagacattggcttatcatggggaaaaagaggatctggagaacctcatccagctccccttctgaatcagctgggatgactggctttgagaaggaagggaagatggaacaggctcagatctcatgggatagcacgtggagctcttggctggggctgaccctgggcagggactttcctgcagggccagacctgcctgcattctgagacaaagcaatggacggtccgcagaagcagacytcattgattgagtcctttcttccatccccttggcctgctccctgtaggaagtcatcctgccaactgatttaaaagggctctttagccagttgttgccaaccttatagggatgagtcccctgtgagattttgcttttccactgcctgggatgatgcagtttgaagaggcccttggacctccttgtaacatcagggacctttggagaccattatcagtgtaagccctgcttagctcatcttagagcaaagagccagcaccctgatgtccctggggtggctaggcaggagtggcgtggggccaatacccagaccccttcagccaccagcccctggcctgtgccttccaacccattagccatttcttgttgtgcccctttccaagatacagcctgcaagtggtagcaagaagtgattagaggcagatctggacttggcaacagaagtggtttcccatctccattgtctgagtctgattttcgctgatgctgttttgtggatttttgtggtagtgatggttgtcagtgctgccagtttcccaaaacgtaatcaagcctctggtcacatggctgtcgatgtaggcattctggagtggtgttcagccaagtgaccgggcaaaattgggctgtgaaattgtacttccargcttggatgtaatttttgctctagagagaagcaagtggtgggaaggaggtagcatgacgtgtggtgtgcgggtttccttgctgccgtcacctctccgctcatacaggaatgaagccttagccaggaggccaggctcagccctgtgccactcaccgaagccactttctacaggccagcaggggcttgttgcaggctgtgggttttggtgtggtttgtcagaggctaattctgcagagtttccaaaaccagaagacatcgtatgcttgggatgggggccgtgccacccgtgggaatgctgcccgctctgcagactgctgctagagccagcaactccactaaggtggattttcatcaggggcctgcagggccctcccttttcccattgttcctgcgctgcaaattgcaggccccagcaatcgtgactgacgtttgctccttgactccaagaaactgagaccaaagaagctgctgttcttagcaagatgcgcactgcattccacaggtgggaggagtcggagaggcaggggcttgctttgcagccccacagacaacagttgcacagtgcctcaagccccagagtggctcaccctgtccagacctttgaggatatcaaaggacaaagtgcccaagtctttcctaccttgggggaamctggaacttggaaaggctccctgtcctagtcttgatctgttctgggccaggtcccagcttgagctgcctctgagatttgggctgtgcggatctctggagtgagctctgtttcggttgacccaggtcatggaatggaaacggtgaggccccagtggctgttctggaagaaacagatctcctggcaaaggccccagcatctccctcactgaaaccaggtgsccggctcctcggactctgctttatgttgcggtgagaactctgcccaggtgtgcagggtttggcttgtgggctgcttgctgctcatctgatttttgtcccagtagtccctgcgttcttcattcaaccccttctgggacttcagctcagagagcaccatcccgggggtcagggcctccccacaggagccctgcagtgtggtagcgccatggctgtctcaaaccaagcaaaggaaggaccctgaggccttcasgctaaccstcctcgagcaactgctgttggaaggcctccctgggcctggcccccaccctctgccacccagtcctcccagctgccatgtttcaaagacgacctttacctcctgcctttggattgactctgcatttgaccacggactccagtctgtgtgtagggagagagctgagtaggaggcctccactccggatcgaggcctgtatagggctcgtttccccacacatgcctatttctgaagaggcttctgtcttatttgaaggccagcccacacccagctactttaacaccaggtttatggaaaatgtcaggccttccccacaactccygtctaactgctgtcgcccccctacttgctggctctcagaagcctaggggagtccctgtggtcctgaattctttccccaaagacgaccagcatttaaccaacctaagggcccaaaggccttggacaactgcatggagctgcactctaggagaaggaggggaaccagatgttagatcaggggagggagcaggagtgtccctcccgtcagtgcctacccacctgtgaggcagccttytgatggcctggcccaccttccccagaaccaggggaggcctgaggcttcagttttactctgctgcaaaatgaaggcgggcctgcaagccgactacacctacggaggctgttgaggacaatttcattccattaaattaaaaaatactgactggctggcaggcaggtgccatgtctgggaacagggacgggggagcttcacctttttgtcttggcttttctttgggctgtgggggggcatccatttccagggtcggggaggaaataccaaatgcattgttgttctgctcaatacatctcacttgtttctaataaagaaagcagctgaacaaaaccttctgtcctggtattcctggtcagcaggtggcagtggaagaaatggagtgctggagcctaggctggagccaggacgacagggcttggacacaaagtccctcaagcccacagcaccaggccagcttccaaaggccttcctttaaggctgcccttcttccagggcaaacttggtgttgtcagacccttcccacccgccagagacgagctgctattgacccaggttcactccaagttagagcagcaactgggctctcagccagcacctgagcacctcagcacaggagccggcccaggcttccctagctgggcacagagcagcccccttggtccaggtcagcagtggctcctctggtggaggtgcaggccccgtgccttcccactgtgcccaggtgccacatctctcctcctgcaccactggccgggtggttctttgagtcactaggggtgcattttaacatggcaagttgctgggccccagtagctgtgtttaagacttcccattccccctcttctcatcctctggaacttacccattccctgaccccctgatcctttcaggtccatgactggtgcctccaagcccctttccagggaaactgagaggacacaggacctgcctgacccctctaaagccccccaaccctcctgtcccaaaccaagtcactcaggctcctatggcccatgccttttttcctgcccttagctttgggctgagagaacatagccctatgtgttgtttctacccatgggcctctgggataaaaagctgtgatttcaggctgggcatggtggctcacgcctgtaatcccagcactttgggagggcgaggcgggtggatcacgaggtcaggagatcgagaccatcctggctaacactatgaaaccctgtctctactaaaaacacaaaaaaattagccgggcatggtggtgggcgcctgtagtcccagctacttgggaagctgaggcaggagaatggtgtgaacccgggaggcggagcttgcagtgagccaaggtcgtgccactgcactctagcctaggcgacagagcgagactccatctcaaaaaaacaaacaaaaaaaaaaccctgtgatttctcccttgcttctgcttcccagttcacttccttaaagactcttgcccttttggctgggtgcagtggctcacgcctgtaatcccagcactttgggaggtcaaggcgggtggatcacctgaggtcaggagttcgagaccagcctggccaacatggtgaaaccccgtctctactaaaaatacaaaaattagctgggtatggtggcgggcgcctgtaatcccagctactccggaggctgaggcaagagaatcgcttgaacccgggaggcagaggttgcagtgagccgagatcacgccatcgcactccatcctgggggacgagcaagactttgtctcaaaagaaaaaaaaaaaaagactcttgccctttcaaggcagccttctcagtattgggccctcatcctagccttcaccccttcctcttggtaccagatacgaaaccagagaagccaagcaggatgggcactcagccctgggtctggtgctcacctgacccagaccccccagccagcccctggccagacctggctctgcaggggctgggcaatgctaatggctcttcatttgctaaaactggacttagcctcactgtgcctcccatcctgaggctgcagtttggcagcctgaccctctgacagccctgagtgccagatgcccgggctgcctggcccggcccgcctggctcggcccattccttctgggcccttttgattctgattatcctctttcagacacacaaattaaccagagccaaacgccactcccagcatgaaggagcgggggacactgccactttctgcattagttcttggagttgctagaaggtggagtctgccccagccctgtgttttggtttctgtggggcttggggccagttcaaggcctatcccagcccagttccaggccaccctctggggactaatgtcaagttctgcccttgtccagtgccggcactgttggctggcagaacctaaaacaccaggcctccacatttcaccctgctggcaggggcgggtgcaggattttctccagattctgtcgcctagtgtccagtgcgctctcctggcatttctatagaggcggcccaagcagcgtttccagcctttgtgtaaaaggctggctggctggaggaagggaagcccgtgtccttgggatttgccctactgagcagacaggggccttgagcccagccaagcctggagagtggcagtctgagggtccctcagactcctgtctcctcctcattcaaggcccctctgtgtatgtgtgagtgtgtgtgtgtgtgtgtgtgtgtgtgtgttgtggggaggcgctgacctgctgaattggcatcctcagacagtcttgtgatactcgcagcagctttaagccaggagcagggatcgggctatttagagctgtggcatctcctgctgccaccccctggctgtcttagccaagtccatgccctgttgaggggagaggcccaagaaactcatccagccctgtccctcctcatgggcctgtgggggtggcagcatagaggtgctcagggagtggcggtggtgaaatcaacgtgcttctttattttttaaactagataggctcattctactgtcttctccagggctcttctatgaaacagttacaaacctacggccaggccaggcagtggctcacacctgtaatcccagcactttggaatgctggggcaggaggatcacttgaggtcaggagctcgagaccagcctgggcaacatagggagacccccgccccccccgccatctctacataaaatttaaacattagccaggtttggtggcctgtgcctgtagtcccagctactcaggaggctgagatgggaggatcgcttgagcctgggagttcaaagctgcagtgagccatgattgcaacattgcactccagcctgggcgacggagcgagaccctgtctcaaaaaataaaaaccaaaacctactgccagtttccccagggcttcatgcctcagcgctcccttcttgctttgagaagggaaggggagctcaggttccggagctggagggaggagtccaggaaggcctggggtaaaggagggcttaggggctaagctcggggtcggggccaagtggagtgactgcgctcctctgggggaaggaggctgggatggcccacgggaggacagaggggaactgagggcccacaagtgtcctgctccccaagtctcctggcagcaacaggcttgctcctcataagtcacaatgaggggtgggctgaggacaagaggagctggggccatctcagggccccagggttggagctcactgaagtcacatgaacacctttctgttcttcaggaggggcccaggcagccctcagcacccaggtgagaccagcgcctggtgaatgggctgagtgggccaagtgggtgggctggggggctggtactcccaccacctgactccagaggaggagagggctctgcaggggatgtggactggcactcgcagaaccccaaggcgagtgaggtgggccctcaggagcgctggatgcggatttggatgaagagcgtggctggtgacagtgaggccccgtccttggaaagcaggtgtatgtggcggtaccctgtagggaggacagccaggcctcaggtcctctgtgcaccctgggggtctggcccagcccgggcctgcttcagggcaggaaattcgaggcacaaaggtgaacagggtctgcaggacctggacccacatccctctccatccccaccagcctccaccaaccttgctttaggctgctaagaggcagtgtaaactggcccacaaagtcattgggggaggtggcgtcataatcttccaccacaaaccggaccagtgccagctccggagcccgcagctggaactgcagggtctgcccccagcgggggttgaagcctagggcacagggatggcagtcagagcccaggggccccaggacccaccctgcaccacccttcgctctctgcagtctcccccaaccccacttccgccagtggctgcccaccattgttgagcacgtagtcagtctcctgccgggcacagtctgcgggcaccccatggatctcaatgcgcaccagggggtccacaatggagtgtggcttctcggcattcagcttgggcagctgctgtgcagtcagcacctgtgggtgagggagggagtggctggggcccacgcccaccttggccatcccctcatgggcctcaagctcacaccaccctcacttccaaatgtccccagcctcccttgccttcctccacctcacaaagagcctttctagaaccagtctgaccccacactggggcccgttccagcctgctgacctggatgctgagagtggttctgggaggtcctgggtactcggggtcaaaggtcgagtcaggttgccgcaggcaggcaggttttaggacgtagccacactgcccattgactaggaagcgcccggcattgaggtccatctcgtagcctggcgtctggaagttcaaggccactgtggacacagcagggtcagagcaggggctcttagcggccctgttctcactactcagtttcaggggactgcattcctctctacaaagggcctggggtcccactgtctgcttagtgctgctctgctcccaccatgactttaggggagggggtcatggacccagcccccactgtcacctgtacttctgccctgggatccctcaagactggggtgggaggtactaaaaaagcccccaccctcagggccaggcttgggtcagagccaggggtctgaggaagcctggggtttccatccttaccccaaggagacgatacagccctcctttggtggggctcagcgtcccccagagcccacccttgtcagtgttgacttagtgggactgccaggtgtgtgggggttgtgtgtgtccgggggacatgggagtggagattttaatttctaccatgataaaaatgcgagacctgtacactgtcaagaacaaacgagcctgatttgattttcccacctacattgctggcaactttaaaaataatcaacaaaatgcgtgtttccaccgtctggaaggctgtgtgggcccctcactgctgaggcctcccccacactgtggcaccccgcctgctctcattcctgtggcccccacttacccagctgacagcccgagttccacatctcctggggactgtagttggctgagttcatccgcagccccagcgggtacacgcgggtcagctggcgggcattgtgcctgacaaagctgttccctggggcagagttggggtgagaccgtgacagactccgggggtccctcacccaaagccccggcctgtaacctccagggaacagagcccaagcccgtccccaggtcaccctgcccccgctcctcactctcttctgacctagagtgagaggggagctcactgaggaggctgcagggaccccctccagccacacagcctggccctgcatccccagcccccaattcccagctcctgacaaagttccaaccaagtacactgaatgcccacggccctccagctccactgtggttcctggaattcttctccaggccaaggccccaggccttcaacaacctgttcctcctgtctggaaagcgctctcccctcttcacctggctgcttcctagtcctccaggtgatgtgtcctctcagcatcacctgccccaggaattcctccccagtgttgcagcagctgctgggctcccccagcccccagcccagcctgacccatcaccctctatggccggccccaccacagggctctgaaggcagacagcaggccgccctcagcgtgccactcccctccatccaccctggcatgtgcggggccctcattccctcagcccagcccctctttggggtcctcttgacctctttactgtcccccaaagc

SEQ ID NO: 95388 - DNA, 49657 bp, Homo sapiens
  misc_feature (1)...(49657): n = A,T,C or G
tgtatttttagtagagacggggtttcaccatgttagccaggatggtctcgatctcctgacctcgtgatccgcccgccttggcctcccaaagtgctgggattacaggcgtgagccaccacacctggccaatttttgtatttttagtagagacagggtttcaatatgttggccaggctggtctggcactcttgacctcaggtgatctgcctgcctcggcctcccaaagtgctgggattacaggcgtgagccactgcgcccggcctttttttttttttttttttttgaggctgagtttcactcctgttgcccaggccggagcacaatggggcgatctcggctcactgcaaactccgcatcccgggttcatgccattctcctgcctcagcctctcaagtagctgggactacaggcacctgccaccatgctcggctaattttgtattttgtatttttagtagagatgaggtttctccatattggtcaggctggtctcttaactccagatctcaagagatccacccacctcagcctcccaaagtgctgagattataggcatgaaccaccacgcccggcccaacctttttttttttaaattaaaatataggtaactaattgttttctctgccaggagagcaatatgctagttaaatgtttcaatagaaagtgaagaaataggaggccgggtgtggtggctcacacccatcatcccagcactttgggaggccgaggcaggtggatcacgaggtcaggagatcgagatcatcctggctaacacggtgaaaccccgtctctactaaaactacaaaaaaaaaattagctgagcgtggtggcgggtgcctgtagtcccagctacttgagaggctgaggcaggagaatggcatgaacctgagaggcggaacttgcagtgagccgagatcgcgccactgcactccagcctgggcgacagagcaagactccatccctcaccccccccccaaaaaaaagaaaagtgtaggaataggctgggcttggtggctcacaactgtaattttgggaggcggaggagggcgcattgcttgagcccaggagtttgagcccaggagtttgagaccagcctgtgcaacagggtgaaaccctgtctctccaaaaaaaaaaaaaaaaaaaaaaaaatagccaggcgtggtggcaagtaccagctactcaggaggctgcagtgggaggatcgctttagcctgggaagtggaggttgccgtaagtccagatcgcgacactgcactccagcctaggcaacagagcaagacccatctcaaaaaaaaaaaaaaaaaaaagccaggcgcggtggcttatgcctatattgccaacactttgggaggctgagacgggcggatcacttgaagtcaggagttcgagaccagcctggcaaccatggcgagaccccgtctctactaaaaatagaaaaattagccagttgcagtggcgtgcacctgtaatcccagctactcgggaggctgaggcaggagaatcggttgaacccaggaggctgaggttgcagtgagccgaaatcacgctactgcactccagcctggcgacagagtgagactccgtctcaaaaaaaaaaaaaaaagtatagaaagtgttaaaactgaaattttgaataaacctcatcattgtgagaatataaatgcaaaaaaaaaggtaaaatgctagtgcctttgaaagcaaaattcagacatacttgcatagcttaaggtaaattgatgtatgagagttatttgtaattagatatttgtgtatatatatatttttgagacagtttcgctcttcttgcctaggctggagtgcaatggcgcgatctcctctcactgcaacctccacctcccgggttcaaacgattctgctgcctcagcctcccgagtagctgggattacaggcatgtgccaccacacccggctaatttttgtatttttagtagagacggggcttctgtatgttggtcaggctggtctcttaactcctgacctcaggtgatctgcccacctcagcctcccaaagtgctgggattacaggcatgagccactgtgcccagcctagatatctgtatatttgaagactgggctgaatttgtcttctaaaacatactttttctgatgataaatgcatttatagtctttccaagattcattttctaaatatcatttttctaatactaggggaaataagattttcatagctgaatccctctttaagaagagggtctgggctgggcgcagtggctcatgcctgtaatcccagcactttgggaggccgaggcgggcggatcacctgaggtcgtgagttcgagagcaccctgaccaacatggagaaactacgtctctactaaaaatacaaaattagctgggggtggtggcacatgcctgtaatcccagctactagggaggctgaggcaggagaatcgcttgaacctgggaggcagaggttgcggtgagccaagattgcaccattgcactccagcctgggcaacaagagcgaaactccgtctcaaaaaaaaaaaaaaaataaagaaaaagggtctaatatcagagataatcactgctgcatcttacagttcagtcaaaatgaggcttcagctctgcactgtaaagccagagggcactgttgctgcctttccaagcagctgtttttctggggctgctgcatgacgtcatagcagaagaaaaaaacacgaagaaaactatttcaaaataaatgtttaatataatttttagaccaaagaaaaactcaatcatacattgtctccagtggaccatatgtgccagaacaggaccaactcagtccagctttgaaggccctgattcagtcctactggtataatctcccttgatttattgatttgtgtatgcttcttatgcaatacaaggtgcattttactcttgaagtccctatcacctccaccatcgccatttaactgcaaaagcatgcttcctaatgggagggttttcttcccccttccctgcagaggttctgaaccttcaaggagtttgacaatcttatgaatctcttgaaccttctccccagaaaaatgtacatacaagtctacaaataatttcatggggttcatggaccccaaggcccacaatggtttctaaggccccaaattaaggaacctctgtgctagtgatttgagcaacgcaattgccctcagaagacactgacacagggcaggtgaaggactgggttaaccaaaatgacaggaggcaatctcataatttctgtttttattttggggcaaaatttagttctcagggcctccctacgtttaagagcagaactactcaagaacctaagcagctatcagcatagtttaagcgatttagaatagggctgtgcaaggggatgtacagggttcctcattcagctgaggacctcatttagctccttaactggaagctttacatttgatctgcagtgaggggacatttctaattttagtttgacccacatggaaaggtggatagctttttttttttgttttggtatagagagcacgtagaattggacaattaggtaaatccttggaatcccccaaacagccatttgctttataaatccagtatttcttacctctgaacgtcttaaagagctgcctcacaaattaatctaaccattgcttgcactaagaagtttgccaagagcctcttccagccttactggggggaaggaagagattactgaaaaccaacttgtaggaatgaaatgaggctgtcagttgtctaacctaacaaactgccaaattaggtttacattttttgttattagacttttgaatggccgaggcagagttaaatttaaaattttggattgtagccactttccactcgcctaaacactcaataccggtttgtttatttttccagcatcaagaaagaaaaccaaggcactagaaagcaagcacacttaagtattgaagataattacatcttaaattttgcctgaactgtatattgtagcatacttaaacccattcaaggaaaaaattggcaaattgaaaattctcccattaaagattgatatttttgcaaactracaaatttaacgatttcggtacccctccccaaaaatgcagtcacataaaatatatcaatactattttgaattagctctagaaatcacactgaaactatgttacatttacaaatattaaatttattataactaaaatgaatttaattgttctcagatttggccaccttatagctccgtttaaggaggggatttgttaaaaacaaaaatgcattataacttggtcaaattactttcacattaaggaaaaaaacttctaaaaaggaaaacaagaaaagcaactcttcagtttcacataattaaaagaacaggagaaagcacgcaagctacatatagctaaatttacgaaaccaaccaaagccagggggatttctcttctgattatgtgtcataaaaagktccactgtcttatatacacatgtatataatgttacattccatcactgtaaaaagtcccctttgccccctcccccaaaaaagtttcagtctagtctccaaacttggaaagcggcgctcgctcctgctgccggtgcagttcgttctcggtcagcagctggaggttctcggcgcgcagccggtccagctccagctccagctcccgcacacgcgcgtcgtcgccacccagccgcttgctctccagccgcagccggttgttctcgtcctccatgcgcgagaggcacttctccagttccaggtactccttgatgagctcctgcttgctcatgttctgcaggctctccgtgtggtaccgctcgtacgtctccgagaagtcccgctgcagaaactcgctgccgtcccctcccatcccatcgctgcccccatcctcctcacccccttcttccatgaagtcgtcatcgctggtgtcgtcggatttggcggcggcccgcttggagtacaggccggttttgagrtccggctcctcctggtcgtgatcatccatgaggaactgcgtggtgttatagggcgcgaccggctggcccttggcgaacatctcggctcggatccttgaagctcgaaggctctgtttctcgtcgaactttttcttctcttcccaggtcagcttgtagtacggtttccaatgccgcttcttcttggacgggcgtctcctatgttttttcttccccagctgtctctgctgctgtccccactcctcttcgccccctgcggcaggagcccccaacttactggcctcggagtcatgacaaggctgggcgagcagctcggcctcgggcgtcggttccacttctgccggcgcgggaagtcgcgccagcggacgagtcgtccccattctggcccttctcgccctctctcaggcagctagattctggacaggcctgggtctgcaagggaggtggttgggattccaggctcccttccccctccggccccggacggccacccaactgggggaacgctctcgattgccacctactgtcctcctcgggcacccgctcctccgcgcctggggggcgctcagggttcagctcttcctggacagcagcagcacctgtacagttgctagtttgaggctggtgttgatattctgacaagaatggctcggccatggctagtagagtcctcgaagtttaagaaattttggctagtaagtccttaaggaaaaaaatgggtttttcttaaaaaaaagaaaaagaaaaaaaaaacagtccaacagagtcctcttcagtttgtaattcctgcagtgacgcctttagctagtccttctatcagcaaactccaactgcaatctggggagctcaagtcagtaaagggttaagcgcccacagtgcggccagctagcgggtccaagggggtgcagcggcaggaacagtacgtaatgggcggaggtgggcctcaaacctccaagcggagcaccccaataaaggagttggtgagcaaggtgatgagggtaagtccagtgcgtgaaacccagccccgaaggggttaaaactaccgatgacgctgcctccgaggggccagatccacaaagggttaaatcccctgccgcagagcccacaaggggttaaagtcccggcgccacctcctcccacttccacgggtgtcgcttccacccaagctcccagttccctaggcccggccgtagcctcagcagaggacagacaaactcatctcccctttggctcgatgctctgctctgctcagttctcctccgcctcctcctcttttcctccctccctcctcccccttcccacagctcctcttccgcgtcctcccccgactttccctcccaacctgcctctccacctgccaacttccaactgctgtctcccagtcctctgcgccccttttatatagaagctttttcgccccgcccgtgcgcatgcgtaacggagttccctttgcggggcgccgggagtcgtagttcttatctttcgggcccgccgccctcgcgcgccgtgcgacgtagccaatcccaggacgcgtagggggcgtctccctggccgccaccttccatcgcttagacctcgctaaagaaacgcgagcggccattggtgaaaaatcacacgactsgctgaggaaggacggccaatcgcagagaagatggggcgggttctggaccgtaccattctgtttcaggaatacgagaagattcgatggcctatgagagtcctcacagaatatttttatgaaaaggtgcgttataaaggctattatcgtattttgttctcagcggaggggttcsgaaggttatgaacctttattaactaacgcaagaatggtttattcctaaaaagtagtccctaaaatgtaaaagaattaaatcctataaagagagacgtcggcccacggctgctaactcgcgagtcttaagattatrgaaatggcttcaaggcgggtggtgagtgcctgagactgacacttgcggaaggatatcgcgagcacattttgtaaagaccgaagagcgcatgaagaagtaaacaaatgaagaataaaaagtgccgccttaaagggacagtgtgactgcgtttagcgccgcaggctcgcactaggcctcggaagacgaagaggcgggttcgagtcccggtgacgcgactcccggactgacctcggtacccttagctgaaggtggcggagtcccagccccagcctggtctcagaaagccgcccccgccccaggggcaaatgcaaactggtgattcgcgaccaaggctcttccctgggccgagatcggaaagccggggccgggggcgggcgggggagtggagggggaagcgggggaaggccacgcccccacgcctcagcttctgtcgaagaaaatggcctcctggggccgatttggtcttttcacttccgaccgagatcatttcctgagccgggacagaggaggtccgggacagccatgaggctgtttgttgggaagagttcggaatgattaatgagttgaaatcatcagccctggctatccgagagggaagcaggtctcacccgcagaggcccttcctcatcagtgggcgctgggcaagactgggagggaagcatggaggaggccttgctccgaaacttgctgcaggggattctggcgcagggctgggggggccgattcccccgggggcgtagtttctcagagagaaattctctagacccaagcccccagccctccataaacagggactgagaggacccagagaaccctccataccagtcactgaggcctaaaatcttggcgccctttccacttctccttcgccacacacccagtgaccctttcttcttattgcttccttaatagcatccctgacattccagcacgtttgcactgtgtaccttttacgcacagagccatgtgacctcaccacagcctggcaagttagacacgataggaatgagtgtctccattttacagataaggcatctctaagacactggaaaataagtgacttgtccaaggtcacatgacaaccatggggcagttctggctagagcgctggtctttgtgacccccccgtgccatttttctttctgtcacaaacacaaaacccattttttcttaaaatcggggaatactctggatttcgttctttttattcccaacaacttcaaccttattcagcccctatatcacttggcaaacaggagggtacaaagaggggtgggatgccattcttgccttcaagttgctcctggactgtggagaggccatcagaccacagccagcctaaatggcaagtgagggaaatcctggtgggagctgatgagccgagtgcatgggagctgggaattatggacaagtgtcaggagcaagtgacttcctggctggctctgaaggatgaagagctttcaggcaaagtggcacgaagaggggcattttaggaagcccaagcatcatgtgccaggaaagggctagtctgggacttcggtggctctgggcagtgtgagatatcgggggtgggggccagtggtgatgggcatggccaatgtagatgcctctaaggggagccgcaagcacgcgggcctctgggcacagctatatgttctgaaaatgaacaccttcatttgttttctctgggcttccaagaattcgggtccacctgaaaagttcgccactccgtgtggcttcatcccttaggaggcttcctgagagcaagaactgcccctcagagcactcctggaggaaaaagggattttgcagataacttggttatcacagagagttatcacagagacctccaaattgttaccccatcttcagactccagaggattctggggtacccccagtcagggcatttggaaggcactgctgagcctagcctcagtgtcctggactgggctccactgtatggtctcgtgttctattgggggagaggtggactgacgaataggttgtggaattctagaattctgtcaaggggccaggcaaccttactgttagctgggttctaaccctttgccaggcatttaacatgccccatcactggtaaaccccaggactgccttatgaaaaagagatcaactctatttcacaaaagaggccacccaaggccagagcagttaagaatcttccccaagggggccgggcgcggtggctcacgcctgtaatcctagcactttgggaggccgaggtgggcggatcacgaggtcaggagatcgagaccatcctggctaacatggtgaaaccccatctctactaaaaatacaaaaaattagccgggcgtggtggcscccgcctgtagtcccagctacttccgggaggctgaggcaggagaatcgcttgaatctgggaggcggaggttgcaatgagccgagatcgcgccactgcactccagcctgacaacaaagcgagactcggtctcaaaaaaaaaaaaaaaaaaaaaatcttacccaagttccacagctactgtgcaagtggtggagctggcttcagctccaggcctgcatcccccaccaaggtggccctgctgttgtctgtcctgcttgctgcagtccagccttatcacaggggctattcagcctgtgcttgtgaccctgggctgagccgtgcaggtgcagagcgcaccgtctagcctcagggatgccttcccggctttgagaggactgacgactaaagagtgactgtggcttccagtggggccaatgatggcgaagcctgggacggtggtcgagactagaggctgacagggaactcaggagtttaaggatctcagccaggggccttcagaactgcctcttccttacccaggggtaggaaggtcctagggcccaggtggtggcagcggcgggggactgcggtagagaccctggccagtggacttggaggcgctggcaccaggcggccctcagagcggccagtttcgccactgaatacaggccggaccgaggcttgagccaagacggcccacggacgacagggcttgtgctggacagagggaggccaaggcttctggcccgtaccccccgacggcgactgcacgcgggcgctcggcccaccccgacaggggcttccaggcgcgcagggccctgctccctactcagggcggggcgaggacgaggctctcgctgggccttggcctcccagaaaatcccctgggaaggcccaggcccggaggtcaaggtggggcaccgggaactgaggcagctgaggagggggcagcggacatttctggggccgggggctcggaaccccatctctacgcccggggcgcggagctggagcagccgcggtccgctttgggcgggggccaaaccagctcctcggccccgcccagccgtgctccgctcctccccgccacccccagctcgctcggaccccgcgtccccgacggggcggcgggctgggccgcgccctcggccccccgcattggccccgccttcccaagggcgccccgctcccagcccgggccacccttggttcccctccctctcccctccacacagaggcctgttttcccttcgcttgcccggggaggagggaaaatattccccattcagaaacaccaaccgctggcttctttcagggccatcaggggggcattgggtggggagcaggaaagggacttgtgcctcgctcgcgccgggccccgctccccgctccctccgtaggggaccagacagcagaagattctggttttcttttatttagtgaaacattcctttgtaagtgaatcttcaatgaagacgtcccgagtgtgtgtgggggcggagggggccggcaggggaggaaagcgagcaaactgcgctcatccccctcccccggggcctgctcactcctcccaactggtccgggcctcctggcctccctcccgcggcctcccagccaatcattcttccaggccccggcccaagtcccaacttgctcaagagctcaacctcctcggggrgaagcaggggtgggaaaattcgggtgacccagagactggggaaggcaggggctgagacccgatcgccccgcccccgagtcacggccaacccagcaccggggacgtgtaccacaactgcagcctcccaggggagcctggggtggttgcggggagggaaggaagcgtccctgtgaagctgcagggaggggtggggtcttatttgccccccgcgctgctttaggggaggaggtgcgaaggcaaacactgacaggacggggaattttgaatgctgttcttctaaaccctaggaaggctcagggcacagcaagatagtctcagttggctgcagagacccctccactgacagtcacctcttttgggtccraaacattcggaagagccactggacgacgaagggccacaggaggaagaagagcagcgcgggccccgggagcccaaggggccatggccgagcactgggcctgggctgcggcctctgcagccaagagggagggagtcagaggccagtccaggcctcagcacagcctccctaggaacctgcttccaattcagtggaagattggaaagaccctgcccctaagtctgcaccactagaaaggaagtggcccccaggtggtcctgacaggttgaatgccaactccctcccacatcttcctccccagggcaatcccagtatcaagagaggctggcggggctgcgggtagagggagcggcttccatgccatcttctctgggccacaaagcaatgacccttggtatgacctgaagacctgtgttgttaaggatgtgccacatatgtcaaatgaggaccctgggtacctagattttagtttccaagtatcattctccactaaaaaggagccaaggctccttggagaagtggctggttccaggcctggggcagggaaggtgggagtgaatgtggggcgccttgtaccaggaaagcaaggtcgcttttaaagattcatcaggtcgtgttataagaacataagatccggtatgaaagggtcttgaatggccaaagttgtgactgtctgagcataaaaaagaatgactgtggcagaccgggtgggatggctcacgcctgtcatcccagcactttgggaggccgaggcaggtggtcacgaggtcaggagttcaagaccagcgtggccaagatggtgaaacccgtctctactaaaaatacaaaaaaattagccgggcatggtggtgggcgcctgtaatcccagctactcgggaggctgaggcagagaattgcttgaacccggggaggccgaggttgcagtgagctgagttcacgccacttcactccagtctgaccgacagagtgagactgcatctcaaaaaaaaaaaaaaaaaagaattactgtggctcctgggaatactgaatctgtgaaatccatgagcccacagtgatactcaagagaaaactggaatttttgtcaccatttaggtggcttttaaattaatttctttctttttctttctttctttctttttttttttttttttttttttttttttgaggagtcttgctctgtctcccaggctagagtgcaatggcgtgatctcggctcagtgcaacctccgcctcctgggttcaagcgattctcccgcatcagcctcctgagtagctgggattacagaaacctgccaccatgcctagctaatttttgtatttttagaagacacagggtttcaccatgttggtcaggctggtctcgaactcctgacctcgggtgatccacccacctcagcctcccaaagtgctaggattacaggcgtgagccaccgtacccagcctaaattaatttcttactttaaaaatagataactaaagagaaagaatgaagtatttatcttgcctttccactgtatttcagggaaacccaagatgatgaaggaaagagtatacaaatgatagctgatagctagtagatgttaaaggaatcatagcatttaaaagtcagcttttttttttttggcaattactaaattattgactcaggcaaggattagcaattgtcaaaaactagcaaatggagttgatgggggactggatattctccgactgcaggaggaaaacatgactttacaatggtgggatcagacccccttcaaccatgccagtggtccatgctagagttactaataatgggacatccagatagcatgtgtcctctgccatgaaaaaacatcacctctgatgtagtctggtccaaaatgttgtggttttttgtgctttgcgtttttttgagacagggtctcactctgtcacccaagctggagtgcagtgacaccatcatagttcactgcagcctcaatctcctgggctcaagtgatcctcctgcttcagtccacacccagctaatttttaaacatatattttgtggagacagggtctcactatgttacccagactggtctcaagctcctgggctcaagcgatctgcctgcctcagcctcccaaagtgctgggattacaggcgtgagccaccatgcccagcccaaatgtttaatgtgactctaatcaagtgtttagatctaacctccagttcacaggaaatgtgtatcgaggaaccacccatgaggatgtaattagatccaaaaggtggaacattctataggacaccagcccagactggtcagcaagtcaatagcaaggagaaggactgggctagattaaaagagaattgaaaggggaacaaatgcaatgtgtggtcctagcctggaaaaacagagcagctggaaaaggcggtttcaggataactggagaaactggaatttagattggatatttgatgatattaagaaattaataattgtgtgtaataaaatgttgtttgggctaggtagaatgttcttattttgagagatatggttttttgtttgtttgtttttgagatggagtcttgctctgtagctcaggctggagtgcaatggcaccatctcagctcactgcaacctctgcctgccagtttcaagtgattctcctgcctcagcctcctgagtagctgggatyacaggtgcctgccacctcgcccagctaagttttgtatttttagtagagacggggttttgccatgttggccaggctggtctggaactcctgacctcaggtgatccacacgccttggcctcccaaagtgctaggattacaggcgtgagccaccacgcccagcctattttgagaatatgaacccaactctttcggggtggaacatcatgatgtttagaatcttttttttttttttttgaggcaggatcttgctatgttgcctaggctggtctcgaactcccaggctcaagagatcctccctcctcagcctcccaaagtgnnnnnnnnnnnnnnnnnnnnnnnnnnnnnnnnnnnnnnnnnnnnnnnnnnnnnnnnnnnnnnnnnnnnnnnnnnnnnnnnnnnnnnnnnnnnnnnnnnnnnnnnnnnnnnnnnnnnnnnnnnnnnnnnnnnnnnnnnnnnnnnnntaaaatcttcaacatttaaaagtagtaaatggtaggaaaaaaagaaaagggggccaggcgtggtggctcacacctgtaatcccagcactttgggaggctgaggcaggtggattacgaggtcaagagattgataccatcctggggaccgtggtgaaaccccgtctctactaaaaatacaaaaagtatctgggcatggtggtgctgcctgtagtcccagctactccggaggctgaggcaggagaatcacttgaacccgggaggcggaggttgcagtgagccgagatcatgccactgtacttcagcctgggcgacagagcaagactctatctcaaaaacaaaaaacaaaaagaaaaaaaaaaaaacagaagaaaagaaagaaagccctgttgagggggaggagcagtgttgaaaagttagccatcgtggatctgaggaaatcctgctgctgtgggctcacacctgctgtgctgagtggattagcggtcaccccagagatgcctcacatctgggaacccagccctctctgcccccactacctcaggcttttcaagaacagacccactcagagttaatggtgggtaccagctttgcagggagacagaataggggccactgccaactccatcgcttaatgttaatattaacagcaatagtagcaacagaaccgactggagaaggctttctgtttggtgggcaccactgaagcaccaacatgcatggttgaatcctcacagtagctcagagaggctctcccaggctgtgtgccctcaggcaaattagccccttggagctttagtttccctctctaaaagggaggtgaaaagaaactctatctcatagggctgttgtgtggattcagtgggaagatgcccatgagtgtttcgcacccagcggggctccagcaatggcagctgttatttagtttgcaggagcccaggatcccaagtgtcagaggcaagcagagctaggagttgaggagagggatgcaagggctgaaccatttggggcaaatcctaattctgggaatggaagtcctgactgaggggcaatagggacccgcatcctcaatgcccagagcagacacatcatggcccttcccacacgggattagtcctgaggcttagcttctctccaggcagagggaggggagaacggcaaagggccccacccactgtgccttcagagtagaagcatgtcagccccctccaccctcacccccacctcctgcctgtagcaggagccatgccattctctggagagagatgtgggcaggtggaggcgtgaggacaaaaacaaaagtggctggaagaggagcccagaataaagaccggattctgccatcatcttgtcctatggggtgggggactctacctgctcagggggccggggcatgctctccaggctctgcaccctcgcctgcacctcctgcatgctctcctgtagtgctcgaactgtccccagcagccacacgtccaactcctggggccccggcgggctgccccgcaacccctctgcggagcacagacacacagggaagggggctcaggaggcaattcagctctgggcagggtgggggcaggctggggcaagcccaggaaagtgtaggagtggaacccartcgctgtaccaagtgtgattcttgcaaagtccatctatgtagctgagtaatgggctgctatgggtttaatcccagcatggccgcttatgacacagatcaagtcattaccttttttttttttkttttagacagtcttgctctgttgcccaggctggagtgcagtggcacaatgacctcggctcactgcaacctccgcctcctggattcaagcgattctcctgcctcagcctcccgaatacctgggattataggtgcccaccacacccggctaatatttgtatttttaatacagacagggtttcaccatgttggccaggctggtctcaaactcctgacctcaggtgatctgcctgccttggcctcccaaagtgctgggattacaggcgtgagccatcgtgcccggccaaagtcattaacttctctgggcatcattttgtcatctaaaaattaggagaagatgtcatttctctcacagggctgcttgctcagaggaaaaaaggagaaacttttcaaaatgtccatacaggacctgacacacaacaggagttctagaagggaagagggcagaactcattgtcttctgagatttccaaacgggggagtccagagaatatggatgacttcctgaggctgtgcagctgtaggtggragaactgggctaggactcccatcccgctggccttactcaggacctgcagagggtgcagactcctgggtgccctttggggagaggagggagggcggggactttgcccatccaggcaggtatctggctggttggcagcccttcctggacagaggcttctcgctcagtgcccagcaatggactttcaactctgccctaggaaggcagccaagagaaagcctggggtgccaggaccacgggaaagggcagaagtgggtgagaggttgggtaggagctcacctttctttgtggggggcacggggctgttcctgggatcacgctttcctccagatgctgcccgctgctctgtccaaacctgctgagatgagtcagagagctgagggtgggagtgggagcacagtggggtgggaaaaggggggaatggggactgggctcaccagctcaggctccagctgctccagggaatcacagaaaacctcggagtccaggtccctgggtgaatgggactctgtggaggggttggtagagttactgcccagagggaagctgtggagggagagcaggagtgtgcactgggcagaagcacctgtttaggagacactagagatacgaggcactagagatatcaacacctgaggcacagatgggcgccagaagcaaggccctggaacaggaatcctagaccccggtccccacctttgggagcacaggaagtctcagtgtctgtggagggcacagcgtggcatccagccttctcccctccagccctcccccagcctgagtttggtccacccctcctgctcaagcactaacctgggcttgggggtgccggttccttggggaggcagggaggctctgaaacagccccaacatctccattcacaacctgctctttccaacctgccaagacacagcacccagaggtgggcctggggagaggctggcacctcccagtgtgatcaagcccctactcgtgatgagccgtggatgctgcctgggatccacctctcgggggcttgggggccctaacagggatgtcgcctggagccctctgcccccagcccacctcagcctagacctaagacggttcactcagcacttttggagctcccagcctgggagtctgacctgtgacccttctcaggaaggtctctgggggcctcggcatgtcagggatcacctggtacaggrgctcgaagtaaccaaacatgtcctctgccacctcacccaggggcactgtgtcgatcacctgtaggggagggggtctgttggggacggagtggcctcctgtcccttcctccctgctcctgccctgtcacacacctccaccctgtgcccagtcaggggccaaagataggcagggttgggggtaacatgaaggtggtgattcccatgagggggtccatgtgtaggaaacgtagtgggggtcagaactggaagggtgaggccacctggccaggagcctggggacagagaacctrcagcccttaccttctgtgccaccagtttcatttcagtgatgtaggcagacatggcctcctccctgctcatcttgcccagactgttccaggcgtccctgggggcagagggctgtgagagggctgcttgacagctgaggcttgtctgcccagccagcagggagctcaccacttatatcgtccaatggggtcccagaacccgggccgggggaccaggcagggccccatggtggcctgcttgtagtaactgtagaatcgcagcatctcttcataggaggggcggtaagaacctgggcagagagttgggaagccagggcaaagcatcactcccagctccaaggggcggaggggcgggagaaccctgcttggaaagggcagaggtggkgatgggtcccacccagggcatctggactaggataggaagcggagggaacccccaggacagcccaggcaggggcttgtctgcaaaaactgcagtgatcaggaccattctttcttcagagtyagaccccaggcgtcctgaatgcgagtccaaatgcgagtccccgcagcctcaccgttcttgggcaggttctggatgacgctcactgcagcctggaactgtttctggcagtcgggctctgggctttctttctcggtgcccatgctgctgcgagccctggggccctacttttgagcgactctgcaagaagcagccttcgtgtgagggggcctccagggtccccccggcaccataagccaaggattcacttcccagaggggcaaactaagctctttagaggcctcagacaccctgggaggtcagaagttgtggttgaggagcctccttttcctacctcaaggcagtgtggtggggtcagggtcgccaggtggcgaggsaggtggcgagggcctcagtgccagatgtgtccgtccccagatgcgcctcctttaggtgcacatctccaactcccgaacaggtggagaaacaagataggagtactcarggcggggcgaacagtctcccaccctggccgcctgcaccttggcccagcgtgtgccccgcggcgcccactgccaggacacctgggtcctctctcgccaccaccccgcggcttcctactgaccccggggtccagcagggccgggatggcgacgyagatcgagggggggaatttaggccaatgagagagcctgtttcacattcggcttacmtacctcaaccattcagcacagctctttcaagatcatgcaaatagtttctcagagcctttcccaatcaggcggggcttaatcgaagggtcggacttcccagcccgggatggccaaggcgggcggcagcgccccctggtgcacatagtgaaaggtcgtggcgtcctagcgccccctggtggaaatcckcatctgttcgctgatatccaggcctggccgatccgaggcaacccactcagctctctagacacttaggcactggggattaaaaaaagtcatgtcctgtggtcaggtgttctagaggaaggacatcacagctcagttttggaagatggtcgggcacggtggctcatgcctgtaatcccagaactttgggaggccaaggcgggcggatcacctgaggtcaggagttcgagaccagccgggccaacatagtgaaaccccgtctctactaaaaatacacaaattagccgggcgtggtggcgcgcgcctgtaatcccagctacacgggaggctgaggcaggagaatcgcttgaacccgggaggtggagattgcagtgagccaagattgccccactgcactccagcctgggcgagagtgagactccatctcaaaaaaaaaaaaagagtaagcaaaatggacatcgcagaatgatggttaccagaggctgggaagggtactggggagggggggaaatgggtacaaaaatacagttagaatgaatgagatccagtgttcggtagcacaatacaacgattatagttaccaataatttattgtatctttttattttgtttattttattttatttatttatttttttgagacggagtctcactctctcccgggctggagtgcagtggcgtgatctcggctcactgcaatctccgcctcccgggttcacgccattctcctgcctcagcctcccgagcaactgggattacaggcgctcgccaccacgcccagctaattttttgtattttttagtagagacggggtttcaccatattagccaggatggtctcgatctcctgacctcgtgatccgccgacctcggcctcccaaagtgttgggattacaggcgtgagccaccgcgcccggcctattgtatctttttaaattaattattttaaaaacaatttttgtagaggcagaagtctcattatgttgcccaggctggtcttcattcaatacctggcctcaagtgatcatcccacctctgcctcccaaagtgctgggattacaggcgtgagccaccgcatccggccaatttattgtatatttcaaaataactgggcgggaagtggtggctcaggcctgtagtcccaacactttgggaggccaaggcaagagaattgctttgaggctgcagtgagctatgatcatgccactgcactccaccctgggcaaccaagtagtgagaccttgtctctaataaacaaataaaatacaaatacaaataactaaaagcggaattggaatgttcctaatacaaaggaatgataaatgcttgaggtgatggttacttcaattaccttgatttgatcattacacattttatacctgtatcaaaacattacatgcctctccataattctctgcaactattaagtgtccataacaattaaaagaaatgtagacttagcctatccaacaacaagaataacaaaagggtaaaccaggagaataaggaaggttgtttctggaggaaggaacggcaggatcaaaagcacaaaggcgaatacgataatcaagaagaaaattcagggccgggcgcggtggctcacgcctgtaatcccagcactttgggaggccgaggcgggcggatcacgaggtcaggagatcgagaccatcccggctaaaacggtgaaaccccgtctctactaaaaatacaaaaaattagccgggcgtagtggcgggcgcctgtagtcccagctacttgggaggctgaggcaggagaatggcgtgaacccgggaggcggagcttgcagtgagccgagatcccgccactgactccagcctgggcgacggagcgcgactccgtctcataacataatacaaaacaacaaatacggatatttcaggccccccgattgctttagggcccccaaccctttgtgagcagtttttgggcctgggagttgtgaggttggggaaagcggcggtgttagttggcaatctcgnnnnnnnnnnnnnnnnnnnnttgggaggccgaggcgggcggatcacgaggtcaggagatcgagaccatcccggctaaaacggtgaaaccccgtctctactaaaaatacaaaaaattagccgggcgtagtggcgggcgcctgtagtcccagctacttgggaggctgaggcaggagaatggcgtgaacccgggaggcggagcttgcagtgagccgagatcccgccactgcactccagcctgggcgacggagcgagactccgtctcaaaaaaaaaaaaaaaaaaaaaaaaaagaaaattcaggaccccagagtggcgtagggacccaagccagtgtgcagaatctctgggcctgggagatctgaggatggggtagagcagggcaagtaggtggcaaatcaggccctgagcactagcctctctgtaggatgccacgccgctggccgccgcaaagtgggtggtgcgcccatgtctctgccggacccaggccaccggcgcagaaaacgctgccacctggacgtcccccacttcgcgcacgcactctggtgcttgcatataaatagtaagtgcacacccgactcggccaccagaacctgcacacggatgcccacccacgggttgacgtcgcggacaactacaccgcgggtgccgggctggggtgccggcctgtccaagcctcgaacccagaaccagttgctggggactccaggctcggctccgcctcacgctccccaggtccgtcagctccgagactgtggctctccgagggggcagcacctggcctggcacagggaggttaatcctatgacgtcactgccaacctccccacccccatgcccatcccttcgggttcgcgctgccccgagcggctcagctcccggggttctgccttcgctcccggccctgcgtcctgtcccggctctggttccctgctgaggcctgcggcgcgacggggacgcggaagggaaggaggagggggtcctgcgtcagcctcgagtcagggcccccgggaaggagagggtgtctgtgccagaggatggccctcgtccccggtgccggctcccacccccagccccgcagcatgggggctctagtcacccttgcggccaagatcagaggctcgcccggactaaggggagacggactcacgagcaggggcgagcgctgaggctccgggcttccaggccaccgcctgccccgccctcgcaccgccccggccccgcccccttcccttcccgccccgccccgccccacctcctgctgcctcctccgactccctcccgcgccgctaagtttcttcgctcgccgcctcgctcagagccggggccgggccagagcggcgccccgctgccctgtccccgcgtgcagaccccgggcccggccccggccccccgccaagccatgctgtgcggccgctggagggttgccgccgcccgcccgaggagcccccrgtggccgcccaggtcgcagcccaagtcgcggcgccggtcgctctcccgtccccgccgactccctccgatggcggcaccaagaggcccgggctgcgggcgctgaagaagatgggtcagtgacgggcaaggggcggtggggtgggcgcggaccgttcccagaggcccagtctggggcgctccagggagcagttcgtggattccccaggctgcacggggctgggaggctatggctaggggcggagggccagctccctccagctgggggtcgcacctggggtcatccgagggtcccggggcgagccgggcgcccagggtgttctttgcttcccaccagggggcgctcgcggggcgtctgaagcgcgaattcgggcacggggcgctggtggggtctccaaggagaatggagcgggagagggaggcttggggtgtccctcgtccggctccccagcagtatctaggttctgccagggtgtctcggggtcttggcagcccttaggaaggatgcgagtttgcggtcggcctccgcagaagaggctggcctccacagcagccctccaacccgcggccccacagaggcggccacagccacactgctctggcaggactggtctaacagcctacgtccgacagccaaggctctcacctcagatttggggaagtcagtcgtggagaaggaatgtaactgtggctcattggaacatcacagaggcagctggcactgggtgggttacacaggtggtgtcttgcaatcttcctcgacttcctaggtgggaggtgaatcctcatttcacaagtgaggaaactgactcagagacggcaaggaatttgcctatgaccacacagccaacaaagggcaaagtgtgactggcaccccggtggtgccccaccacatgggccctggtaccctctcagagtctgggaaaagtgggacccgcagggcagtggagggcttgaatgagagggtgtgtgcgagaatgttgtctgacgtggaaaggaccgcgccactgaagtgctgcgttggacctgccattggtagaatagtcagtgatggagaggctaggtgtggaactccggaacagaaggacaaggctgccagggacyccgtgtagaacttggggcagaattcaggggtcctgattgccagttttgccttcttgttacctcgactcattccacctgagcgctgactatgtctgggcgctgtgcctggcactctggttactgagacataggacaccatctctaccctgccatccattcaactgtgcatgcattggacaagcacttatgcggtgcccatggtatggtactatggtacaagcacttgtggagtgcctatggtatgctccaccctggggctcttgcattagagagctgaggttccagcagggagatcagacagtgaaacaaaggaacaggaccttgggggtgggggaacagggggcagcacawgaggggctggggagccagcaggccctggctggccccagctgaggaagacgggagtggcaaaggggagaggctgggggtgggaggagctcctccaggccctccctggagagtcatggactttatctggagggcatcaggagccccagaaagggcwtgggcaggagtgagtgtggagagtggggggcaggttggatgaaggcaggggcgaaacagggagacccaaggagggaggctgaggagttagttgggcaaggggtggggaccagacttgggggacacccaggatggaccccagaactcccaggagatagactgggctggactctgtgatcgacaggtgtcattctctgggctaagaaatggtgtggtttggggatggctgagggcagccctgggagtcagccctggcagggtcaygggtgccgyggaagggctgaggggaggccccatgcccattggcctcttcatcccacacgtttgctgagcgccattagtgggccagggtgctgtgccaggggctggggctacagagatgagtagcacagagctttgccctcagggagtgcacagtttagtgggcagagtcacatgcagacaaataattacagctgagcccgggcctcggtactcatcagctgagtaaggctgcacgggagctctgggcacctcatcaaggtgacactctcgggaactacatagatatcagaatgtcatctaggtcaccctcattcctcaccactgccctgtcctgctgagtgactgcagagagaggaatgttgagtccgagtctgttgggaatgtcccttccccaggccatagggagtccagggacagggtggagaaggaaacccagtcttggggcccagccccttgggccatcagaggccaaggcctaggcctgtcacccaggtagcctcccccgcctcgctctgcccctgccatcaccacaccccttagcctaacagagaatagattttatatcaaatcaggtcaagggactagggcagggagtggcttagaggggcctgaggaaggaaaatcctttagggccacactagggagacccagatgagcggggaaggaggaagaaaacacccccacagtgagtgggagtcctttgtcccccctccagtcccccgctcctgggctgggctgcggacttgcagggaatcattgaagagagaggagcgctagagcccagtgagcacccgccatgcgtgaggcactgtgctgagcttgcatcagacctgatcctgcttaatcctcaggcatccctgtgcgggaggtgctgtcctcatgtcacattacagacgggaagctcaaggcggaggggtgaaatcaccgcccaaggccacatgcctgcctgctgccagagcctagttttccatgatggctcccagtgaatactttttgttgttgctgttgttgttagttgtttatgagacagggtctcattctgtcacccaggctggagtgcagtggcatgatcatggctcactgcaacctcaaattcctgacctcaagtgatcctcccacctcagtctcccaagtagctgggactcaggagactgggagactgggtaccaccacatccagctaattttgtttctgttttttgtagagttggggtctcactgtgttgtccaggctggtcttgaactcctgggctaaaagaatcctcctgccttggattcccaaagtgctgggattacaggtgtaagccaccattcttggctagcctgatgaatactaatgaacaattttgtcactgtcccaggcgcttttcgcatattatctcatgtaatgctcacactaatatgaggtaggtggtaccagtagccttctcttacagatgaggaaactaagactcagagagatttggtaacttgcctagggttcaaagctgggaagtagctgagagaaaatttgaacccaggcagtgtggcccagagtccgtgcttgtcacacagtgactgatagagaagctgatacctgcagggggcctcctggccgctcctctcccatgggggccctgccagcccccaggagcgtcctcacagggctgccaaataaaatacagaacacccggttaagtttggaattccgctaaatgcggaatatggaatgtatttatactaaaaaattattctttatctgaatttcacatttaacgggtgtcctggattttctctggccaccctgtgtccccacagccccgtgtgtgcctgtgccctgatgctccgcccctgcccctcatcctccccatgggcagaggcctgagtgggcagaatcctgcccccttgcctccccagcctacacacactaccaagtgcccctgagcgagagggctcggcccatggcctgcctgggatgtcttccgcagggtgagtgggactgctgtgggtgacttggcaggtgagggtcttcagaacaacccccagccctggcaggtgcctggcctgggtggtgggtaagctgggtggccctccagtctaagcaggggcatgccaggtgggactagggggctggctctgccaggccctgtggtccccctcacatctttccctgtcccctaccctgacttccgcacccaaccaggtttcatgcctgttctggccccagagaaaagggtgctgccacccccacttgctgtgtcccacccggggccaagggaagcaccgcctgcctttcctgactttgttgattctccaaggaatgttatggactctggcaccgagcccccgccaggctccagccctgggtgtggcagccagctgggtcacgggggacatgcttggtgcctgaggtgtggaggctgcctgctggctaaaggattagggtgggagggtctttgggacccctcgccattgtgtgtcctctcctagagcctcacagccccggccacctggaaacgctctttctctactccctgctcggccttggccacagctgctggctgtagcagttccctgcatgactcgcattcctgtggagccctgtgtgcacctcccgagtgcgagccgcctatttccccctggctggcccaccttccaccctctccacccatgaaccctgtacacacacacacacactcacacgcacacactcacacacattcactcacactcatacacacacactgtctcacgcacacacacactccccacctatgcatacaccccacacacaccctgccctgcctgcatgccacccctccgggacacgcctggacagaactcccaccctccctgccagctgccctggcgcctgtctccactgcacagcctctatatccatccctgcctgggggcgacctgcactatcttcagcacacagggcttgtcctctctgagctcagtggtgcacctgtgaaaagggtgggatttggggccccttccagctctgacatgaggtagtttctggtccctggtcttggctacccttacagaactgctcaggccccagaccatccacgccccaaaccgcccgggctgcaggtggaagttgagaaactgggcctgccctttcctcagcacgcctgacccctctctgaggctgagataagcgggcagcttgggaaggtgtctgagccccagctgacaacactgaattgggcgggaggtgccgctgtcctggtctggggaaggtaccccctggaggccatgggactaaggggacagatggawcagaacacgtgggtgcctctttccacccggggcactaactcacttccccagagccctgcctcagtttccttctttgtgatcatttactgagcacccactatgggccaggcctaaaccaggctccatgtgcttgtgcctgttgtggccacacacagccctttggggtcagactcccccaacttccaccacatttcagccccaccgggtgccgacctggctgtctgcttctttaacagcatttttgagatattcattcacataccttataatttatccattgaaagtacacagtgcggagcactttgggaggcagaggctgttgaatcacttgaggccaggagtttgagaccagcctgggcatcatagtgtgaccccaactctacaaaaaaatttaaaaattattcaggcctggtagtgcaagtctgtagtcccagctcctcgggaggctgaggtaggtggattgtttgagcccaagagtttgaggctgctgcagtgagccattattgtgccactgcaccccagcctggctacagagcaagaccctgtctcagaaaaaaaaaaaaagtatacaatggtttccagcatattatatcattaaactttaaaaattatggtaaaataggccgggtgctgtggctcacgcctgtaatcctagcactttgggaggccgaggcgagtggatcacttgaagtcaggagttcgagaccagcctggccaacatggtgaaaccccatctctactaaaaatacaacaattagccggaaatcacttgaacccgggaggtgggggttgcagtgagctgagatcgtgccactgcactccagcctgggcaacagaacgagatgctgtctcaaaaaaaaaaaaaaaaaaaaaaaaataggctgggcgcagtggctcatgcctgtaatcccagcactttgggaggctgaggtgggcggatcatgaggtcaggatatcaagaccatcctggctaacacggtgaaaccccgtctctactaaaaaatacaaaaaaaattagccaggtgtggtggcgggcacctgcagtcctagctactcaggaggctgaggcaggagaatggcgtgaacccaggaggcggagcttgcagtgagccaagttcgtgccactgcactccagcctgggcaacagagcgagactccatctcaaaaaaaaaaaaaaatatggtaaaatatatataatgaaattggccattgcaaccatttttaagtggttaattcactggcattaattacattcacgctgttgtgcaactattactgttgcctatttccaaaactttttcatcatccaaacagaaactaaccatcaagcaataactctccattacctccccattccagcccctggtaccctcccagctactttctgtctctatgaacttgccgctctgggtacctcacatgggtggaatcacatagtatttgtcgtttggggtctggcttctttcacttagcatgatgttttcaaggttcatccatgttgtagcgtgcatcagatttcactcctttacatggctgaatactattccattgtatcgataaaccatattttgcttatgcactcatctgtctcatatgttttttgtttgttttgttttgttttgttttttgagacggagtctcgccatgtctcccaggctggagtatagtggcacaatctcagctcgctgcaacctctgccttccgggttcaagcattctcctgccttagcctccctagtagctgagattacaggcgtgggccaccatgctcggctgttttctatttttagtagagacggggtttcaccatgttggtcaggctggtctcgaactcctgacctcaaatgatctgcctgcctcggcctcccaaagtkctgggattacaggtgtgagccaccatgcccagctaatgttttatgtttttagtagagacagggtttcaccatgttggttaggctggtctcgaactccttgcctcaaatgatccacatgcctcagcctcccaaagtgctgggattgcaggtgtgagccaccatgcccggctgatgttttatattttaaayagaaacagggtttcaccatgttggtcaggctggtctcgaactcctgacctcaaatgatctgcctgcttcggccttccaaagtactgggattacaggtgtgagccaccatgcccagctaatgttttttattttttgtagagacagggtttcrccatattggtcaggctggtcttgaactcctgacctcaaatgacccgcctgccttggcctcccaaagtgctgggattacaggctcatctgttgatgagcactcgggttgtttccaccttttggctttcgtttgccctcattttcactgctattattttgtgattgtctccacccactcagtcactggcccggcagctacaggatcaaggcagagatggttcaagtagatacaaaccccacaggaacagtaggaggtgggcggcttgtgcacctgctcagagcaggtaggaacaaggtcaaggcgacatctgtgggcttgggcctggcaggacctataaatgtctactgggtggctggatggagagccacggtcctcgcagcatcgctgccctggccctgagccctccctctgaccttgcctccttacctctgttggccctgcccttcctgctggacaccccagtcctctcactgccccagggttcagaagcacgagcagtggggacacagaagcacccaaccagggactcagcacctggccccgcctgggactgcaccctccttctgtttggcttttccattgggtgtgtgtttggggggcagtgccagtttgcggggcagcctggaatgtcaccccttcccccaacaggttcctggggagctgagggtaaggggccagaagtaggggccccctccattgggagcctgcccaagtgggggcccagtcaggcgttcaggctgcctgtgttgatggcctgtttgcagaaggctctggacagagcaggccccggtgactcacccccatttccggccttagtcactcatctcccccacacccatgggcttggcatcagagggctggcctaggtaggggaggcagccccagctgcagagcctggttgtcatggcaatgagcagtcccccttcccatggccaagggggtgtaggaggatgtgcctaagtgtagtggcgctgcaggctcccctctgccctcaccgtgtcattgctcaggatgggaccatttagaggctacctggacctggtgggggggggggggtctggtgagcccctcggcctggcacgtgccgtgtacacccagctctttgtctggaaagaggagggttccactttccccttcctgaccagggggtaccgagtgggcattcactcagagggccacagtctagaccctgagggaccctctggagctgttagggccacaggctggccccaaggggtcatggcctcttaaggaggtggatttctcctcttgcccctgagaccctgattttcagtcatggtcaaagtgggttttaaaaatacagatgcccaggccccatcccacaccagctgggtgagatgccctgggctgtggtgtctgcagcctcccctgggtaattccgatgcacagctaaggttgagaaaccctgacctgcgaggcctctgccctgcgaggcctctgccctgaactctggacagatggggcagagctggggatagaattcacttagtccccccatctgtccgtctacctgtctgccccttcagtcaacactagctggtatcctggctctgggatgagcactgtggtgaggagataagacctcattccgccctcagatttattaaagtatataggtgggttttgtgttttattttaattaaagcaaaaagtgctgttagtggtcagagagggagaatgtccacttgaggacaaatcaaggaagggttcctggaggaggtgatatctgaactggtccttcaaggactcagataggaggaagagaagggagaaggatcctacaaaagggtccaagagagggtgagaggagatggtccagagatatagactcaattccttaggtcagaatttgcaattgggcaagccagggccttggggtcacaaagccaaacccagtattaggggcttgtcgaaataaagggaggaagagaggccctctgtcttacttcttttggcccacacaggggttattgatttttattttttttcaatttgatttcgttgtcaacattagaatatctggaggcttcacacacagatctatattcggttctctggaaactccgggccctcattcactccgggctgtgccccacctccaaaggccatggactctccgtttacccagttcccacctcctctattgtcctctgactcaaaaatctttggttgtgactctcgttgaggcattgtagagcagggtgtggcactgtttgggctgggcatcacgtgttccagggggccagagccaggagagggccgaaactctccggggcacagtgtcggtcacgctgtagaaacctctgaattttggattttgcagcaggtatgattgtggtctccattttatggatggagaacatgaggcttagtgacaggttagtgccactggggccatgtattaaataactgggaagtgacagtgttgagacttactccccagacttcggaattyagaagcactagaagagccgtgcagtgcagggccaaaggtcagaggcgctggaccccgacctccagagcccaaagtggcttctaccagtatggaattctgacaacttacttaagcttccctgagcctcagtttccttgtctrttagtacatgagcagggcctgcacacaggagatgcttttatttatttattttttagagacagagtctcactctgttgcccaagctggagtgcagtggcgcaatcttggctcactgcaacctccgcctcccggattcaagtgattctcatgcctcagcctcccatgcctggagatcagctgggcagggctgatcctggagtccttggcctgtgaccctggagccagggtggcctctgctgtcctccttgtctttgggaaagcagaggcaaggtgcttgggttacagcaagagagatctaggttagatggtgagaccttcctgatggctacggtttcacatcaagggaaaaaggctgttggtggcaaattctggacttgaaggctggaagccatgtggtgggggatagtggcagaaaaggcaatttttttttttttttttgttaagacgcagtctcactctgtcgcttaggctgcagtgcagtggcacaatcttggctcatggcaacctcagcctcctaagtagctgggattacaggcatgtgccaccacacccagctaattttgtatttttagtagaggtggggttgcaccatgttggccaggctggtctcgaactcccgacctcaagtgatccacccacctcggcctcccaagtgctgagattacaggcgtgagccaccgcgccctgccagaaagggcaacctttagtgaggcctgagtcccaggcattrtccgagggcagttccacactgagggactgcagaggccgctgcttggaaggaaggagggagatggggtacgggttggggggcgcttagggctccaaagcctaaagccaaacccagtgcaggaggcttcttacaatcggggaggaggggagtcctgtgagggggagggaagcttactgtgggatgaaggcctgggtttggagaggctggaggacggggcagcaggtcctagcgggggagggcaggggagcctctgggcaggtacggcctgacgccccgggtcctcccgccccgccaggcctgacggaggacgaggacgtgcgcgccatgctgcggggctcccggctccgcaagatccgctcgcgcacgtggcacaaggagcggctgtaccggctgcaggaggacggcctgagcgtgtggttccagcggcgcatcccgcgtgcgccatcgcagcacatctgtgagaggccggggagcgccgggcggacagggaggtggggacaggcccggtcctccgccctgacccggccctcctctcastcttcgtgcagcacatcgaggcggtccgcgagggccaccagtccgagggcctgcggcgcttcgggggtgccttcgcgccagcgcgctgcctcaccatcgccttcaagggccgccgcaagaacctggacctggcggcgcccacggctgaggaagcgcagcgctgggtgcgcggtctgaccaagctccgcgcgcgcctggacgccatgagccagcgcgagcggctagaccaatatcctgccggggctgggagggagggccccatccttggagagccctaaccttggagagccccatccttggagagcccccacgcccagggaaggcagggcccctgtcctgagggcgcacggtctgggtcggagcccttggtcttcgaaactgagggtggggacacgcgccctggctaggcccaagctcccaccaggaggggtggcgcggcgcctccttcagggaggcctgaggccttctgagggtgaagacagggcctcctgtctttggtaagccccagtcctgcggaggagacactgctaccgtgctcggggagtgcacaggccaaggggaaagtacagcccctaaactggggatcccccagacccaggtgggggtgacttaccagccagttacctgagggctgggggcagcctggcgtgttgctgttatttcctgagcacccacacctggatccactcctatctgcaccgggctgactccaaccaggacagcaagatgagcttcaaggagatcaagagcctgctgagaatggtcaacgtggacatgaacgacatgtacgcctacctcctcttcaaggtgggcttccgccctgaaccccagcccctggctctgccatcactctgacctctgcctgcccccagccatctgaatcatcagytcccctgccctctccayctgcagcttttttggagcgagcagcctttccctgcacaaaggcaacatctggggttagttagccttttgcctcccctgaggccactgggccaggaagggagtggggagccggggcccagaactttcctcatcctcagttcctacccctccaaagtgagcagcaaagctgttttcatttccctgagtctgcaaggcaccttttgcacgtgggggcacaggcaggagccagcctacaggtgtgcatgtgcacggatacacgtgtgcacccttctccacgcagaccctccactgtggcacgtgttggcacctcatgcatgggagcacaggggcacacaggagtgggctctgcagctatggcccagctggagcccatggcagacctctgtgtgcatgtggatggtgggacccacctgtgaccccgaaagacaggagagcccatggcagctggacccctgggccacagcttcacagggatgctccatgaattctcattgacttgttcaatgacgctgggtgtgaatatgtgcatgtcaggatagtaacgtgtccacctaggggagtgtgagggcccaagggccctgtcttggcccagggtcaccatttttccttccacatcttgattcctggggtaggtcatggtgcagaggggcaggcactgaaccagagagaccttttaagtccagccctgccggccaggctcagtggctcacccctgtcatcccagcactttgagaggcctaggcgggaggattgcttgaagccaggagtttgagatcagcttgggcaacacagcaagaccccatctctacaaaaaatacaaaaattagccaggtgcagtggtgcacaccagtggtcccagctgtccagctatttggaaggctgaggtgggaggatcacttgagatcacgcgttggaagctgcagtgagctatgatcatgccactgcgctccagcctgggtaacagagcaagaccaaacaaacaaacaaacctaaaaaacaaaccaaaaartcctgccctgtaatttaccagctgtgtgagctagagtcacaagtcttactctgtttttccacctgtgaaatggggaccattgccttctcagatgtggtagatgacagatgggtcaaaggggccaggtttcctggagtgtctgcctcctctgagcttctcctgctgctccccaggagtgtgaccactccaacaacgaccgtctagagggggctgagatcgaggagttcctgcggcggctgctgaagcggccggagctggaggagatcttccatcagtactcgggcgaggaccgcgtgctgagtgcccctgagctgctggagttcctggaggaccagggcgaggagggcgccacactggcccgcgcccagcagctcattcagacctatgagctcaacgagacaggtggggggggtggcacggccaggtcgtggcacctgaaagggctgtgttcccagctaagcgggttctgctgcgggctggcgcgggcatcatctcgggcaggttacctcacctcctccagactcagcttccacatgtgtaaaatggcacaacagtttgtcttcctcccagrgtctggtcgaaggttaagtggcatgacttacrtggagtctagtcagtagattgtctagtcattattcctaagctgagtgggccttgggggcattggaagctggacatgggggatccctatgtggcctgatgccctctcctgccacccctgcagccaagcagcatgagctgatgacaytggatggcttcatgatgtacctgttgtcgccggagggggctgccttggacaacacccacacgtgtgtgttccaggacatgaaccagccccttgcccactacttcatctcttcctcccacaacacctatctgactgaytcccagatcggggggcccagcagcaccgaggcctaygttaggtactgtagcagggggtgaatgtttccgggagccccacctggggagagacatgggctggcttcctggggccttcctggcccagcctgcctgctgccctgctctgtggcactctggcaacaccttgcccgtccacccatctgtccacacacagggcctttgcccagggatgccgctgcgtggagctggactgctgggaggggccaggaggggagcccgtcatctatcatggccataccctcacctccaagattctcttccgggacgtggtccaagccgtgcgcgaccatgccttcacggtgagcccctgggatgcccagccccagccccacagccttcccaatgacctccgtccgcactcacatgccagctgccctccgkccttccagaggaaacccttgcccagagaatcattcattcaccaagtgctgctgggataagtggccaatggggtrgcataaagctgaatgagatgccaccctcatatttgggaaatatgttccctctctcatatttgggaaatgtcctaaaaatcacagagtttccagaagaaaacctttgggggagggaaggacattttaatcatgacttccaaagaataaataagctgtaagagaagctcaccagtggcatctgcataaacactgcaactttggtcacagtgtgcaaatcttcccatcagcaaatgatgggaggagagttttcacatcactgacatagtcaatgtcattcacatgtaaaaagcatttatgggaccaggtgcggtggctcacacccgtattcccagcactctgggaggctgackcgaggatcacttgaggccaggaattccagaccagcctgagcaaatagctacatcctgtctcaacaaaaataaaaattagctgagtgtgggggcatgtgcctgtaggctgagttactcaggaggctgaggtggggggatcacttgagcccaggactggagaacacagggagactgactgtgccactgcacttcagcctgggtgatggagagagaccaaagcatagacaacaacaacaaaaaatcggccaggcgtggtggctctcacctgtaatcccagcactttgggaggctgaggtgggcagatcacctgaggtcaggagtttgagaccagcctggccaacatggtgaaacctcatctctattaaaaatacaaaaattagccgggtgtggtggcgggcgcctgtaatcccagctacttaggaggctgaggcagggagaatcgcttgaacccgggagatggaattgtagtgagctgagattgcaccactatactccagcatgggcgacagagcaacactccatctcaaagaaaaaaaaaataattcctgcagccgccctcagcctcctggacagtctgctgcttccctgggttctccagagccctgcctttgcctgcctgtcctgaagggtctgggagccagatgttgggagatactggcagagggaggggagtggctctgagctgctgcccttccccccacagctgtccccttaccctgtcatcctatccctggagaaccactgcgggctggagcagcaggctgccatggcccgccacctctgcaccatcctgggggacatgctggtgacacaggcgctggactccccaaatcccgaggagctgccatccccagaggtgacgccccccagcccctagcctgggtggagggaggtctggtgggagtccgcctccccgcactgctcgtgccacctctgtggctcaggacccctcacctcttgctgccttaacttttctctgttcctctgttcatctgaggtctgccatcccctggtcttgtccttctgctgccctctggctctccattcttgactagacccccccacacacacaccctcttctgtaacctggctttgccctgctggccctgtgtccctgcccgtagagtcctgcaggctctgccattcccacctgcaaggccccgcttgacactttctccacctggaagtcccttctcggccatccacacttgccaagcgtcacctgcttagaattcagctcaacttcagccgcctcttcctgtggccttatccacttccccaactctcgggcctgaggcggcctcctgctctcccccagacaccagagcgcgtcctcggctctctccagacatttatcctgtcgggctccttgagaaaactctcctcctacttccaatccccaacatgcaggcagggttgactcaccctcgtgtgtgtgtgagatgtgatttttgttattactgtgaaaatcacacccgtatggtaaaagaaaactgagctgtactaagggacgcgatgagcagtgctcccctccctccactgacctgtcctctttcacaagaagtaaccatctctaactttcttgcatgtccttcaagaatttccccacacacattacctgtgtacatatgtgtactgtcttctcttttaaatggtaccaaaaaaggacatgtgattccaggttgtagcctcacttcttccacgtaagatcttctttgaagagggtccctttcctttcagtcctgagctgtcgcgtgcattgtagtggctgctgtgtatattctgatgttgagggaccttattaagcatcccttcctgatggcctcccgggccattctccactctttcctattagaaacatcgctcatctctgtgtctcctttcctgcctcccacccctagccagcccctcacaaggcggtggttgaataactgactgactggctgccacaggggcgagaaggcctaacccttcatcctccacgttggcccccacagcagctgaagggccgggtcctggtgaagggaaagaagytgcccgctgctcggagcgaggatggccgggctctgtcggatcgggaggaggaggaggaggatgacgaggaggaagaagaggaggtggaggctgcagcgcagaggcggctggtgagagctgggatgggtggggtggggaakggggggaaggtgggaggacggatgtgggaagcgggggccagctgaaccccgctgagcctggtctcctaggccaagcagatctccccggagctgtcggccctggctgtgtactgccacgccacccgcctgcgaccctgcaccctgcccccaacgccccacaaccctgccaggtcagctccctcagcgagcgcaaagccaagaaactcattcgggaggcaggtaggagctggggcactgggtgtctgggggcgagagggtgagagacctcctgaagggagtctggaaaggagttgagggggctttgggggacagtaaagaggtcaagaggaccccaaagaggggctgggctgagggaatgagggccccgcacatgccagggtggatggaggggagtggcacgctgagggcggcctgctgtctgccttcagagccctgtggtggggccggccatagagggtgatgggtcaggctgggctgggggctgggggagcccagcagctgctgcaacactggggaggaattcctggggcaggtgatgctgagaggacacatcacctggaggactaggaagcagccaggtgaagaggggagagcgctttccagacaggaggaacaggttgttgaaggcctggggccttggcctggagaagaattccaggaaccacagtggagctggagggccgtgggcattcagtgtacttggttggaactttgtcaggagctgggaattgggggctggggatgcagggccaggctgtgtggctggagggggtccctgcagcctcctcagtgagctcccctctcactctaggtcagaagagagtgaggagcgggggcagggtgacctggggacgggcttgggctctgttccctggaggttacaggccggggctttgggtgagggacccccggagtctgtcacggtctcaccccaactctgccccagggaacagctttgtcaggcacaatgcccgccagctgacccgcgtgtacccgctggggctgcggatgaactcagccaactacagtccccaggagatgtggaactcgggctgtcagctgggtaagtgggggccacaggaatgagagcaggcggggtgccacagtgtgggggaggcctcagcagtgaggggcccacacagccttccagacggtggaaacacgcattttgttgattatttttaaagttgccagcaatgtaggtgggaaaatcaaatcaggctcgtttgttcttgacagtgtacaggtctcgcatttttatcatggtagaaattaaaatctccactcccatgtcccccggacacacacaacccccacacacctggcagtcccactaagtcaacactgacaagggtgggctctgggggacgctgagccccaccaaaggagggctgtatcgtctccttggggtaaggatggaaaccccaggcttcctcagacccctggctctgacccaagcctggccctgagggtgggggcttttttagtacctcccaccccagtcttgagggatcccagggcagaagtacaggtgacagtgggggctgggtccatgaccccctcccctaaagtcatggtgggrgcagagcagcactaagcagacagtgggaccccaggccctttgtagagaggaatgcagtcccctgaaactgagtagtgagaacagggccgctargagcccctgctctgaccctgctgtgtccacagtggccttgaacttccagacgccaggctacgagatggacctcaatgccgggcgcttcctagtcaatgggcagtgtggctacgtcctaaaacctgcctgcctgcggcaacctgactcgacctttgacccygagtacccaggacctcccagaaccactctcagcatccaggtcagcaggctggaacgggccccagtgtggggtcagactggttctagaaaggctctttgtgaggtggaggaaggcaagggaggctggggacatttggaagtgagggtggtgtgagcttgaggcccatgaggggatggccaaggtgggcrtgggccccagccactccctccctcacccacaggtgctgactgcacagcagctgcccaagctgaatgccgagaagccacactccattgtggaccccctggtgcgcattgagatccatggggtgcccgcagactgtgcccggcaggagactgactacgtgctcaacaatggtgggcagccactggcggaagtggggttgggggagactgcagagagcgaagggtggtgcagggtgggtcctggggcccctgggctctgactgccatccctgtgccctaggcttcaacccccgctgggggcagaccctgcagttccagctgcgggctccggagctggcactggtccggtttgtggtggaagattatgacgccacctcccccaatgactttgtgggccagtttacactgcctcttagcagcctaaagcaaggttggtggaggctggtggggatggagagggatgtgggtccaggtcctgcagaccctgttcacctttgtgcctcgaatttcctgccctgaagcaggcccgggctgggccagacccccagggtgcacagaggacctgaggcctggctgtcctccctacagggtaccgccacatacacctgctttccaaggacggggcctcactgtcaccagccacgctcttcatccaaatccgcatccagcgctcctgagggcccacctcactcgccttggggttctgcgagtgccagtccacatcccctgcagagccctctcctcctctggagtcaggtggtgggagtaccagccccccagcccacccacttggcccactcagcccattcaccaggcgctggtctcacctgggtgctgagggctgcytgggcccctcctgaagaacagaaaggtgttcatgtgacttcagtgagctccaaccctggggccctgagatggccccagctcctcttgtcctcagcccacccctcattgtgacttatgaggagcaagcctgttgctgccaggagacttggggagcaggacacttgtgggccctcagttcccctctgtcctcccgtgggccatcccagcctccttcccccagaggagcgcagtcactccacttggccccgaccccgagcttagcccctaagccctcctttaccccaggccttcctggactcctccctccagctccggaacctgagctccccttcccttctcaaagcaagaagggagcgctgaggcatgaagccctggggaaactggcagtaggttttggtttttattttttgagacagggtctcgctccgtcgcccaggctggagtgcaatgttgcartcatggctcactgcagctttgaactcccaggctcaagcgatcctcccatctcagcctcctgagtagctgggactacaggcacaggccaccamacctggctaatgtttaaattttatgtagagatggcggggggggcgggggtctccctatgttgcccaggctggtctcgagctcctgacctcaagtgatcctcctgccccagcattccaaagtgctgggattacaggtgtgagccactgcctggcctggccgtaggtttgtaactgtttcatagaagagccctggagaagacagtagaatgagcctatctagtttaaaaaataaagaagcacgttgatttcaccaccgccactccctgagcacctctatgctgccacccccacaggcccatgaggagggacagggctggatgagtttcttgggcctctcccctcaacagggcatggacttggctaagacagccagggggtggcagcaggagatgccacagctctaaatagcccgatccctgctcctggcttaaagctgctgcgagtatcacaagactgtctgaggatgccaattcagcaggtcagcgcctccccacaacacacacacacacacacacacacacacactcacacatacacagaggggccttgaatgaggaggagacaggagtctgagggaccctcagactgccactctccaggcttggctgggctcaaggcccctgtctgctcagtagggcaaatcccaaggacacgggcttcccttcctccagccagccagccttttacacaaaggctggaaacgctgcttgggccgcctctatagaaatgccaggagagcgcactggacactaggcgacagaatctggagaaaatcctgcacccgcccctgccagcagggtgaaatgtggaggcctggtgttttaggttctgccagccaacagtgccggcactggacaagggcagaacttgacattagtccccagagggtggcctggaactgggctgggataggccttgaactggccccaagccccacagaaaccaaaacacagggctggggcagactccaccttctagcaactccaagaactaatgcagaaagtggcagtgtcccccgctccttcatgctgggagtggcgtttggctctggttaatttgtgtgtctgaaagaggataatcagaatcaaaagggcccagaaggaatgggccgagccaggcgggccgggccaggcagcccgggcatctggcmctcagggctgtcagagggtcaggctgccaaactgcagcctcaggatgggaggcacagtgaggctaagtccagttttagcaaatgaagagccattagcattgcccagcccctgcagagccaggtctggccaggggctggctggggggtctgggtcaggtgagcaccagacccagggctgagtgcccatcctgcttggcttctctggtttcgtatctggtaccaagaggaaggggtgaaggctaggatgagggcccaatactgagaaggctgccttgaaagggcaagagtctttttttttttttcttttgagacaaagtcttgctcgtcccccaggatggagtgcgatggcgtgatctcggctcactgcaacctctgcctcccgggttcaagcgattctcttgcctcagcctccggagtagctgggattacaggcgcccgccaccatacccagctaatttttgtatttttagtagagacggggtttcaccatgttggccaggctggtctcgaactcctgacctcaggtgatccacccgccttgacctcccaaagtgctgggattacaggcgtgagccactgcacccagccaaaagggcaagagtctttaaggaagtgaactgggaagcagaagcaagggagaaatcacagggttttttttttgtttgtttttttgagatggagtctcgctctgtcgcctaggctagagtgcagtggcacgaccttggctcactgcaagctccgcctcccgggttcacaccattctcctgcctcagcttcccaagtagctgggactacaggcgcccaccaccatgcccggctaatttttttgtgtttttagtagagacagggtttcatagtgttagccaggatggtctcgatctcctgacctcgtgatccacccgcctcgccctcccaaagtgctgggattacaggcgtgagccaccatgcccagcctgaaatcacagctttttatcccagaggcccatgggtagaaacaacacatagggctatgttctctcagcccaaagctaagggcaggaaaaaaggcatgggccataggagcctgagtgacttggtttgggacaggagggttggggggctttagaggggtcaggcaggtcctgtgtcctctcagtttccctggaaaggggcttggaggcaccagtcatggacctgaaaggatcagggggtcagggaatgggtaagttccagaggatgagaagagggggaatgggaagtcttaaacacagctactggggcccagcaacttgccatgttaaaatgcacccctagtgactcaaagaaccacccggccagtggtgcaggaggagagatgtggcacctgggcacagtgggaaggcacggggcctgcacctccaccagaggagccactgctgacctggaccaagggggctgctctgtgcccagctagggaagcctgggccggctcctgtgctgaggtgctcaggtgctggctgagagcccagttgctgctctaacttggagtgaacctgggtcaatagcagctcgtctctggcgggtgggaagggtctgacaacaccaagtttgccctggaagaagggcagccttaaaggaaggcctttggaagctggcctggtgctgtgggcttgagggactttgtgtccaagccctgtcgtcctggctccagcctaggctccagcactccatttcttccactgccacctgctgaccaggaataccaggacagaaggttttgttcagctgctttctttattagaaacaagtgagatgtattgagcagaacaacaatgcatttggtatttcctccccgaccctggaaatggatgcccccccacagcccaaagaaaagccaagacaaaaaggtgaagctcccccgtccctgttcccagacatggcacctgcctgccagccagtcagtattttttaatttaatggaatgaaattgtcctcaacagcctccgtaggtgtagtcggcttgcaggcccgccttcattttgcagcagagtaaaactgaagcctcaggcctcccctggttctggggaaggtgggccaggccatcaraaggctgcctcacaggtgggtaggcactgacgggagggacactcctgctccctcccctgatctaacatctggttcccctccttctcctagagtgcagctccatgcagttgtccaaggcctttgggcccttaggttggttaaatgctggtcgtctttggggaaagaattcaggaccacagggactcccctaggcttctgagagccagcaagtaggggggcgacagcagttagacaggagttgtggggaaggcctgacattttccataaacctggtgttaaagtagctgggtgtgggctggccttcaaataagacagaagcctcttcagaaataggcatgtgtggggaaacgagccctatacaggcctcgatccggagtggaggcctcctactcagctctctccctacacacagactggagtccgtggtcaaatgcagagtcaatccaaaggcaggaggtaaaggtcgtctttgaaacatggcagctgggaggactgggtggcagagggtgggggccaggcccagggaggccttccaacagcagttgctcgaggasggttagcstgaaggcctcagggtccttcctttgcttggtttgagacagccatggcgctaccacactgcagggctcctgtggggaggccctgacccccgggatggtgctctctgagctgaagtcccagaaggggttgaatgaagaacgcagggactactgggacaaaaatcagatgagcagcaagcagcccacaagccaaaccctgcacacctgggcagagttctcaccgcaacataaagcagagtccgaggagccgggcacctggtttcagtgagggagatgctggggcctttgccaggagatctgtttcttccagaacagccactggggcctcaccgtttccattccatgacctgggtcaaccgaaacagagctcactccagagatccgcacagcccaaatctcagaggcagctcaagctgggacctggcccagaacagatcaagactaggacagggagcctttccaagttccagkttcccccaaggtaggaaagacttgggcactttgtcctttgatatcctcaaaggtctggacagggtgagccactctggggcttgaggcactgtgcaactgttgtctgtggggctgcaaagcaagcccctgcctctccgactcctcccacctgtggaatgcagtgcgcatcttgctaagaacagcagcttctttggtctcagtttcttggagtcaaggagcaaacgtcagtcacgattgctggggcctgcaatttgcagcgcaggaacaatgggaaaagggagggccctgcaggcccctgatgaaaatccaccttagtggagttgctggctctagcagcagtctgcagagcgggcagcattcccacgggtggcacggcccccatcccaagcatacgatgtcttctggttttggaaactctgcagaattagcctctgacaaaccacaccaaaacccacagcctgcaacaagcccctgctggcctgtagaaagtggcttcggtgagtggcacagggctgagcctggcctcctggctaaggcttcattcctgtatgagcggagaggtgacggcagcaaggaaacccgcacaccacacgtcatgctacctccttcccaccacttgcttctctctagagcaaaaattacatccaagcctggaagtacaatttcacagcccaattttgcccggtcacttggctgaacaccactccagaatgcctacatcgacagccatgtgaccagaggcttgattacgttttgggaaactggcagcactgacaaccatcactaccacaaaaatccacaaaacagcatcagcgaaaatcagactcagacaatggagatgggaaaccacttctgttgccaagtccagatctgcctctaatcacttcttgctaccacttgcaggctgtatcttggaaaggggcacaacaagaaatggctaatgggttggaaggcacaggccaggggctggtggctgaaggggtctgggtattggccccacgccactcctgcctagccaccccagggacatcagggtgctggctctttgctctaagatgagctaagcagggcttacactgataatggtctccaaaggtccctgatgttacaaggaggtccaagggcctcttcaaactgcatcatcccaggcagtggaaaagcaaaatctcacaggggactcatccctataaggttggcaacaactggctaaagagcccttttaaatcagttggcaggatgacttcctacagggagcaggccaaggggatggaagaaaggactcaatcaatgaggtctgcttctgcggaccgtccattgctttgtctcagaatgcaggcaggtctggccctgcaggaaagtccctgcccagggtcagccccagccaagagctccacgtgctatcccatgagatctgagcctgttccatcttcccttccttctcaaagccagtcatcccagctgattcagaaggggagctggatgaggttctccagatcctctttttccccatgataagccaatgtctcctctggaggaaaccatgaactgtgccaacgcgtctgtctgccactgtcctcgggtcctcattctgaggaatgatctggattcagcttttcattaaagaccaaacatccttgtacatttggaacatgaaagatatttaaaatatttatatatatataatatatatatatacttttattattcacccgttaactccattatatgccaatcacgagctagttttcagcagttacattcccttgatcacggctgcatgaggatgtaattaactggaaaacacggagaccagagacacgaccggaggtgacgtcacgcagcccacgccatcgcaatacaattgtcaagttcgctggcggtttggtaaagccggttcagttctgctccctttgccagggattctcacgtgtgtgaaaattggaccaacagtggtggggttccatttcctggttcgaattttcagtggctttatccagaatcgcay

SEQ ID NO: 95389 - DNA, 145485 bp, Homo sapiens
acttcagcaaatatttagtactcagtaaaaatttacctcagtttcactactcactagttctgtgaccttgggcaaggcaattcaactgaattaaaccctctctgtgcctcagttttctcatctgaaaaactgagtaacgagtttgttacaattacatttgttaaatctgtaaaacttttagaacagggcctggcacatagtaagtactctctctcatatatatgtatatatatacatatatgtgtatatatatatatatatgtagtattgtaatttttcagttcttaacttctcggagattgatgcatatttaagataaatacataattattaaaggagtagagagaggggctagacaactgaagatttgaagttttggaaggactttagaggtcacccagaatagccatttccatacccactgcatattagtgtatttcagtattattaatataaatgggaatacttcctgaaattttagatcctaggctccacatagaatccttttgggtaggaatccggattctgaatcttcattaattttcccaggaattttttggaagctagcagatcactttcctcagatgggctccaatttttatagatgagaaaacaggcacagagaggttgtattatttcaggatcagagaacttgggagtgatcaagtgggactagaagtcagctcttctcatgtctgggccacaggttgtggagggaattattggattgtatgaaaaggttagataagatgacttccaaagtaaatatacagtcagccagtcagtcctcagagagctattgaaagccagttgctgaactctgtttctggaatggtcagtaaaatgagacatggcttttttctgtaggtttataatctggtataagaaataaaacctctacacaggtaaacacagggcaaggtggaaagcaacaaggcagaaggtctaggaagctgcctacccagtgtgggctgaactactcagctaccatcttgcgttctgaacatggtggaggaagctctgctcttctcacaggggaacccccaaccactgtggtcctctcttcctgcccttccagaggtgataactcaccagccacttggtctagagtttattaccctggtcatttgatcaatctgagaagacctcccctttctattgtcacagtttaccatcacatgcaagtttcctttatgcatttatgtactattattactattatttttgagacacggtctcactcttttgcccaggctgaagtgcagtggtatgatcttggctcactgcaaccttctcctcccaggttcaactgattcttgtgccttagcctcccaagtagctgggactacaggtgtgtgccactatgcctggctaatttttrtattttttggtagagacagggcttcatcatgtttgccaggctggtctcaaactcctggccacaagtgatctgcctgcctcagcctcccaaagtgctgagattgcaggtgtgaaccaccgtgcctggtgtcatttatgtattgaataaatattgttgtwatttactactgttagctaacttttattagttcccaatatgtaccagacactgttttaaggcattatctgtattaattcacttaattctatgtcagaggaagaggctatctctcaaaatctgaaacaatatttgaagctgaattgtttgttaatcaagggagaacaatgtatctctctgaacaaagcaaaagttgatcctatacagaattttggaagctatggaggggaggaattggtaaaaaatgcagaagttggagtctttaggaattgactggctttcaaatttggaagtgtggtttctggagtgagcctgtggtccgtgcgctgacttctagaagtcaaatgactaccataaaataagggcacagaaaaagtggctgcggtaacaagaatcgagaggaaaggaaagggagggtcttgcagccagtttcctttaataatgaagagaacagaaacccaggtttgccttgctgactgttcccggggttctttcagcctccactgtctcttctctagcccattaactgtgttctatgtctattgcatccccagccaaaggtttcccctgcttaatcaggtccagtctccttgctgtgctatcagttcagaaaggcatacagacaacctgcgacggcatctcaagggaggaagacattatcactggttggttaaaggaaccaggaagaactttcatttaatagtcaaaaaatgttcatcaaactcctgcaaactgccaggcactttctgggtgctatggaaataacagtgaaaccgacagacacaaactcatgctctcacagagcttaacctttctttattggagagacagatattaaaaaaaaatatatatatatatatattaatttacgtgggtattatatatcccatggtagtcactgctctggaatcaaagcagagaaagtagtgcagagaggtgattgcagcttcatatgaggtagtcaaggaaggcctccctgagaaactgatgtttaaggaaagaatcagcatggtgaaaaagaccacagatgatagagctgtgtgagcttggaggacagtaacaagatgaggtttgaggtccatgagataatagggaaatgggcctttgaggttattagaaggatgttagcttttagtttgatgaggagtcattgaatgctttaagcaggagtcatcatgtgatcagatttatcttttcaagggaacgtaggaggtactgtgttgagaatagtccacagaaaatgaggggaaagggcgaagaaaggtggttagttgggaggctactgcagtaaccctagcatttgaaggtggtttgaactaaggtagtaaaagtgggggtgatgaaaagcagtcatatcctaggtatagtcttcatggaagattcctcaaattgaaagacttcattaagagccactataaactctagcagttagaatgaaaattctgaatatccttcctcaggagaccacagcttgacctattctagagtctccagagggccttttctgacctggacaaatgctgggggagaaagaggcacattatcacatctggctataaaaataaaatgtgtctatcaaagaaaagacatcatctagacccatttctgtatagatttttacagtattttctcctagataattgtgtgaattatggggattttttttaattcattggtgtgaagacagtgataatttaaatttcactgctattctggttacgagtgggtgttgacattttttattttatcgtgtgtgtgtatgtgtgtgacacacacacacacggaacggggtgagagaaagagaaagagaaacataatgagcaggctatagagctgctgttattccctgggtaataaaagcttgaaatcctactaatgaggttaaaaaaaaaaaatcttaactttttctgcgtgcttaataatagcactgcctactcacataaccagagttcctggaataattgctctctttcttactctatttttagggcctaaaaaatttgggaggagaggaaagtaccttcaggtgcagagcatttccatctaaaagctcaattctagggtttcaatatttggccctaaaccatgttaaatgtttcctttcatgtgaaagtgagggctggaactaacattcttcattggagctctaaatggcttctttttcagtgagaggacaaaagattgatcctttgctgcagattccatctttccccaactgggggatcttcctgtaacatttttatctggtgctttcatagacaccatttgtgtttgccaataacagaattaaagtgtttgtggagccatagaattttatcagaacgtttaactttgaggagaaggtggagtctaagaaatgataaatgttaatattgttagagccctcactaagagtagaagtgtttgaaatacatatatttagaagggtttttttttgtagaccattggaatatttaagatggatttaaaatagaagatactgtgtgaggtacagtgctgaaaagtactttaaaaattgtttctgtcaatttcaacaattaaatgaacatatacattataaggtggagaaacatactgattagaaaaagagaatgtgattgaatcaaagcttgtgctggaaattggttgaatatctggattgagttgccagaattatttttgtggagggctattttgggtaggcagtaacctttcttctcagatatagattttcatgttgacttttaacatttagtcaatgatcggcatgtacagtcttgaacatgttccgtctcatccttttgcctgtgcttaagctgcaaggttgaaaagtttaaaggcatttaatacaggcttaacaaatcattgtgctgctttctttcctctatcactctctatgtagaaaatggctgaaaaattaggggctctcagggacaaagcagtatctgtaatatagaggaacatttaaacatagaattaaaacatacaattaagattagtgacaagtttatatcgctgctgctttttaaggaatgatttgttaaaagggaaaatatggtatccctgacaaattacgagagagagagagagtgagtgtgtgagtgtgagagagagtgtgtgtgtgtgtgtgtgtgtgtgtgaaacagacatgggcttatgtttacgaagatctctttgtacatgtgtttgaaaggtgactgcaagaatgagtaaaataggttacatttacatttcttggtctcctccacactccctgatgctaaacaagatgctgcaagaatgaaaaatacaacttttgtgtaaactttgtaatctagttcatagagaaattggccaacagctacacgcacctaaaggaagaggggacatacatttggagaaacatattcatgtgtgctagttcaagaaggaagcagctagctctttgcctttgaagatttcaatattcactttgttgaaggtgaccaggtgatccctcttagatacttcgataattcagatacatccaatacaagatggatcttcataaaattcaatttgttatttcaatctggaaatgcattatctcttccttgaggaaaataaattgtgtaaggacaggtgctattttctttatctctgcccaaagcttcatcctagggctcagaaatgctaaaggactttgtacaaggaaatgaagctaaaagcttgctaccttaattataggatttgtctactcaatgcaccagattctgaaagttaaaaccactattgtatgatattgtattatttatattttaaggggatactgacagcatagaggtggtgttaattctagataaaatctgaagggctttctcctcatccttttctccaaatgcctaactcctgttcctccatctcgaactctcctgtggtagagtgacggctgtctctgaggaaaggattagggaaatcacttaatcatttgtgcatgtgtagaaatgccaatgaatatttactctctcctaggggcagttgctttgtgaatcagcattctaattatggaaaacattttttttcaacttcaaacaccatctagcatgggaattgtatgtgaatggtacctttccccatcagacctgaaattgcactgaattaggaggtcatatactccatgactaactcagcccagtacagagtgacatatataataaggtagatttacttaatccataaattgtgagctttctttgtaaaattttccttaactatcataccatggtgtgtcataagaaattgtcagctcaacacctcaaatgatgccttcatgtattaaaagatgtgccatctgaagctgggatagtgatgcattttgtcccgtgctttgttatgtggtgtaattagattatctctcaaacacaatttgtttgcttgcttccaggagatattgatcaacaagagatgattccaagtaagaagaatgctgttcttgtggatggggttgtgctgaatggtcctacaacagatgcaaaagctggagaaaaatttgttgaagaggcctgtaggctaataatggaagaggtggttttgaaagctacagatgtcaatgagaaggtaaaaattaaaacctgtaagaaattgcagaaatgggaaagatagatgttccccaaatcagtatggctgaatagaaagcaaatgggaaggccaagtttttatttcttctatgcctttgtctcaaaaggatgtccagatataaaagtgtaggctgtccttcaggcaattcctgctgtccttgaagggttgcctccttactctgccagtcatcattcgtgggaagattggctgagaccctagagcttaatcacataaggacatgaagcacagggatgaaacttcctgcaccctagataataacatagataagtaacctgctaatctcacttacgcaactctctaatgctctttgctccccattttctagtgcacactcttcatgttgttcatgaaaatcaagcaaaagatggaaaaggatgtaaaaacattttaaatttatcttaaggtccttatgaagagcttgtctaaatttagcctagaaatcttaggtggttaagtctgactcctttctggtaccaattattggttgtagatttcaaattcaggctcaaattcaattcaaattgatattagaaccgccgctaatgacatctactcttaagaatacttactatgttctaaggactactccttatgcatttaatcctttcaaaagcactaaaaggcagatactattacccccattttagagctgggaaagaaagtcaggcacaaagaggtcaaatatgttgcccaagattatacacaagtatcagagccgggactaaaatccaggcagtatcacttcacaatctgcactcttaactaytccatatgcctcttaaaattaccgaatcaacctttatcacattggttttcatgttggaggtggattatcaacaaatggatgtaaggaagagatttttattccagttatattagttagaaataagtatcatttttaaaagattttgaaagtgaggtgatatttattctgaatttttgatcacatgcctttcggaaaactagtaggaaaatagattgatgcatgaatttggaagttatgttcaaggcaaaatcctgatggtgtttggtrtttgcccagatagcatatttataattatataatttctgttcttctctgtacttgtgaaatactttggatctgctttacattggagtacactgctcctctggcagttttttttattggcctttattcagtcattaaatattaactgagtattagctatgactaaagctttatattcagccctagagaatataaagaaaaacaatataaaggcccagctctgaacagaatttataatctaattggaaggatatgttttcattagaaaaggcagcggggggtcccagtaaggatgtgataaatgctttgagactggaacagatttttgggatttcactcaggagcgagtactttgagctcagatgtggaatgtargtaaagggcaagtgagaattttggggggcagtggcaggggaagagaaagtttggcgttagggtactcatttctggaggaagaaagcaggaaggtcaataatggaaagagcattgcaaaaggacaagatgtacttaacacagcaaggggaccattttttgcccagaaaaaaagagctcacacaggggactaataagatgagaaacggaagatcttaagatcctaagttgtcaattaaggaaccacaagtcaattacaatgtaatagatgtgcaggctacccacgggaagttggattgaaagctatgctagagttgggggaaggaggtgaagttttgataccactaacttagcctaccttgtttgagatccaacagagcaccattaaaaggtagcctgcagatatatacccaagcttggtgcagtgatcactgctagtttcattagcagaaaattcttcatcagccagtttttaaaactgaattataatttatattcagtaaaatttacccctttggggtgtggttctatgagtttcagaagtcataactattactacgatatgatggaactgttctatatcttcattagaatagttatataactattctgtgcccctctctaatcaatcctcccctttcctctagcccctgaaaccactgattttctttccctatgatacttgccttttctagaatgtcatgttgatggaatagtattttagtaggctttgagtcttgctgtttaccctcaacaaaatgcatttgagattcatccatgttgttgaatgcgccagtagtcattccttttgattgtctcaggcatttccaatttacctctgcctgtcatggttatagcatcatagtttaatttcatactacttgcacaacttggtatttcctcctgcttccccccagcctcccagtcttttcactccctggctacttccctatctctctcctcccctccacagccaaaatttttagagattatctatattccctccctccgtttcttcacctcctacattctcacttcaaagcaatctggcctccgcccccacctctctaagtcaagctgctcttgccaagaacacctccttgttgataaattccatgagcacttcaagtctatctaattcggcttcttagcagtatttgacagtggtgaacatctccttcctaaagcattctttcttcttggttatggtagcactaaactcttaggattctccctacctctctggcgtgccctccacaggacagtcaggctcctcttcctatgcccattcataagtgttggtgatgcccagaaagattctgctcctttctgccctgctgtaggttctctctgagccacatcaactactgttacattatcatagtgtctccctggaactctgtcctcaatcttttgcaagagcctcagatcaactgctatacagcttttggatattctgaaggtgccttgtcctaaacctgctttcacctcatcatccccacaccaccccaaccagatccttctcctgctatccccattgctgccatccaatcttgtgtccaagctggaaaccttgggatgatccttggctcattcatctcaccctcaaaatctaactgatttccargttctagtgattctgcattttaaatatctctaaaaactacatatttaatacagcattgactgtcatccagatcatcaccttctcttgcctggcttattacagcaacctcttatttcaaattttattgggaacctccacataacaactaaagctattgccccaaacacaaatatgatcctttcattcccctgtcctaaacattttaatggcttccttagagccaagtccaaactctataatatgtcacataaagcccattatgatctgagccttgcttatctctgtttatccattcagttattcaacacatctttattgagcactattatgtgcagactctgtggtagtcacttgggatcagtgagcaaaaagacagatctgcttgtatggagattatgtaggatacaataagtaacagtatattagagggtgataagtgctttgtaaaaaggaatagtaggaaatgttaaaggggattgatagaggtaatgggtagattttaattttaggtaagggagtcaggattgctgttgttgagaaagtgacttctgagcaaagatttgaaataagtgagggattcagttatgaggatattttgaaaaacattctaggcagagggcacacacagtgcagagaccccagtatgggaacctccctcgtgtagttaagaacagtaaggaggctagggtgtcaagagcagagttagccagaaggaaagtagtcccagatgagactagaggaaaaatgaaaccaggagaagcagatcgtaaaggatcattttatatctttgtaaggacctcaggttttactttgaaagaaacagggagccatcagatgtatttgaatagaggaatggccatggcttaagtttaggaggatcattctggctgctaggtcgatagcagactgcatagggccgggtacacacagagagaaaaactgcttcagcattcctgtttatttcctctccatttctcaaaaatccatgttcaagccataccaaatgtacttgattttacagatgtgccataggatccgaattttttatcttttttaattttacttttgatctttgttacttctgtcacttccatctagaacctccctaaactttgattcgctctactcttattctatgtaacaacttagatatcagtatcactaggaaatctccctttaccttgcaaatctaagatggcgcccctcattggtcccatcaacatctacattactgtaatagttcttttcgtctgaactatagttgcatgtttaaatcacccgctgcccagaagctttgtaatggtagagtccacrtttgtaacatcctctcaatacctggctatggtggatactcaatttgtgttgtggttgaatctccaggtgtgtgaatggaggcctcctgaacaactgaaacagcttcttgatttggagatgagagactcaggcgagccaccccataaactattggaactctgtcgggatgtcatacactacagtgtcaaaactagtaagaactttaatttacttccttgatctgtacctctgacaagttcttatgtttgcaaagcctctcaaagctgagtatagcaatgcttatggaacgagaaatctggatcaaaaaattagtagttctgatgtttttgcaatggtccctttaatccctaatccagattcattgccaaggccaaagataagttgacaggaaaactgtaggtgttagtgtttgtatgtaaatatcctcttctccttgccaacccccacatactagttgtaatcaagatcatatattatcactgctacttatcatttcttgtgttagaccaaactggcaaatagtattttgattatataaatttgttaagggattttaaatcttgatggcccagagtatgcaaaaaaagtgttcaaaaggtatctttaatataaacagaaatgatttatttggaagacactgattaactcttggcagttggtaattgccaaactatttgatcaaatctggctgtaccaaaaacaaataaataaaagcccttagatggatataagacaaatgaatacattccaagtttttgatgagattatttcacagtgatgtcataactactgtgaactttgtacgtgcagtaatgtgatgtcaatcttacactgaggcaccattctagcttacctgttaatatcctgttcatccagyraacaagtttcaaaaatgggagaataatcttccaaaatatttgtcagtgtaatgtaaaggtatctagcgcttaagatcatacaggcattactttgtaaattctgacactggactaagtttagtggaaagaacatagtaaaattctggctaaaaataattggattatattcctttgggaaagtctggtgtatgtatcaaaaactcagttagcatttcaaaagcagagatatgtatcttattattaccagtgcatgtcaaaagtgcagaatgacatttaatgcagtagatttttcagtttactggatattttccatgttaccatggaaatcaatcataaattaacacagaactaaaaaaaacttattaaaattacttgtagcaatgccgttttttttttttttgccagatcagaggaagttttccatgtttaagctgaaaagacattttcttttgagacttgtttttttattgaacccctaaagagagaaaaaaaaaactaaaataaactaaaaccagatgctgtaagttgtaatgagaggtcaccaaattaaatgattcccaaatactcaaatgtagaaatagacctcctgcctctttgttctgtcatgctgagcttcctgagattgagaatgccaagccagttagccgggtgtatggtgtgattattcacatggtgtaaagccaagaacctttatgagaccttttataggaggggggaaaaaaattaaaattggaacaagccattgtttgtctcttaaaggcgattgcatttcaagcaaattgaatcagaagtgtatgtaagccgcatagtgagtcacatcttactccatctatatactgccagtcgcatgggtccaatctgaaaaatgaaaaggctgctcagtgccatagcctggggtgaactctgctgtgagtgaaatgtatatgaagtgagaagttaatattgatattttcagaaaaaaaggcagtaccctgtgatccttggacaaatagtgttcaaataattatttaagggttctggtttgggtctgggttgtaaaaaagaggagcaagtaaatcaaagctcttaaaagacaactcagattttacttacaaacactgaccagtagaaagggctctacgatgtgtcttcaacatgtttttccttgcgcatgatcctgttttggatttttttagaatgaggtataatttatattcagtaaagtgcacaaatcttaattgctcggcatgatgaatttgtacgtagctgtgcatatggagccatcacctggatctagatatagaccaattctagcactccagaggctctctgaagtcccttcccaatccataattctttccacaaagtacctagaattctaaccgccatctccttagatagctttgttggttttgaatgtcatataaatggaattacgttatatataactcttctgtgtgtgtctgctttcattttctgaaagattcatttatgttaatgctgtatcagtagtttttttttttattgctgcatagatgaatactccattttaaatttacagaccacccaagatttttcaaccaattgtatgctggacttgattattactccttggtggcccgatttatgaccgaagcattgaatccaagtgtgtaagtgccatgctatagaaatttcacaccaaacgtggattagagactttaagtagatgaaattttatttcaaaaatctctatttaatggtttcttttgcatagtgccatcgcaaataatggaatagttttatgatacttatcagtattcaaatagctatttgatttaaatagtggtaccgtgagatggaaaaggcagtcattattatctcatttaatgagatttaacagatgagaaaattgattaggcaattttttatttgttcttgcatgaaaagtcattttctgtgctaagtgatggagagacatattgaacacaaataaaccttgactctgccctcatggagcataatatctggtataaaaatgctaatcgaagtggtccacaaaaattaatgtaaaatccaaactctcatctgaaggaaaagtacaaagtgttctaagtattcatatgaatgggacaatttttcctagttggaagctcaggagagtgtgctctgcaaagatgacagttgacactgaataagtgttattaggtgataaggtgagggatgagttctaaatagacagaatgacatgtataaaggccctgtggcaggacacagcatgccattctctatgaactgaaaggccagtgtgggtacagctgagagagttacaggactgtagtggagaataagactagagaaagagagagagagatagaagccagacatayagggcccaggtgaccatgtttatgagtctttctaaatgtaacaaaaagccattgaaggtttctaagtcactaggtgccattttcttactgaaaaaatctctaaaaatataaataggttggaggggacccgttaggagggcattactttagtcgggtgagagaggaaagtagctcggacttggagagaagagataggaatasagcgggaaagaatgagttcaaaaaataaaacagaaaggatgggatacacagcttgaaaataacagtaaaagggagaagactcctgggacaatgcctgggtttctggctttcatagctaggttcatggtcatatcattcatagaaataagcactgggagagggaactggttttcaagtatatggtgaaggaggcaagagcaagcattacattttcagttgtgggcatttgagtttgcagtgactttaaaatatccaagaatgcataggaactaagctgagaaatatatgggcttggaattctgatgtctatatgaaaggtataaacttaagaattatcagtgaaattatggtaattgaaatggtggacgtggatgagacttcctatgtcagtgattcaccaccctgactattcatgaaaatcacttgagaattttataaaaatgtattgatacctgggtgccaacccaggccaattaaatctgaaattctgtggctgtgccccatgcattgatatatttagaaagttcaacaagtgatttcaatgggaagccaagataaagaaccactgcctaggggacagagtatagagtggggagagaaggcggctcaatactgggccttgaggacatctaacatttaatggttaggaggaacagggtcagcttacaatggcgagaatagaaggaaaaaaacaaaaggctagctgtggcagccacgaggagagcatgcctagtgtcacatgttgttgaatattcaactaagagcctaaacagcatccactggattagctacatggacgtcaytggcaactttagggaggttttgatggagtgatgacagcagataccaggttacaatcagttacagtgagggtaagtcaggagagacagtaaaattacacacctttttcaatcttttcttgtatatcccaggttttctaactcttcatctaagttcaaaaatctctaaatatttcagattaaaggagtgttaaattgctgctaagctaaaccatccactcaaaatatgccaacccatgagtgtgttctatcttatcttttcctccaccctccaggctgattcctaggtttataattgagccagttttcaaagacaggctaaatactttttttttttattatgaaagtaactattttatatatatttgtaggttcacataaatatatgcttttttcatactttttgtgtatgtacactggcttcataacgtggttaagaaacagaatctatctttttaaattttgttttggagatgaaatcttgctctgttgcccagactggagtgcagtggcatgatctcagcttactgcaacctccgcctcccaggttcaagtaattctctgcctcagtctcctgagtagctgggattacaggcccctaccaccatgcgtggctaatttttgtatttttaatagagatggggtttcaccatcttggccaggctggtcttgaactcctgacctatgatccacccgccttgaactcccaaagtgctgagattacaggcatgagccactgcacccagctgaatctatcttatttttaagatggcataacatctgtagagttgacacatatgtaggtgataaatagtaggtgatacatagtaggtgaccagcttttatgcctcaatccaaagttttcctttccagatgttaaaataattgcattaaattctgtgactataaatctaaatgtgtctgcttaacttacatatttagagtacacatttattcagatacaatttaatgtaatccctcaattgaaaaggagatcatagatatgtagtcaccctcaagttgtctggagagagaaaataaatatcaaacaaggcatggtgactgttacaatgtgggttcccaagaatgctgctctagatggtgtttagtgagtgggacgtttattaaggagtacccttgggatcaacatgagtgacgacctgrggaaggaggaggaggatgcaagaaagggcaagtataggagtcaaattgccacgcaggctccatgacaatcttggctgacgctcggagatctctggaactacagtggcccttcaagaggggtctggagttrggcccagacggctaggcctttacatctccagcagttatcaggtgtagaccaccacaagaatgggtgtgaccctggaggaggtagctccctgcagccaaggcaatctctaaaggggctaaaacatcaatgctctgacaacagcgttccagcccggagcaacacatccttcattgacaagggatttgggtagtgctttgcagtaaaattatcacataagagatgtctcacaaaacactcctcatttatacagacacagagagtgtagtagaggaagccctggttcaggtggagtagtctccacttagaatatctagaggggactgttagcatactcatggcagtaatctgataaaacttggttaccatgacaatggattttctttgaccatcaacagcatccaagtcagtgttccaagcatccacagagtgaaatggccactgctcatggctaatacatagmacgcaaatgcattgcctttattgctcctcacggaattgaggtttttctcgaaagactgctgcagcaacttgcagatccctgaggccacaagctattggcatttatctaaccatgactagtgctgtcactgatggagtaattctctattttcaatggataaatttccaaagactgcctacacttcagcagccacttggtttaatagaactctgtgcatttcttgggacaccaaaggaatgttttgactctagtcatagaagtgaagtgttttttatatctatctagttatacgtatgaggtgtccccagtgtttctgttagtggaagaagcggttctgaagaaaatgattgaatttattggctggaaagaaggggatggaatatttaacccaggtgagtacaattagttattgatatcaaccttccaatacaaccacgtaaaaatttatccatgaggaacaactccttgcagatttatacacgacaaaaagttggatattaataattctacttgctgagaatctagcttatgcctttctccagagtgataatattttgtattaatgctaaatagatgacatacatacttaatgaatgaggtgcctacagtttaggatttatatctaacacaaatgaatcgatttgatgctggaagtttggaagggctgtaagtcctctaaattttaaaatcaaattttacttgagaagatttctgaattacatttgtttatcctgtagtccttttttgtagccagagaccaacaaatattatttcaattttattgattaggtgacaaagaatattaactatggagacctaggtaaaggccctaagtccagagctcacagattgagacttttggtttgaaaaaaagcctgtcatgggaataaaccaaaatttatcttctaagaataaaagttctagaattagagattagggtatgtaataaaatattcagaataatgggagcagggaggtcggtgttcatgtgcttttcacggtgatttttcattagactagagcagtcatggccattcatgctttccactgtattcagcattttgcgagctataacttcatgctataaatatgccattttaattttgtttttgcaggtggctcagtgtccaatatgtatgcaatgaatttagctagatacaaatattgtcctgatattaaggaaaaggggctgtctggttcgccaagattaatccttttcacatctgcagaggtaaaaattatttttggtattgaatatagattttctgagaaagcatatttaagagggctttgtttgaagattcctgatgtgattttgtcctatacccatgtgactaatatgctgcagtataacatagtatttcattccaaagtaaattctaacgagtttgatgttgtaacgcctggtccaattttgtataattacctttatttaaaatttatagtctgtaacaacattttaagaaaagaatatttaatttgaaagtgctatctctgtgaatctctttttttgaatgtcttatttgttagtacttagatgaacactgtggatctcagctatgtcttctactcacatttccttttaaaatgattgctttgattggctaatataagggatgtgtatcttacttttccagggaaaagaaagatatacagtaacaatgaaaacacacacacacacacacacacagatattgccacagttctccatctcttattttactctccactaaagtaggtgggtcagacagtagataagcgcataggctttgagttaggctgcctggattcagtccctgcctctgtcacttactgtctgagtaaccttgagtgagttaatttctttgtgcctcagtttcctaaatttgtaaaaataagtttatcacttagcttttataaccaacaaatcaccccaaatatagagttatcattctataactgtatattatcacttataagtctcaagatagctgggcagatttgctgctcttggctgggcccccttccatgtctaggggttggctggctgatggcccatctacgagtggctcagctgggatgattccagtgatgcctctctgctccttatgtctctcattctccatcaggtcagtctaggtgtgtcctcatggcaatggtgcaggtataaaagggcatggcaacacatcaggcctcttgagtcttagcctcagaactggccattgttacttctgcctcattttcttggcaaaatcccatctgtgagcccagacccaagatgtgggaagaaagaccccacaacctcatggggggacttgctgtaaagtcaccaggcaaaggatttgaatacacggaacagagaacaactggaaccattagaacaatccagcaaccacgcagtagttgctgattagtgagttttggcaaatgttaaatgagtaattgcatgtaaagtgtcatctgggatataatagattttttaaaatattaactataattgttactaggagaatgttccagctgcaacaaggtgggcagaagtagatggcacggcttaagtgcagcctttattggaagagattttttccctttcctattcttgtgtgattctagtggatgcctccgtctattctaccactgcttcatcacccaggttcttggcagaatgagtttagcttcttaccttctgagataatatcaggtatcctgccactaacatgaagtggacaaaataaaaaactgagagtctgttatttccagctaggctttcctgtatctatcattttcttctaaatacaaaagttagtttcttattgcaaaaggacaaattgtgcactaatttctcctcagtaggagaaaatatgaccactctcatgttttcctctcactctgacctttgctctggatctttcagcactaagtgcaaagtgggagttgagtgacaggaggcaactgggaggaatcatctagcctgagattcttaactcagccattcgaggctcttgttcataagtcattccttctgtaccaagagaagaatgtttggtaatgtggacagctgggaaaaagtacttgattatttgggattgttattgaatagagtttccttcttcatgcttcagccctggatgtttcaatgtgagggaccccagtggatmataaatgcagagtctcttctgcattcaaactgctatttccaagcttgggaaagctgattaaatagcgcccaggttatcagctcaggttttttacttttgcctttttcattcttcatttggtttaaagcttgctggagttcttttctggaataattaccatggaaagggaaaagatattacgtggaagcctagaacagagattacgcctgggaaagatcagtaacaggtggggcttatgaattgggagtgaaaagaaattgaaaccttatgtagttgtgaaaccataactaagtggtttttaaaaactttccaaagagaggcaaaatatatgccttggctaacatgtcagcagaagctggagccagaaaaaccaagaactaggtgtgaattccacagaaaaattacatcacttcgagcacactgtagccttgaatttatattttgactccattggtcaagacactactttgcagctcattcctttccctactcaaagagtcaggttatagcatttgcactattttaattcatattttattgactgcctttactacttattacaacaaatccatctatttcattaaagaattaaagaaggttgtgtttagtaaacagtcttaaactctgcgttagtctttttgctatacctcccttattttcttttaagggtttggtccatggcccagtactgttatattaggtagtcttttccagtttttgtgctaccccaaattactccatttctatcttgcaccatccagtgcagaatatacgtacccaccactgaaggtgtttttgcatgtgttaggcttttattgtaattttactattgataaagacctgcaaggtcatgacaaagacctttgcactgtcaatatatccaaggttgcctctctagtgctaaataggcatctaagagaaggggacttttggagaaataaaagtaataaatctatgtcttggtttgcactttgatataaatttcttgggtgtatagaaatcccgtgtttgtaaagttcctgtatatttcagatcacttctggaattagcataaagcagtrattatgatttgccactaaaaagtagggtaaaaagaaacccttacctcccaggccagtaatcaatgggctagctcctctctagcagggcttaggccaggagaggcaagtgagktatgtagggtgtgtctcagggtcatgcctctaaattttgcactctaggtgcctctttctcttcctcctgattgctgggtgagggctgaggttgagttgcgatgggatgtgattgcaggtcttctccacgggcaagcaggtgcttcgtaggacatcctgcagagcatgaggctgggttcagtctatctggcttctggttctggcctcttggggaattaaaccagctgtgtgttgttagagacatcccttggacactctttttsttcattctctaaaatgtaacatttatgtaccccattctaccagctaacttgagaatcaaattagtcagcactggagtccagggcacagtgtacatttatataccccgttctctctaccagctaacttgagaatcaaattagtcagcactggagtccaggtgtccagggcacagtgtacattgaggagaaagcagcagttcattgagaagctcaaggtcatagaaaaaaatccttgtgggagccagaaagtaaaactccagctcaatgctctctttcatgtaggcacttgctattttatctttatagaaatgaacacccgctgagagtttttttcgtcttctgtagatttatgaaacctgtggggaggttgagtcttagaacaactgacttatcttttgccaatgatagaaacgccactgtttgtttctaaatgcagttgttacttctgaattccagccttctaggtttttcctttccttgaaactactcagcatgtctgaagcatcaccttcttttgttcycccttccagggctcttccttctctgaagctttcagatgtttaaacttcagttttgcagttttttgttttttttttttttgatctatctatctcagattgacrttgggttgtattttgccctcaggtacttaaagatagctccacttttctaattctgattacaagatttttattcagcarattcattggttggagatattttgctatttctcagggggagagcattgtgcttttccttatagttagatgtcagtggggtaggctagcatttatcattatgaaatcaatagctgtttggttgccagagctcaactctctggtgagaaataattcacccgagctatgtcaccttagctatggcaggcaggttaccgccagccagcataggctggtggagcaagtagagaattaattacactttcttgtacattattactcttcaatatgcatatggtcttttaacaacctgaaataaaagcatcctacaggcattttggacatgtcctatttgatatttggaaattaattatttagaacggtttcatttttcctgatgttacttctgcatttatttttacagagttaaaaaaagagctcccaataaaactctcctgacaaaaggaaaaaaattaccacatttgagggaatatatcaagtgaagtgtgaaggcatgactactcttttaatgtattcatacctacaaattactaagatttttttttggtacaataatgtcctttagcaccttcatttttctggcaagaaaaagaattaattgaccacctgtcctcactaatgtatgaagagcgacatatccaatgtttgcatgctaattattttatgggcttcatgtagtatagagaaggcccaataatgtaaagcacacactactatttatcaataagaaatagaccagacttaattccatattcatctattagcctcactcatgccatagctgagtaaagtagtttgtctattattacttttgttcttakgattttagccacattcttgggtgtttcagtcttgtgttcagtattaaacaagattggtcaagtgtctgatcagcacttataactcattgtttgctctaggaaataattagattcctctctagcctgtgattgcaatctttgagatagagtcttgccctctccttagagggtttcaagtcagcagtggactagattctaagtttccattaatactaagtcttatgaggagcatcaggagaaactttacttttctcaatgggatggaaaacaacagcctccggtgtcctagtttgttccatgtgccaggctctgtgctaagccctctacatatattattaacccatttttgtctagcacgagcagatggagtaggcattattggcatgatccctttaaagagtaggaaattgaggcttggagagtgtatattatttgttcaagattccatagctgtaactggaatacttgaygttmaatcctggtttctctgaccccaaagtgaatgttctcaaccactatgctaaggagctcaattaaattacttttttatgcaataatgtcccaaagattgtgctcagccatactttcatctacctttgataataagcaatgctttttttgtgctatgttttcatgtctcccccttccccactgtccctttgaattcagtgtcattactctatgaagaaggcagcctcttttcttgggattggcactgagaatgtttgctttgtggaaacagatggaaggtaatgggaacaggatctggaagcctggtgggtggagggaaaagtttatatggtttataaagcagtatcattrtctgttaattactaaacataactgaaagtctcaaatctttgtcccttagaggtaaaatgatacctgaggaactggagaagcaagtctggcaagccagaaaagaggtgagaggggagaaagcgagagggagagagaacgtgtgtgtgtgcgcgcacgcccgcgcgcttatgaaagagagggaatagcaaggagagaatgcaaacagccaaaaccatttctatgtgtgggagagaggagagagaatgttggaattaaaataggaaaactcatttacagatgttctatttccaagtgcttggctctccatgttctgtggagtttcccggatwttcttgttcccaggtggctggagactattaaaacactgaaatcacccgtattcaggattcttggctagaagcagctctaaggatcaatccagcctctccagcagggccctagcctctcctctccttataattcctccctctgagaaatctgcaggacaaaccaattttctctgggctgtattcagggtgatttttgatttcttgaccaacctattctcccaggttgcttccaatcccaaacccatctattactatcaacccctgttgggtctgtatctagtagttcagtgacagaacatcctttcttccttagctgctagaatatattagaactgaaatattggagaaggcaaggcatggctctgggcacctgctgtgctccagccaaggctggccttaacacctgcattttaaaaaggggtgtcattaggccgggcgcggtggctcacgcctgtaatcccagcactttgggaggctgaggcgggcagattatgaggtcaggagatctagcccatcctggctaatacagtgaaaccccgtcactaccaacaatatcaaaatattcgccgggcgtggtggtgcatgcctgtaatcccagctagtcgggagactgaggcaggagaatcgcttgaatccaggaggcagaagttgcagtgagctgaaatcgcaccactgcactccagcctgagagacagagtaagactccatctcaaaaaaaaaaaaaaaggtgtatcattattttggtctcagccattttgctttttggaccaaaagcctgctagatttgctgcttctctcccatcccaccgctgcctgctgatggagcttcagaccgttctccaataaccttccaataggtagcaacaaaggcaggcatgactactgaaaaataaaaagcctggctcctgagctgggatacaagtgtatctatcctcataggagttcatactttaacaaggatgggttttttaatgtttttaagtttgaatattatagttctgttgttgtacttttttttttcaagttttcataaaaactacctagtcctggagaatgctagatcacaatatttggcttgaacttctgtatttaaaatttctgccattattgcagatgtattgacttcaggtgtgtgtcctactttttttttttttttttttttttttwaacattccaatgacaagtgaacttkattgttatctggtggtttgcatgatcaratttctttgactctggtataattctgagtaacaacttgtaagttcgttctgctgaraaccacagatattgytttctagttttagtttcatttctttttacataaattcctatcaaaaataatttgcattatgttgttaatgcttgttggtggggaatattaattgtgtcatgattgtctttcttccctccctcatttctccttccttcctccctttctccattccctattccccacttcttaaattttaaacttctcattacaaaaaattgtaaatgtttcctaaaaaaccaaaacacacaaaaaccaagagactaatatcatgagccttcatatacccattctgtaatcagcagtcattaggctcatgctcctatttcatctgtaccacataccctcataccaccactagataggtttgaagcaaaccccagacataataccatttgatctataaatagttgagtatatttatgaaggatacgtacttgcttaaacaacataccatagttttgtttaaaatataatttttaatatcaaatcttcagtgtatattaaaatttccccattgcccttttaaaaaaaatagttgacttgtctgaatcaaggattcaaataaagttcacaaattgcatttggttgatacgtcaaatgtaaatgttttctgatctatagcttcctcctcctcctctttccccccactaccattgatttgttgaaaagatcaggtcttttgtcccatatagctttccacattatagatttttgtggattacatcaagaatttgagaccctaagtgctcacctcctctgcaccatccggtttgttctttatattttctgtaatttggcagttagatcttgagactcaatgagatttaagttgtatttttctttttttaaaaccagggaggcttcattggctcctgccatcaggagacatcctgtgtctcttttgtaataacattgattggtggggtctggtatcgtcagtccatccatcacaataccctccactccatcagcttctcacttagtggtttttgctgccattgatgatcattgtctagacccattatttcattaagtgatgtcctaattccttctctccttccttctttattgtcaggcattctactataaagaaaaatattcctcctcattttgtttccctaaggaaacactgcacaggcaagacaggataaacgtcttattctttccccttatttatcaatttttaaaatagtgagtttgttgcctagcatcccctaaagataatccccatttttttttagtgtcattaggaattcatgtttctagcatagagggttttattccaccacagtcattatcatttttgtcgctcaaatttttgttttgacagtgaaagtacatgaaacggacataatactaaagttgagaactcaaaaaagtaagtttttgaaaagtaaaaattgctttaggcacatttaaaagtagggcaatggggttagagttagtacgtctcctcagttttctttcaagtcagctaatacttgagcctggattcaccaaggacaaaccttgcatccattctgagataataatacatgatgactggttcattttttctcagtagcttcaggcctagttgttttgtttcaagcttttaacttatgttgtttcagatatgaggaatagtaccatcaactattttttctgctgggattcaactccctggcctatgacaatccattgaaaaactgttgcagtgaccttgtcttgatgtcattacatagatggtgaaaaacacaaagcatcagaggtcctaaagggcttactgacaagctcaaactaggatgaacattgaatatttagagacattttgttagagttgtgttagaaatgacaaattttcttagacaatacagctcacyggcagcatgccatcaatactgtttctactgaattctcattaacagcaggagatatggggaagaaagtctaggttaaatccagatcgcaaaagtttaatttctggtcctgtatttttaatgagatctttttttaaaggtgaggraaactcattaataggctataatagcttgcaaatgtattttctcatgactgtcaggatgtcatatagtttatgaggaaaagcgcaaccattaaagacaacttaaatggttttagtaaattatttttctattgcttttaatgattttaatgattggtgtaaagctggtcttatktcctttaggtcactggtatgataaagccatagttgtcagtagtttgaatacagggaagaagtttcaaagcctctggtttctccagggctctgtcacctactgacttggctctaaaagttttgggtagatgggattgattctatttgccacagctgtctcccaagatggcaaatggatttgttatataccaccactttgatccgtatgcatctcagtttagagaggcgaaccacatattcttgctctgccccactttccattgagaaataacatctttctgtcaaaagtcggttaaattggaaagagttggttcaaacacaataatccctggcattaaaggacataaaaatgtattgcaatgagcatgcactttataaaactgaggggaaaaaatggctccatgctaaatggagaaaaaaataacttttagaggcactaaactttcagaggcagtaaatattcttgtmtatttctcaggtgctctagaatcttaatattctacttgctcccctcacccccacatttgtctgcaaacttcacctacacagcgagcaacacatctctaccaccatcctggagcaatccatttggaaacaatctcatgtactcttcatctatctgattggcatagagtcctttaatggggacaaagcatgtgactagcttgaccgagataaccattcatctgtttgtgtgcacccacattctcccttttcttctctatttcccaccagtacccgttcatgccacaagatgcagtcatcagctatatgaggaggaataaccatgatagaagtgacacagattttcttttccagcacatgccaatggatttctctgttgcagcacctattttggagaatgtatcccagtgaggttgccttatctcctctgatgctgaatttgtacctgagaatattctacattctttgttttataactgcacttactttacaaggagatgagcaaacaggcctgcatggtttactccgggagctctgtcttccaacctttttttttttttgagaagatgacaatgatggcacaatggaggctaaatgtattttttcaggaagaaattaggagtcatacaaaatgtcagtttgctgttgcagctgaagttattaaatttctatctggacaattgatagaacaaaacattacaaaaaacatgagaataatactgaagatgtactgagttgggacagaaaatgctattgccatagcattttctgtttccttaatctgtttataatgccaagaggccacatattcacaaaatttaaaaacacccattgaattaatgactacctccaaaaaacccaaataactctctggatgcataaccctttatattttccagctattacaggacaaatttagtgatgacagtgataattttgtgtgtgtggatccttcttacagggggcagcaccgtttcttgtctgtgccacttctggtacaactgtgttgggagcttttgaccctctggatgaaatagcagacatctgcgagaggcacagcctctggcttcatgtagatgtaagttcatttatgtgtacatacctgtttaacctttggtctttttgtagccttggtagaaatttttcttattctcagaaactagatgtggagtccccaacgcttttgtttgtgtctcaaattgggggaaataagtatgccaytttcttgtaaagtataaatgagaagattccacgactttgtgtatattttgttttagctttctggattccattttgcttcttttactcccatgagccatctttggtcctcaaatctactgtcattgaagcagcctggtgtaaggcacccattttaggttagggagccgagagactttggtttgaaattctgatctgcctcttcttcattgcgatcttagccttttggatttcaatttcttcatttgtaaagaggggggatggtagatgtgggctgtaaggtatctttctagctctaaaattatgattccaaacagctggaaaatgcaaaaaagctacaatgcataattgcatgctataactaaagcaaattttctctggatctatcagatagttatttgaggggggttgggataatatactccattattttctagcaaaggattggctttttaaaagaatttttgtaagtcctgcggttattcaaaatacatatttccttaaatcraaggtaactttaaaaattctacttatcccgggttagaatgctgaattcagccaactatgaacacttgtkgagctttttaattttcttttttaaaattaattttttttgtgtgaaaccagcagttaattagtttgattctaaccaaagagacaattgcacatggtgttttgggagctttcctctggtaagtgatagtttcagatcctccttggcagaagaaatattttttgacttgctgaacaaaaggaaacagcatttggggggatatacccacataattttgtagtttagatgattttatgctttcaaagtgtttatttcaatcaaatcatatcacctagtagagtgtctgtgatatgattcaaagtttacattaactgaatactaacatttgtaaaagcaacagtagtataaagtttactagagttattgcttctattagtatgccaatggcaatacttgaggtagattatccgtgactcgttaacgggattttagcatttgtatctgttcatatttcaacttatatcttattgatttttatagacttagaagcataacaatacattatatcctaaaagataatatgaagtgagcatttttgtaactgtggaaataagggggaaaatcaaatacatcagcagttctacctaaatattgtactctcataaaagaaacatcacatatggattatatagyttatgtagtttgtataaaatggagaaaagtaaatagtttatgtaaaacagtcaccacagcagcttttaaattgggaatgacattaagagatttatggggcttagagaaaattgtgatttatgaatgaaaagctcttcaggttttctaaaaattaaaggttgagtctttgaagaaaacatctttataagggamtgtaaaccacaccaaattatcctatttgtgcatagtatacatctggcaaatgcctatagtattagattaaatttgacacaagcctatctggcttattaaagacatgtttacccatcctttagtattgtgggtgtcaaatcaataaaatattactacaggaacatgtagcttatcttgaagaaacttcatatgccataggtactttattaaagaaaatattaacaaattgcaataattgctttgacctgtttgaaatcttctagagtattttaaagcttctttcaaatattaaactgatgtttatctctttttaaaaataaaaagacatttacttgttcttctgggttttcagtaaaaccatgctgctctgcatacataccatgttttattaattctaagatgcacttacttaaaaaaattttaactctgaaattgatattttgatgtcaatttttattagtagtacacaaaaaatgggggtgcttacatttgatactgtcttcaatttggtaatataatgcgttttttaaacaaccgaataagaaaaactagttttattagactctttcactccagtactgttctcttccttcatgagggcaattgttatgctagtttctgtctgagaacaaaacgtcgggctggtctagctcttcttyaaaatcagaggttgtagctgctggaaagcctctcattcccaacaaagcttcctattctctcacccattcctcattccaagtgccatagaaggcacaaaygtatttaaaatcatggcctttagaggctgccaaatctcaattccattcttaccttcacttccctttcaagattggttctactattaatttattaactaattaaagacaaatatatataaaatgatatactgtggtgcctcacatatagtaatagcttaataaatgacagtctttattgagatggaaagccaaactccatcatttaggtgataggtttgataatttcacagtttctggagttaggaattagagtgcagcaaattaaagtagggcatttacatcaggggtgtttttttttttttaaggaataaatttatggatgagctgttcctaaccctgccaaagtactttgtgaagtggtgaactaatgccttggaagggttcctgtgatttcaaaacttaaatccagttcactagaattgggagattatttacctttttggagaagcagtggaggcagaggctagctcagggagcatgaaggagtagaagtgtagggtatgaggcaggtggaaagtgtgagcgagcaaacaggtgtggctgactggactaattaatccttcctgtagttgtcactgataggttctcagagaggttgggggataagagaagtgagaaaagtaggtaatttaggatttagaatatgtaatgaaagtcaagaaaaatgtgatatgtaacacatcttaatatttgcaaggaccaagttctcaaaatccagatctggagatcctcagttgtaggctggggataaaattttcctagatgctgagggcatttgcctttgtggctcagcctgagtcacacgtggtccattgtgaatccaagtaagggaggaaatgcagcaggaagggaatttgactgataatgccaagttactaactctttacctgggaatccttgggatttgaacacccaacacccttgaaacacatcagagctcgcaggcctctggggaccccatggagttgatggagcctttagtccatgggacaaggctggtgctaatatgaggccagtggggttggcagggctcaaattttaagaagcattcactcttagggccttgcaagagtccagctctgagatgagttcttccttgaattatgcaccctgactcattcacttcaccctagtctcagctgtcaatgaaagttgtttttaagtgggatttaaggccacaaagttgcttgtgctgtactttcttgttattggctaccaatgggcccaaattttgtaatactctgaggatcgtggagatacttcattttctttatcttccatatctgtggtgcagccaaccatgccacttctttttacatgatattaaggtctacctatgcctttaaattccatagccaaaaatagaagttgctacatcctaagcaacccctgaacttacctattgcctaaagcatctctgtcaccctcattctacatgctatactccccagtttggccaaattgtcaccttccttaagtaatgatgttaacatgacaggagaatgggctttgaatctcagatctgatttttgtcattggcgagaccttggacaatttacctgaacacctctgaactttataaaaagtggaagtgatcataactccattcctaatggaatgctgtaaggtttaaatcaacttggaaagcattcaatacagcccaagctagtcccttcaaattctctcaatacagttatcctttaatgtcctacaaattaaaatttatgtctgcaccattttcaagaagcatactgacttttgtatttcttacatcaatttttctccctttgctccagacctgttgactatgggattttatctgagctcccctctcctttgctcacaaaatttacttctccagtggataacttccttttgtcccaagcttgccctctctctcatttgtagatatttctgaaagccatttagctaaaatgatctaatttttcattaacagatatttccgcctagctcatcctagttggccttctatctaccttgtcaataatatgcctcattcattatataaaatactagtccttagcccatgtctcatcatacactgaatagcaaaatgttagcattgtgaagatgttgtctatgttagagtctaagcttcaagagggcatggactttgaacctcttccatccacacatagctcagttggttaatataccaatttatgatgcatgaatttataattctaagggtcagtgagggcccatctattgtgatgaggttctggttgcctgagtagagccagtgatcagaatttcctggggtacaaattagttaacatgacataaaatatcaaataatgcagattgaggtcctcactgagggttttctatgacaacccactggtaaacaaataacattgaaataacattgttctggtactgtaaatatctcaacaggcttcttggggtggctcagctttgatgtcgaggaagcaccgcaagcttctgcatggcatccacaggtaaatgtagtttcctggtgtacagccaacttttgtcaggcaaagggatctctttggactaagtgatattttgaaaataggaaaaaacaaagtaattgttttccttaaataaacaacaacaaaaaatccctccaaattccttaaaccactcagataaggagttctatagaacagtaaactatgtatgagtactgaatgcagatattgataatgatagtattccattgcctgtagaaactaattgagtcctctccctactctgtccctttgtttaaacaatagggctgactctgtggcytggaacccacacaagatgctgatggctgggatccagtgctgtgctctccttgtgaaagacaaatctgtaagttttcctcttgtggtcctttgggcttcaagggggttaagccactgtgcttgccaagggcttcatttttgctcatctcttggtgacttgggcgaggcgtaaattgaaggtgtttgggaaatgtgttgatggtctctacatgaaagacaaataagcctagataaaatatttagtgattctgctcaggtaattttgtggatttgatttaggtattatataatctcattagttacagcaaaatggtctctctctcaccatcatttggattatattttaaaactcagttttaaacattgccaagatttttttctccttgattaagtctgggatttaagttatcttgaaacttctgctcactgagaaagtggaacagatgtgtgtcatacattaaattgaatacttaatacgcttagctagggcttaacagcccgtttatatgggaagacatttgttcagggctgatcttcgaacactaatttattaggggattgctcatcccaagtggttggtacttagcttcttttggaatgctagggagagttggaaactgtctggatcactgtgaggcaagtggaaaaaaagttgaggctcctcttggccggaggtataaactctgtgttttccatgggttaaataaggatccttgtgggaagtggcccaggctgggaagtgctacttcattcttagaaatgcctcctcaagatctgtgttcagcatgtgggtgatctttctcagccatctgtttacatttttttcttaggggactccctttgccaatgttaaagtcattttctgtttttaaggaattttatttgaaatgaaaactatttttaaaacttgaaacctagtcttgcatgtgtagctatttacaactttttaaagaaattgtgatatttatgttagtgccctgtgcgttttgacatgatcagactgtccatcagaaactaggaacaggttttgcttctatagaaatagacactaccagaaatatgaatcagttccttaatgttttattaggttggatagagttgaatgtattcaataccatttaatttttaaatttaagtttcaaaattgtggtatgactatttgtaactaaaaggtagtttaagattaccatattgattgtgaaccaaagaacgtaatcaacttgcccataggtacacatttaggatgggacagagataggaataaacccaagttttcttttggtctaggtataagaacaaaaatgtatcaagcatcctttatgagtgaggtattttacatttgctttctacctaaatcggccaatctgacaaacttatctgttggtgtgatatgctaaggagtggagaacttagactaaaaattttatgactactcttaagtaactttctagctttcatatacttttcttattaactgatatttgagtaatttagacaacaactgaattacatttctgtacttgaggcaatttaaatttttctggatcatataactccttaacagggttttttttttttttaaagaattcattcctgaatcttagtgacaataaaacccatgtctattttcatggcatgaattaagaggttargggaattctattcactgtgcaaagaactgagcactttcaaaaagttgccaattttttttttaatgaaaagaccgttttcaatttaaatggaataggaaagctaaaccatgagataygagatgtggcaatcagtttaagttttgtgttggcagttttctatctcttttgtacctggtttctgcctctgttactctcttccatatcattaattcattccatcaatcagcataaatgatctgtgtaggcttgacactgtgcgagtctaggctcttatagcattgaatcagacagacatattccccagagtcaaagagtttataatctcacagggaagacaatgaacaaaatgcagatatttaattttttaactgctgttttgataagtgcactaacaaatgtcagactctgttgattgtaaaaatcaacaggcattccagcctccttctcttcttgcctatctcccaatattcacctaactagcctcccctgcagtttctatgacatagttatgtctaatgtgatgtagggaaatgtggtgaggaccttgagaataattttatacgagagcattcttctcgcatttttctaccttgaatgcagttgcatcagacatgatatacgggttgttaccataaggcaattaccctaaatttaaaaaattaatatgcacagaatgacagaaacaaagggaaagtcttggtttggggtaattttgaaatgttgcacccccaaaacgtgactcctttcagactttgcgatatcaagtggttaaaattaaatgttcttactactgaaaccatctccattgggtaatctgttagttgcagccaaatgcacccttgtctaatacagagaagagtatagtacttcagtaatacacagcaggtgatgtctcaggtggaaggaacatcatgtgaaaattctttaagaaaggaacgccctttttaaaaaaaattattttagaaactgaaaaaagcgtattttggctgaggcatagagaataatgtgaagattgacataatatgagactaaaggattaagcagtgggtagatcatgaagggtcttagagaccattgtgatgattttagacttgatctttagaacaayagaagaactaaaagagttattggaaaaaattttcatttaggacaatgaattggaggggaacaagaatagatggaagactaagaaaaaggcttgcagtatctatgccagagttgatggcaagagagatgggaaaatgtgaaattcactatacattttagctatcaattagacagggctcaattatcaattattatcaattatcaattatgggagatgagasagaagcaggtgtcatgtaatcatcctgattactgatacagcaactgaacgaatgattccatttaggaagatgaagatcactggaggaaagagttgagagtgaaacaccttttagtgctgctcatagtaaatttgaggttcttaagaggtatattcaagtgaggaagtcacataggaagttggcatatggacccaaatctaagaaaagaagtctggactggtaaagtctattacagaattgttaacacatagatgatatctgaggtcataggaatgggttatagatgccttgggaggatctttggaattagaagaaaataaggcctagaacttagccctgaaaaactttagcattkagagattagatagaggaggaaggattccccatgaaggctgagtcagaatggccagggagatggtgggaagaccagaaagagtgatgctaaccagacagggaagaacatgtaagaaagaaaaagtcatctcttttccttaccccaatttgcaaggttcatggctgacttccccataacraaagacattgacaaaagaaaagcataacaaacttatttaaccaaaattttttgtgaaacaagaaccttcagagatgaagatccaaaggcccagggaaaactatatttttctggacaatcatgcagaagtatggtcataagctggcagggggggactttgcagggcctgtttgtccagtcttctcgacttccaggcatagggtaggacccctccagaatgaggttcttaacagcctccttttaggggaggtaggtcaaataattatttatgaccatgtttcagggaagaaaggtgagaggagatcagagagtgacctccaaggtgccatattttggataactgtgttctgagccatacaaaatgtgaggcatgtgaatgattttcatccttcatgccacagcttattgtcaccctcttctttgaagagtccccagacttaccaagataaactggcacctccccagtgttgtttctcagactctgttcctctcctttaaagtgcttatatagttactatttgcataatagtgtgtataattactatttgtaattatgatttttcatgtaatattctctcccactagaatggaagctacatgaggagaaagaatgtcattatattcaccactgtgttgtcagtgcctagcaagtattcactraaaaggggaaaaaaamcccactaatatctatttaaaaactgaatggttgattaaatacattaatcatcctcagaagtatctgccttcatgtcagcagtaactaagaatttgaatttttcccttaccccaaattattccttttgaaaactccaagatacaatgattaaaattatagttgattagttgataagctctattgcctaggtcctaacacaaggcttgtgttaggacaataattgatgaatagtgattctaattggttcttctgttgatgtaaaaggataactctagtttaaaagaaattacttagtaaatatactgctgttcatggaaaaaactaattccccaatttgtacctacaaagccctgacatccacaatgctgatttcctgattgactggtagtttttgcatttttaatttcctgtgttagtaaataggactgcttcaggaacaaagcacagctgatgctctcaaagttgtactatcactaatcctctttgaatcacaggaataaaaagaatcacaggaataaaaagaaaatcagggattttaaaaaaaacctgtgattataaataggttgacttcagaggtaaatgcgggatttgcgtggctgttttggatcaaagacagttttgatgctttgatctaaaataaaaggcaatatattctaagaatcagttgcatagatggagaaaaatgtcagtatcagatttttgatttttagtgtttatgagacagattttttagtttaaaaaaaactcaacaggtatgagaacatgaaacatgctaatcagatggccttttaagtataaatgattcctctttagtattcctttagcataaatccctatagaagtggaagagcaatagttagctttcataatgctttttaaattcaggtttcctaatctttcttcaaaagcatttacattctcatgagcagagtagagtatatatgtgcatatgtgtgtacatgcatacrtctgtgttctaacctttgacatcacaggcatagttttgtcaatttgataggcaagacatttgtacacttaatgacatagatgcaaacattttccttctaattttatctattgacattttatacctccttctcagggatctttggctcagtgtattgacacacaattgtaaattgcctaggttttaaatgtgagggcttggagataagcttgcaatgcttttcctttcctttcatcttcattctagaggaggcttggaatatagaccctcccccgcaccccccccacttttatttttggagaaggagtagcagaaaaaagagtgggatagtcattcaacacatagttattgaggatgtgytgagccacatagtacaacgtaaaggaaaaaaaaaggagactaatgtcatttcccagtgtggtcaccaggaaaagacagaatttttgctggaaaatatacctgagaagcaggttacttagccccattttcgtttctgttctgaatgattgatattacaaatgacaattattacatgccagttaaaaagtgtgcaagtaaagagaaaaaggaaagaaagtacatttttcttttaaatcagagaaactagaacaaactgaatctgcttttgtggggatttcttttctagctcttgcttttcttcatagagctcctatggaaatgccattagatggtttgaaaatactgaacaatctgatcaaagaaattttctctcctgccagggaacactcacactttttctgtacaggtacattataaatttctttagaatgacagcctaccagctaatgtagcagaaaaaggggaaggtaggtgtttaaaactgattagaaaagagaagcatttgacttgtaggagagagatcaatctcttgtgcttcgtgctgccaaaatcattctctgtgtctgggctgttcttgcttgagctcagaaaattcttcccagaccttttggcaaagttgagaaatcaaacagagagaattcattcaattcctgattgataaatactcttaattcttgtatttttaaaattataataagcaacgggtaattttctttccacaaagctttgtaggtgcatcacgttaaaaaacgatttcatcagtaatcacaaacacctctgtcatttctgctttctttctctataaggtaaagggataataatgttagagcctcatgtgttcagaatccattatctatttctccaccaaacaaaccaataacatttttaggatttgttggtattaccattgccattcattttaacaagggaatttgcattttgctttagatccatgccccatacagctcagtatattgcttctattgctgactgtggccccaagagatttgttatgtaattgtgattgtactatctgatctcaatcatcagttaccacctagtcataaatgtgtactggtcctaatgcagggcttgaactgggcacaggtcttagaatcatctgtgtagtacactgggagctacttgaggacagaatgggtctcactcaccactatcgctctactactgagtataaaacccaagcctcagttaattctcaattaaaaaatgtttcctgaagtgactaaatctgtatctatttccaataccaccaaatggcaatgtgttttaaattttttacccacaatgtgaagtagtatgtcctttatcatgcatcctgatctttcaagtctcaaagcatgacccttcttgctttggaaaatacataggaaattttttgaaggggtatggaaattgtttgtcttatccatatggcttgatgtagccattaccttctctcatcccatcccacgttggcactttaaaaatcttgactctgggttgtgccagcatttggccttttatctacatgcctcagagaccaataataaatcagtgactcatggtttcctttttcagaaaaccatattgtctttcccctaggaagttatttttgttttagtatctaatgatgctgtcttttattggagactggacaagtagaagagatacttgcttttctaaggctccctgggtcctctcttgaccccttctaatgaacagaatgacattcacaatctgccagtttgctggaaatggctgtttataatgttggatccagcatcttggccaacggtctcccaatttcatccttgagttccttcaaaactcttgggtggctgccacctggtcttactgattaaactacatttattttgtcagtttggcttagatgagttggggttttgcctattattggattttatattttctgcctatttgtgcagaaccctgagggtgtagatatctctctaatgcccttcccaggtaaagaattcactcatcttggcagccagcctgtttcagtatggaacgccaacctttgcttctctgccagtcatcacagaggacttcagatttgctaaaaaataaccagaaagaaaaatatgaaattctgcctttgtgtccttttgtcatctttaatttgataaagaccagcagttgaaaaatatcccagagagaggattctatttacacactaaatgttttccatctcagcttgaaacaaaactgattagggtcccacaacacaaagattacataaattaaaatctaagaaaggaagagacataagattaarggaataaaacaagcctggaatgaacgtaaaagaaaaatttatgccataataagcatgctgtgcctgcttcaggtaggctagaatttggttttactattttttaatggattccaagtatctgccttttttgccttttattttattattaactcacggcaacaaggccttctatttttaagttctgggatacatgtgctaagcatgcagatttgttatataggtatacatgtgcygtggtgctttgctgcacctatcaacccatcatctaggttttaaaccttgcatgtgttaggtatttgttgtaatgctctccctccccttgttccccacctgaggacaggccctggtgtgtgatattccccsctccctgtgtccatgggttctcattgtttatctcccacttattagtgagaacctgcagcgtttggttttctgttcctgtgcaagttaaggccttctcttttatcgctactctgatatgatagttgaggcccttttgagttcttggaataaatcattctatttgtttttctttgcagaattttagttgtcatattggtttccaaggaagatatcttaaaacatacctgataattctaattaggctttctagctttgttgcttcatgggcaaaagattacagggagtcaattttttgctgaatgtgttgttccatagtgattcaaagtgttaatccaagtccatgtgaataagtgttctaattttgtaagtagctcagaagttgaaaatagattttatataaacttttagtaattgtatttaaaccctaatttgttcagaaattgttggtggcatataataaataatgatttgggcagaaaaataaaaactctaaaatagcaagcttattttttaagtagggatcccaatgcccacagaaaaaatatcagaaaataaaagtggtaccctggtcttgaatctcctgcttccaagatgtgaaactgcatataattcacaagtacacactcatgtgcatgtacccttgcacagcaaacatacctttaggtcattatgatgctgattgaaaatcataatttagagggttttgttaattgcaaaaggaactcaatgtcctccctggtagttcattctctggtaggctagttgggaatttgaaagttgtttgctttactttaaaattaaaattatgaagtataagatagatagatataaaaacatgcataaaataaatgaacagcttgatttattataatgtgaacaggtcattctcacacagattaaaataaagaacataaccagaaacccagagatcttcacgtgtttctttctgatactttcttgcttgcttttattagttttgctctgtagttataccaaataatataatttactttagtttttgaattttatacaaatagaatcatatagtatgtattttcttgtgcttggatttttgttgttgctcaagcttatgtctttaagatttatccattttgtggcacaatctgatgattattttcattcttttatactattctatgtgaatatatcacaatttccttattcattctattgttgacgggcatttatttcaaggcttttataaaaatttgctatgagtatttttgtgcacatatctttacttcttatctctaaggttccatccggaataattttccttcctcttgaagacyacatttaggaattttcttgtgggtcaaatggtagcatattgttatattttgcttctttaaaaatgtttttcatttttgctggtgttaagattgtcagtaattttctttcaatactttggtgatatttttctttttctaattaattttttttctctttttgccttttgttgttgtgttaaaatatctgctatttaactgtcattcctttaatgataaaatgactttttttcctctggcttcttttaaaattttcaagctttaaaaatatttctactatttaacaaggatgttccaaatatgaattttatttagtttttcttgcatgagctttactgggtttcttgaatctgtagattgatacgttttgtaattattatccctgctttcatttctctctccttttctggcatgtcaattaaatacatattaagacttcttcctttcttttcttcttactctctattttgtatgttccttaattttgtttttccatgtttcattgtgtacagtttcttctgacctatcttgaaattctttctcttcagctgtatctaatctgctgcgaaagccatctcaagttattttgtctttctagctttataatttctaatggattctttttacctacatactgtcatctctaggttattggcgtttttaagattagcttttatatacttgaacactgtaagcatagatttaccatctcttctgttaacttcaatatctagtttccctttggtgttattactatttcttgtgtccatgattcctggctctcctattgtctagagaggtaccttataatctttggtggtttacttaatattttatttgaaaatttacccttaggaataatttgagacctgaattgatctttcttataaaaatggaatctctattttcatttttatgtgtatctgagggaattagcagttcaggaccaatgcttgacatttttctggatcttcagggtatagcctgtacctccacttcatggtggagacctttgggtcccaaacaagaaaagggatttctttcttggccttaataacaatgaatacttttgaattttgtttcctgaagtctttaggatatctgctagtgagaagtgataatactccaggtctccacacttggtggacacaggacctcaatctttgttccctcccttctcaccattctggttcttgtcttggctgtcctccctgagtctgaaagtgtcctggagtaggaacgtctctagcttacctccctgagttccctttccctcattgtacctcccagtagtttatatccctgtcttgtggaggtctgctaggcttttcattagatgcagtttttatattttgttccaggattcttggctgtattcagtgggaaggtctttaattcatctattcctttattagaattgatatgtgccacgttctgaatttttaataattagcagctgttcaatactgccactggaaataagcatttgtttattcagcctttcattcaacctgaaaatatgtagagactactgcgtattcagtgaataagacatgctccctaccctaagtcaaaggttagtaacattttaagcaaacatatrctattatttagttatgtaatkattaaaaagcaggagttggagaatgtaaataaaatgagaacactgctgaaaaggctggtcaagaaacttgtagcagaggtgacatatcagttaactggtattttctttccatattttaaaagtattatatgatcacactgtcagagtcaagcataattaagaatgcgaaaattagttgtaaaacaccagccaatattaaatcatttaaaattttcttgagatgcatattaatatatatctaggctgataagtatagattaatatattttgcttatataaccagcatcttgctttctttatccacttctaccccttcttatgatctaaaaaacagaggctccttgggtttaaagaagcttgagaatatttctttaatcacggccatcattaccacgaaagcagctaattcagcaccttcagcccagctcagcagtttgcattacatgaaagtccatatatgtttttagaagctttcctcctataacaaaatttgcaacacctcctccctcatctcagtccccatccagacacctcttacaacagtggttactgaggtgatcagtgactgccagaaacatgggaagctaaacctgtcttcttcaattaggagatattggtatttggaaatatcatccagccatctattcttgttgtggaattttgtcatctttttgtgacacatgttaactattcatctatagagaaagtttccaagtgataccagacttccatatgagcaaattatcccattaggtgtaccaartgaaaccyaatattgtacaaaacctgcatatcaactacaggaaatgtggaatagtctaaagtgaaaataatttgtaawaaaacatagcattagtgtataaactggaggagaaaagtagaggaattttaattaagggtcagaagactggataaggcaagaagataacttgatattccatttctgaaataatcccattcattgaatcaaacagctgttgattgttttgccaagtccaccttgctgtaatcattatagcttcagaatatatttcatctagtagggtaagtctatattcactcttttaaaaaatgacttattatcatctatttattcttccagttttcaaaaacttaagtttaaaaaacttccactggggattttttctaaggtttatattaaacctgtgaattaatttgagaagacttaacatctttgtgtgattttagccttccaacctagtaatatttattcagatcttatttcacacaaagattctttttaacttcttatgataaatttcaaatatgtacaaaagtagagatgaacttccacgaacccatcacatggttttagtagrgatcarttcatgaccagtttcatatctactgcttcctcctctgccgtgtgtataaaaaaagagaaaaaaaagacacacattatatcagtttacttgtaagtatttcagtttcaatggcttttctttttttctttattattattatactttaagttttagggtacatgtgcacaacgtgcaggttagttacatatgtatacatgtgccatgctggtgtgctgcacccattaactcgtcatttagcattaggtatatctcctaatgctatccctcctctctccccgcctccccacacccagcagtccccagagtgtgatgttccccttcctgtgtccatgtgttctcattgttcaattcccacctatgagtgrgaacatgtggtgtttggttttttgtctttacgataagtttactgagaatgatgatttccaattttcatccatgtccctacaaaggacatgaactcatcattttttatggctgcatagtattccatggtgtatatgtgccacattttcttaatccagtctatcattgttggacatttgggttggttccaagtctttgctattgtgaatagtgccacaataaacatacatgtgcatgtgtctttatagcagcatgatttatagtcctttgggtatatacccagtaatgggatggctgggtcaaatggtatttctagttctagatccctgaggaatcgccacactgacttccacaatggttgaactagtttacagtcccaccaacagtgtaaaagtgttcctatttcttcacatcctctctagcacctgttgtttccaatttacaagaaaaaaacaaccccatcaatggcttttctaatagaggatcctgcatgttttgctagggttatttatacattttatattttattttttaaaccttctaactgctaaggctgatgtaagaaaaacttttgaaatatttacttatatttaactacttcaccagattgctaattggttctgagagattttaagttattctcttgcatttccaagaatatgattttatcagtataaattgtcattttttcattctaatatctagcttcatattggttacaattataatagactgatagaattttcaaaaatatgttcggtaaacagaagacattcttgtctttgtgattttattgaagttgccctaagttatayattctttataaatcttgagaaattatctagtattgagttttaccacatacctttctattatcaaataaggtaattctatcaatttactccttaaactaaatttatgttaacagattttctgtattactgattaayctcattttactgcagtaaactattttaaatatattagtggatgatttttgcctccatgtacataatatagatctattctttgtgtttttatcttggttggatagtattttgagtgcagttttaaaacktctttaaaaaaataatttcaataacaggcatcagtttttagaaatgttcaggaaatttaattataaaactcttgctcagaaattttggggtagataattctgtgttcagtttttacattttcattgaactattaattttctgctctagttgagtccattacaatattttctcaaatatattttgctaagattttcaaagatcttagcataatatatgccatgtccttatttttatctcatttttatcttgtattcctgcctgaaatcttaatttttaattaaaattttttccaattacttttctttccatgaggaatcactttttgcatttatttttcatgtccttattaaatttatgtaattaatatycattttctcctgatttatgtttttgttctgtaagaatgctattttacatttgagggcagttttggctcagctccttaagttccattttggagtgtgctcatctaaattactttccaattaatctgtaataaccatgttagtttactctgagcaaaggctgagtttactctgagcaaaggctgatttatraaagtgattttaacctcccaagtgcttaagatgtgttatgaaattctggttctttttattgtactcaatgatcagaatgaaaccagagataaagagtgacaaatttttaccttttacacttcatagttattcttggaaggacatcttatacaaaaaaccattttyagttcacaccctctttcccaagtagataaacaggcctcagagttggggagggaagaggactctctgaagagaaagcaattcttaagtataagtgtaaacccggggcaccaagaaagaatagaacctccctgtaaatgaaatgataataggttctttcctctcagctcgaattctaggtgaaactcaatgtgggaagcctccccctcaatctcccacgtcaatatgttcaagcagaaactagagatggccttttatctaggcataagagtgcctgggatagccccctgtgttcctgcaggcttcagaatggctggtatggaggatcatccaaaactgactgaacatgaacaagacacaatgaagcctggaaataggggcatgaagcaagaagcaggcctcaagtgatctgacattcagaggccatagcagatattcaggtataagcagcaaggtgggaagaccatcttgggatgagctaagggtggagctcaacacacaactgcagtgaccaaattggacaaggaaatttcacacctcagtgtagggttgccagattcagtaaataaaaacacaggaggctcagttaaatttgattttcattaaacaatattttagtgtaagtatatctcaaatgttacataggacatacttatattaatggcttttataaatttataatgtgcttgaaattcaaatttaatgaggtattttgtattttaactggcaactcttctcagcagcatttgagaaattcacaataacatgaaatagagaacaaggggaggcagaaattattctcaggaaaaaaaaatcttaatcaaccatgttttatttctgaatggtctgactagtcaatttgagtttttctgaaagtgaccagactaaatattatgcattagaagtaatggtggctccaaatcagaaatgttttaaagaaaaataaagttccctttttgtacatccaaagtgatataattttaaaacttctaacaattatatttgcttttaagttctcacgacaggtaaaatatggcacctccacagtataatgtttacatctctgcccaagagaccagcaaagctaaattagaatctctcagtgttaattccacatttctagtcttcttagcctctggtccaattggtagggcagcgggatggagcaagggttcattatgcccatgtctatggatgagaggggaagtaaggggtcattgtgaactgggcaaggaggctaaattgtgtctacaatgaatatcttccatgtcttgctgtggcaatttactagcagattgccgaattttaaatgtagtccagaaactaaaaaaacaagaattgtatcttccgtatctccagttccatagcagttatcacagaaagaagttcaccacttctcttttgtaaggctactgtctgtcttcccagtacatttcattatgcccttgtcaaagtagcacatatgactattatatgtccttttgatcttaccttgaaatagtattcttctgttttattatcagtcttagacagcaccatagtgcagattataccctcgacatccagttctagaaatactggtgcattcatttatagcactgtcagaatctttgtgccatttcaatattcaacttgccagagaggtagtgaaatgcaatgaaatacatagctgttttcagagctagtgtgaaccagaaatttatatgtaataaggaaaagattgttttctgcctgtgaggtagcaacatcaagcattagaggattagccactgtaatagatttcatttcccaattttgaaagatatagggcccctgcacttaaaaagttcaattgaaatctraaaggaaaatctctagggaagtagagttcttcaaatgtcttctttgtttaaaaagcttgtgaytgaggaaatgacttacccatgattggtggcaaggttaatttcacagagctggaatcttaagtatattctagaatctgatattggatttacaatataacaataaaattagtatgaactcatggagtttaacactccctgtatrgggatttatttttctcaatgcctctacagctttagacaattttgagaaaggttgtcacttacattcaggacatttatcataattatttagaaccaaaaacagacacgcatgccaggctacacgagactatagagaagacatattgtctctcatcattgtaatgggttcatggattttgtaaggcaggggagaaagaaaatgtctacggttcattttaggtcactggggtatgggcactgtatgtcagcccatgctgactttttagaggrtatgctgagcagtgataggcttggggactatataagtgattggatatgggacaggaataggtactcttcaccctaagatgctatacaatacagttatcccctgatttctgacaaacactgaactgtcagaaattagtatgtgggccaggtgtggtagctcatgcctataatcccagcactttgggaggctgaggcaggtggattacctgaggtcaggagttcaagaccagtctggccaacgtggtgaaatcctgtctctaccaaaaacacaaaaagtagccagggatggtggcatgcgcctgtagtcccagctactcgggaggctgcagcaggagaattgcttgaaactgggaggcggaggttgcagtgagccaagatagcgccaatgcactccagcctggtgacagagcaagactgtctcaaaaaaaaaaaaaaaaaaaaaaaaaaaaaaaaaaaagaaaccaacttaaaattctctggtcttggggaaaccaaagtcagatctggacaatgacatgtgccaggtgtctggggctagggaacgatgtgctgggagatgaggcttggaagcaatttcagatcacatatggagggattttaacatcacattaagaatgcatttattttcctacagccaagttgttccttctgtgtggaaaaccagaaactcttctttgcccacttgagtcctaagtcctactgtttctctcatgaaacagttgaggctcaagcctcaactcttccagggggcctttctgcttttccaggatgcattaggggtctcctctctagccaagcatttgttcagtacatatcgcaaattcctctaatggtggagccattagcctctcatctatactgaaatagaggctcccttacctgttctcatgtccagtgcaggcctggcaagttcaataaacagataaaacaagtggataaatatagtaacccattaaatccacatatcaaatcccatgaggtagggactattcccccttcccactgtacagacgaggaacctgaatacagaaagcataaataacatgctcacggccatgaagctcataaaggatggaactgggattcagtcagtcatgcttagtccgcaatccatgcttttaaccacacagcttatgtgtgcctaaaacaagatggcaggtaatggatcaaccctgtttcccacctaaaactgaattgtaaagccgtaacagtgtacagaaatagaaaacattgatttagaaagataaaaccygattgtttaatcccctttggaacctatacaaaatgaagtagtaatgctgatgattttgctaattctaactcatttccacagccagtcgggttaaactgacctataaatctccacctaactcaattcggtccccagactcttgcctataggtttttctcattacactttccctctttcagccaaggttgtacagaaattctgtagatatagtcactctcccccaggatttgcagtcatggttgttctaaatacatctggttctcttgttcccttcgggacacttgcaatctgtcagacaacggttttcttgtttggtttggaaaccataattctcatacctggagacctagaattgtgccagagaatcgtaaatgtcatcacatagccctcctcctaaccgaccagagagaactgtctactttccctccctgccttcctttttgttcctttactagtaacttccacttgctgtttgcagtaaaacagaaaatgaacmcaaatttaaccagttttatcacagagtaaattttttttcttcttggggcatcgggggaacaatgaaaattagaaattataagccagtatgggtcttgattttcaaatgccattctctatgggaattgtgtaaaatgtttctcaaatccagaaaggcaaataaaccatggccattttatctcccagtttaagtatctcttttagtggctaagtatttactgtgtaaaagggattaaaaatttgccttaatgaaaaaaatttttttttttttttaaatgagacagagtctggctctgtcacccaggctggagtgcagtggcacaatctcggctcattgaaatctccgcctcccaggttcaagtgattctcctgcctcagtcttccaagtagctgggattacaggtgcccaccaccatgcccagctaatttttatatttttagtagaggcaggatttcactatcttggccaggctgatcttgaactcttattcttttttttaatcaagaataatgtctctggttttgcagccttcatataaatgtttaactttttctgcctctacaaatttggaaatgactatcttatggaatgtctcttcactggaatgtcttaaagcatggggtctaaaaattatggcccttgggttaaacctggcctgtcacctgttcttataaagttttaktagaacacaggcatgctcatttaaatatcctctatggcagctttcatgctacaaccatagagttcagtggttgtgatagagatcatatggcttgcaaacctgaaagtatttactacctggccctatacagataagattctatctatcctatataggatatataaggtgtactcacttgctcatccttgttttagaacatccagagatgtgggtttgctttaccagtctttaaggctatagtttgaactgggaaattctgggattaactatgatttctcagtgggtaaatgaacctatggaccttgaaacccagcaagatttgtgttcaaattattcctctgcttgggactgccttgtgtgactttgacaagtcatttaacctttctgaaccttgatgcttttatctgtataatgaagacaccttctgttttgaaaaactaatataacattaaatgagataatgttcaaacgtgtgcagtgcattgttaatcaagtagtaagcacacgataaatgtaatttcctttttccttgttatgtctatgttgaggagtaacccacatgctaatgcacaggctctttctgcctgaacaaatagccattagtatagtggaaacgttttttgtcatttcagcgcatttctgcattttatcataagtccttgaaaaaatgctattgtccactacatctttygttctatccaaagattctgccaagtacttcttaaatgtttaactgctatttaaggatagttttaaataggactgctcatgatkatagtaatgtcagtaatatcccacaaatcttcaatgggatttatacaaagacgaccagggaactcgtgtttcagaacttgcattcctgcatagcattttcctgtctgtgaaatcaatctcctacctatactccaggcctcagaggccagacctctcaagaatgctcaaactccaagaaatgtaggccacaggccttactgctacaggtaaaattgaaatgtaaaattctatttgagaaggaaccatgcctttgttgacagcatcacaataagctggggacatagattgattttgttaagtattgtgctcttggtgaagatttgctcttccagcctcattccaaagcagaacactcactctgtgtctgttttgtccagtttgaaagagaacatttctatatgtctbcctattttggagagatgcaattaatccatctagactgaagaaatatgtcctgtgttaataaatatattttttccaggcatttacttaatcatgccacaaataatccaaatatctccaggaggtgggctgcagtgcaatattattatcctcaatttgcagatgaatgaaaatgttatatgatgaagcaaggtgatgtagttgacagttacatagcaaatacctgaagttcagaaggagcaaatgactactgaatgcctttgctatactatgcatcagttcccagatatgccaaaaatttgtcaaattctgtaatctcttctgtttcccttctcatgtgccttctcatggagtgtgtgtgcagtcactccaggcttcctcactgcattttctcttggctttgaacctcatttcttctgttccacattctcccctttttatttccccttccttctcttcttccccgatctaccctacctccctcacttctatctctcttctctccttcctcctgtcctcctcccaatcctaccatattgtaggctacctaaaatccctttctcaacaaagtagggcctcaaatggatcccagaaactcagagttagcaataatatgagaagaggaaggatcacagttcttcctatcagagccaagtgagcaaagttcccctatctgttgatactagcttctgaacacaagtttttcttcttccatatcacagtaacatagtgatacagtttgcctctatccccacccaaatctcattttgaattgtagctcccacaattcctttgtgttgtgggaggacccagtgggaagtagttgaatcatgggggcaggtctttcccatgctattcttataatagggagtaggtcttacaagatctgatggttttagaaaggggagtttccctgcacaagttctcttgtctgttgccatgagcaatgtgcctttcaccttccaccatgattatgagggcttcccagccacgtggaactgtgagtccattaaacttcttttgtaaattgcccagtctctggtatatctatgagcagcatgaaaacagactaatatacatagcaaagcaaaaggttgaataggttagggttcttggttttgtttgtacataacccatagacttaagttttatagtttggagcttctttttttccttccactgattaagacttcagcatggaccacatgtaacccacattctctttgggttgcacggaataaagccattcttcacttgtattcacacaaataaaactcttataatgggtactagtagcaaaaaagtaagtcagataatcaccctggtttatgttatcagaaaaactcaacacttcagacttctgtagtcccaacatgaatgtaatgttgacttaaacttctagatcaggatttttcaatgtgagatcaagacccatcagaacagtggtttccaatcctggctgcaccttagcatcactgggaaacattttaaacaataacactgcccttacttcacactgaaaattctggttttttggccttgagtaggaaccctgcaatgttattttggggggaaaaaaaaccatatgattctaatgttatccagggttaacaatcactgtascaattgttcttgagttacacagtcaattgtaagtcatgccagctttttatttttttcctttaaattaacagaacagaatagactgaaatagaaaaaatcagtatgcactccatgtggtaataatgtgtactattccatgaaatttttctttcagtttcatgtgtggtagggcggatactgtgtcactatttaaaaataatttcttactgtgaattctagtcagagtttgaaaaacactgttttagattatctttaatagagaaggtgtgtggattgttgcctagggaaaatcgaaaaatctccatctgtcctaagagagaagaccgattgtactatttttaaatgcttgtagggcatgcagaggtattgccaagtgatctctgcactatcaaatgtttcttaactatttatagaggcacttacacattctctaagaaactgagtccaactttcctctcttgtaggcagcgttatggtttaaaattattaagttgcatttctaaaaatatcttagttcagtctcctcattttctaagcagctcattctaacccttagttaggggtatttaaggaagatttacactctgggagaaaatatctcagatcttgtactaaagtatgctagcagttctctgaaaatccctaacgggtctgcagccctgaaacttaaagctttctagaatcttccaagagggtttctggaaggggaaggggagtcttgatctcaacactaagtgttcagaatatttcagaagtcagtggttttttacagatgataaactgatccagtgcctgtgagctcttagcagttcatagctggtaatgcgtaaaccactatcaagaaggctggtgtgtttccagccccacccttgtagcaggagggggagggacttccttccccctccccctctcattttgcgtggaaggctgctatttcctttgcgcattttgctgtgagactactgtgggtgactgggagagagagtagctaggatgacaagcgagaagaaaggcgagccagaggagggtgcggccaagagaggactgggggctcatgggagggacctggggagtattgcccactgcacaaacatgccctttcctgcccttctgccttgagctggacacagggctgtaggatctctttgataacttattacgtaaagcaatatacacagtgggaaagtgaggattttgaaccaccacaaaaacgtcaaatgtattaaggaaagaagcaactgacctcagctttgtaaagcaacttaagaatttttaagagcatatcaaccaaagggccaaaggtggaagacaaacacagatctctctctctatatatatatctctatatctacctatgtatctgtctgtctatatatatcatgtaacttttctttcatagtctcatgaattgaaatgctgatgttttctcaaagaacacattttcacagatagctgtgaagttaaaagcattatatcaattaactgaagcgagaggaaatcacatttcgtgggaaacctagcacacagcacccagaaactttctggaaacggcttgaaccaggcagaccatcaagccagtttgtgaaagggctgatagcacacagtttttgagaaactggagatcaaaataaactcgaggaaaggagatgtcaaaatggcaagacaacaagctcaaacatgtcactatatggcagaagagaacagggcagactgttcaccagaacagaaattcaatcacaagcacctcatgtatcagcaaacttcattacatagcttataaacttcagaatatttgagaaaatattagagcaagattgttgtctccttatagcctcatgctccttaaattgaaataagacaaaaaatatgtatatatccccacagaatatgcatagagacccttcttgcagtatgaatgttatgcaatgattttttggaggaaaaggtgtgtttaaaaatttcactttttgttaatatatacttgtaataaatccaagtaatataaaaatatgaacttaaatgaaagttctctacaatcccacctctaaactattaaaacaagtatcagcaaacttctgtacaaaacatcttccagaaagtacaagagatcatgggaaggaagtgagaattggagaacaaattgaggatttgagtggagattgatctataggtgataccagtgattggaaaatgcttgactggaatgggaaagatagctgagtcaatatcaaaaaatgattcagaactggtaatagaagcaagcgtttatatcatgatttgaacctcctacattgaaacatccaatggagcacaatgtgtctgcctcttgaattagcctctcaaattgcagatgaaaaggcaaataggaattcagatttgatggtaaattcaaaaaataattgtgaccctttataaaaaataagttctctctccaagctgtatgcaaaccggatgattttaaatattttctactctgacaaagaatgaaaaatctacagcagaaagaaaatgaactaactaaataaatccaagtaaagaaatgaattaaagacatgccataggaaaaaatgcaagatgtttatttgaagatgtcagaaatgaaagaatacctgctttggattataggtgaacataaatacagcaaaatgcagaaatattgtgagtagacactcaggaaatgagtcctggctggttaaagttgaaggcaaattcccaattataagtgaatagctcttacagtagagttgagtatatgaagcacactctccaccaccgtttagtcactgtgcatgagactgggaaaacagaggttacacagaagaacagacacaggagagtgaggtgaacataagtgcaaagatggtgagttttcgaattattttgatgacctgctctcattcttatcataggacttgtaacatgttgtatacatttgaaagccagaaagagggaatatttataacagtgagggaagaaaaaagagaaagataaaagtagtgggtggacttgcatttagagaaatgaagagagggttatttttcccacttgctaacttcatacatcagcattttagacaaaaaaggcaaaagattcataaaagtagtgggctaatgtaagaatctgtatgttagatgacatccaaatagtctgctggtttccacaagctcaaaatgcacccatttacacagacgctttgtattgacctatactttagcacttgaaatctcacatttgaatgatatcctcattttttttttttttgagatagagtcctgctctgtcgcccaggccagcgtgcagtaacgctgtctcagctcactgcaacctctgcctcccaggttcaagcgattctcctgcctcagcctcccaagtagctaggattacaggcatgcaaccaccatgcccagttaatttttgtatttttagtagagatggggtttcaaccatgttggtcaggctggtctccaactcctgacctcaagtgatctgcccacctcggcctcccaaagtgctgggattacaggcgtaggccactgggcccggccggttcatcctttgcttctctcttcctttttccacctctctgccctgccattccctcgctctttccctcccctcctcctttttcttccttctcagactattcatggcccaacctaatacactgaccttttacatgggtcagtctgatttgcttccttttgggaaaaacacttttatttcccccccgaaggggtctctctctgttgcccaggctggagtgcagtggcacaatctcggctcactgcaatctccacctcccgggttcaaacgattcttctgcctcagcctcccgagtagctgggactacagtcatgtgccaccatacctgcctgatttttgtatttttagtagagatggtgtttcgccatgttggccaggctgctctcaaactcctgacctccagtgatctgcccgactcagcctcccaaagtgctgggattacaggcatgagccactactgcacccggccgcacattcactattgtcctctgcttactctcttccatcccccrcaccaactacacaggagttaaccatttttccctctttgcttaaggaaactggagaaaactcaagttacacctggccatttgatggctccttagctctcaagtccacctagcatccctaccctgggtcattcttaytttatgtgatacctttagagtgttccatttaaactacactgagacttgtaaagacccacagcatctaccaargacatcaagtatgggagcttaattaagtcaggatccattccatttgaaggatgtagagcattgataacttcctattgctttaagatttcttgtaatattttcgtcaactcagcctacttctataactgtataactggcaaatacattccattaaaaaggaaggtgggtgagggttgtaatatgttcatttcataaacagtggggaagtctagagctgatgttctgttctgtagcttgcctggggaaataaagtaaaccaaaggaagaacaggcagtgacagctgggaggggtcaggggatactggaatgttcgagaagaggaagagtggtgggtaagatttttggcttaagactaaagagtattcccagttaacaytagttcctttgattttcataatacttatgtatgatgggtagaacaagtaacagcattttcattaggccaatgagaaaaatgaagcccaagatgttaagtgacaggctttgagctctgacaccaagtaactaaatcaaaagcagaattcacatctgctgattctcactttattctgccagattagtaatgaagttttaagttgtaatatctgtaggagccttggaagattccatcactaatcattcttrttgtggcatttaagatgcgtggtgacttggctactctagatttctagcctgaactctccagctatggcccacctccttaattagctccagttgtactcaattagttctgttytctcatctgtccagctgtccctcacttttcagctctcagcttcttctgaaaagccatctctcacacctctaaggtggtgaatatgaccctcgtttgtgctctgttgtgccttgttcttcctcctattctagcactggacagtagtggcttgttttttctgctcctattcccatctgaaatgccttaaggatggtgacttttttatttaccattacatctccagtgcttagcacagctttcagcctatattaaggtacccaaatatttgatcaataaagaaagccaatatcagatggcataatcattttaaaagttcacttttatattttagattacagccaagtcttttatttgcaacctaaatttgattttgcacattacgccaacaaatattaacccagacacttagcaccttcatgggcttgtataccgaggctcctggcatgatagtgcttgttatataataggtcctcaatacataatttttagatgaattattaaaagatgattaatattcctattttctaagtcatttagaccattttttttgcatgtaaatatggtgacataggacagaatataggaagggccatacgggaagagcttttggtagcttttctttgatgagctgaaaaacatcattgcaaggaggaaatacaaaggtttgttgttgtggacagcaaggatcctcccacccaggccacagacctgtaccggttcatggcctgttaggaaccgggccacacagcaggaggtgagtggtaggtgagcaagcattaccacctgagctcctcctcccgcaagatcagtcttggcattagattctcataggagtgcaaactattgtgaaccgtgcgtaagagggatctaggtcacgtgattcttatgagactctaatgcctgatttgaggtagaactgtttcttcctgaaaccatctcccccacaccacaccccacatytgtggaaaaactgtctcccatgagcactggtccctggtgcccaaaaaaaaaaaaaaaaaaaaaaaaggctggggactgctggtgcacagaatcctgacttagtagacccatgggatcactgaccaaaaagagaccgcagattctgatctggcctatagaaatcaaagatggcttggctaatcttggtcaggagaatatacaacctacggattcattctttcacataatgagtgaatattttccataatgttaccagattcacaagtattcataaagatctcaaaatgctttaaaaacaggatattactggtgctaagaccagaggtcatgtttataggaaaaaataagagtttgaaacaggatcttagttattttgacctctagctcagtgttctctcttctgccattttccttttcaccagcctctccaaatggagcaccctctttcacacgtatttaagtgcccactgttgatgcaataaagtataataggttagcgttcaggccctgaatctaagcatttttggtttgaaacctagccctatcatgtagtagctacatgaacttaggtaattaacttgctgtgttgcaaaatgtacaatggagttgacaaaaatagaatttatctcactgggttgtgaaatttaagtgagttattacatatgaagtgtctggaaaatagtaagagctcaataaatgttagctctggtcattattatgtgcgctaggttaggtgttgtgattgcaaagagggaaagtaaaagttgtggtttctgtgcttgtcattggcttctctttactgtataatccaatccattctttatttcctctgctttgcgctgcaaaaggtccagactcctaaaagccatattctccaggctcttttgccaattggcttcctgctaggtttggtcacaaaaaggttcatataagatagtgaggttaggaggccaagagtctctctctacatgggtaatgttaaagaaaaccagaaccagacagtaaagtagtaaaaacagactttgttcaggaactactgcaatgaggaagatagacctcagtataaccggattcacttctgaatatagcatggacaagtagggattcatagccaaggggcaggttgggagtcagtgggtggaaaatgactaagaaaacattagaaataaaaggatacaggttagacatctaacaagattcttgctgaaggcaggctagaatagtcagataagtaagaaggatgaagaatttggtcagataaagggagatatcggggtgggggattctttccaaactgactagcaagattcttgctacaatagggtgatgcatttacagaaagataaatgtcaaggtggagacctagaggacgcagactaagtaactaaatgttagtcaaaaacagaatctttgttagtagcaccaccagcagaagttgtctctttgtcatttcctgtcttcaaacagagcctcctctccatgctcacagattctacctggaagctttggttttcaggcttcctaccagctttccatatgtagggagtgaggccaatataggctacaatagaacaagatgaaaggacatattcctgatgatggatattacttagtaccggattcaactgtgcctgaagattatatatgactagatttttaaatatacaaaagcctataaaaatactccctccttttgcttaaacctcatttgccactgtacaagtcctaatacaatgtctactaatccgctgaggagagttgaattaatatcaatataaagcaatttgtcttttcattggatacttgtctctgaaagccatgttactaatatttattgtcctgctaggattaagagtatgaagatgagcaagataaatatggtgcttctctttgatagcacaataataactattttcaacaatgttacgttttactatacttattctaaaatgttttctctggacatctgagcatcttctcttagttgatgtcttaaaactaaaggacatctcatccattttaatacaaggacataaactaaaatgcaaagtgaaatctttgggaggaaagtttatttttgataaagtaaatcccaagcctccagttgttctttaggaaaccttcccaaggcagaattttttagtgccataaaattaactgtcactattgcaggacaattgtttattctgctatttgctttcttggctctcttgttctccacttgcttatgatgatacaatttgtcttctgataatggatgagcgtcctctccctttcaatcactaccataggcccctaaaacttgctcaagaaatgtccaaagttcgtttgctttggggatttttaatctttcatggttggtgacagtaaatttataatcataatgcaagtgtgtgtgcctgtgtcgtgaacatgtgtgcatgatttgtccttaaagtacatgcagtggccttttagtgttataatatatggtcagtgtagttgctatggaaacaaccaaatttcctgacttttgagggcagggagatgcagcagtggcaactgtgatcagaggagagatattgatgataaaatctaagacttaaaagtaagggatttttctactttagtgttcaggtcagagcaatctgctctttccctgtatctctcaagaatacccatcagaaccaggctgaaggcatactaatatttatttttcttattattctagagacagggtcccactgtgttgcgtaggctggtgagctgtggtgtgctcacagctcactgcagcttcgacctcatgggctcaagtgatcttcccacttcaggcatacgccacaaccacaggcacatgccaccatgcccaactaatttttatgtttgtagagatggggtctcactatgttgcccaggcttgtatcaaacggctggcctcaggtgatcctcttgcctcagccctccaaagcrttgggattacaggtgtgagccacagtgcccagccttatcagttttatactcagtttattgtggatactggatgaggggcatattgtaattcttggttatatttggtatataatttctctgtagtataaaatcatacttttttgtaatagaatatatttagatccagagtagtatctacacaagacaatgttgcttamattaagtcagcaaacttatgctttcatttgaaatgtgatatcttgagatttccttttcattcagctaattagcacaagctgattagtcaaatgaagcacatttaatacattctctgatcagaaggaaacattttctaggaccsccatgtctactgagaagcttttttgtagcttcctgtacagcactagtagttttgcattgttaaagtttggaaaattcaccaaatgagaagctcatccaactgtgtttattctattcataccacatgtcagggcattgagagtggaatcattgtcttgatagcttaatgagagtgctctgtgcccagcacagtgttaaactgcatggatgtaacaatggataggaaatgattcctgctcccaagaacctgcttgaccacacaaggagagaatataggtagtgacygctcattgcatgcggaaagcacaggaccaaggccaacaaatgcagccaaataccagttactcctttgagcccaaggagatgggcagatgaagctgaaggggaagaaaaagttgagatgggacctgatagcagggcagacctgggaaagaaggcaggctatgtttagtgtcagtaaacttcgcagcttataagtagactgcatatattcttttgaaagtgtcaagtatcataataaaatagagagttagattcaagcaaatggtataagacaagacatagatgagacaggatgtagtggttcaaggacattgagtacattggctccactgaggagcataaggatctaaaatattttgggggagttgtcagggctgtaaatgattgattaggaaatcttggcttttgtagacactagatgacattgaagacaacatggcttcaactttaatgatttgaggtcgaggcaaaggccctataatcgtgatgaatagtaaattatcacccatttcttaatgataacaagtcagtaaatgcaaatggaatttggttgcaaataaaaccagcatgagacaaacacaaaaggccctgtgggattatagctgatgttctgtggtagtgaaaacttgttggctcttgtttacctcttccatagctctttcactgggtttttatccctgagttatgttgggtctagccttttcaaatgaatatgaaggagagaaggtcttaaaacctagtttttttgcttatgaaattgtataacatatgtaaatatgtcagttttttttttctggccaatggagagcactttgagttatagacagttttattcacactgaaaaactgggccaccttgatgtcataatgataatgacatggtcttctcagcttctcaatactcagtaaaattgtgaagatggattttagcattgtcaactctgaagttttgtttggtaacaccatgggtaatgtgtatctgaaagtcaatgtacactgattgtgtctgatgtaaggcagtcaaagtgagatgtacacttggcacaggtagaatatacacattgtgtgtgtacatgtgtttgctttcaaaatcaagttatattctaaagtttaacagtcttgtaaatcttttctttttcgaaggatcttcttaaaaaatgctactctgccaaggcatcttacctcttccagcaggataaattctatkatgtgagctatgacacaggagacaagtctatccagtgtagcagaagaccagatgcattcaagttctggatgacctggaaggccctgggtacattaggccttgaagaaagagttaatcgtgctcttgctttatctaggtactagcctctctctctctctctctctctytytttctgtgtgtgtgtgtgtgtgtgtgtgtgtgtgtgtgtgtgtgtgtctatctgtgtctgtaataggaagacctaaggaaagtaatacttgaaatgtgttgcaagtacatgttttcrtttgtgcattatttcatccaatacacattttctcagtacctactaagtgttaggaattatgaacagagcagtcctatcacctccctccaagatcctagcctactgagatgcacaaatgaccctcatttttggcaaggtgaggtatagagtccaagatcaatcaggagggcttctctagtgtgttcttgaggcacactggcagaggctccttggaggaagtgactttcaactgagatctaatgaagagaaggtggtattgtttgactctgtgtccccacccagatctcatcttgaattgtattcccgtaattcccaggtgttgtgggagggacctggtgggaaataatttgaattatgggggctattttccccatactgcactgatagtgaataagtctcacaagatctgatggttttatcaggggtttctacttttgcattcttcctcgttttctcttgctgctgccatgcaagaagtgcctttcggcttccgccatgaattgaggcctccccagccatgtggaactgtaagtccaattaaacctttttcttcccagtcttgggtatgtatttatcagcagcatgaaaacagactaatatggtaaattagtaccagtagaatggggtgctgctgaaaagatacccaaaaatgtggaagcgactttggaactgggtaacaggcagaggttgaaatagtttgaagggctcagaagaagacaggaaaattcagaacttcctagagacttgttgaatggctttgacaaaaatgctgatagtgatacgaacaataaggtccaggctgaggtagtctcagatggagatgaggaacttgttgggaactggagcaaagttgactcttgttacgttttagcaaacagactggcggcattttgcccctgtcctagagatttgtggaactttgaacttgagagagatgatttatggtatctgatggaagaaatttttaagcagcaaagcattcaagaggtgacttggatgccattaaaagcattcccttttaaaagggaaacagcatcaaagttcagaaaattttcagcctgacgatgcagtagaaaaaacccattttttgaggagaaattcaagctagctgcagaaatttgcctaagtaacaaggagctgaatgataatcctcaagacaatagggaaaatgtctccagggcatgtcataggtcttcatggcagtccctcccatcagacccagaagcctaggaggaataaatgatttcatgggcctggggacacacagggtccccaagctgtgtgcagcctacagacttggtgccctgcatcccagctgctccagccattgctaaaaggggccaaggtgcagctcagcccatggtttcagagggtgcaagccccaaaccttagcagcttccatgtggtgttgagcatgtggrcacacaagtcaagaattgaggtttgggaacctccacctaaatttcagaagaggtatggaaacccctggatgcccagataaaagtttgctgcaggggagggggccctcatggagaccctctgctagggcagtgtggaagggaaatgtggggtcagagcccccacacagagtccctactggggcactgcctagtggagctatgagacaaaggccaccatcttccagaccccagaatggtagrtccactgacagcttacactgtgtgccagcatgtgaaagcagccatgatgggggctataccctgcaaagccacaggggtggagctgccaaaggctatgggaacccacctcttgcatcagcgtgacccagatatgagacatggagtcaaaggagatcattttggaactttagaatttgactgccctgctggaattcagacttgcatgggtcctgtaacccctttgttttgaccaatttctcccatttggaatggctgtatttacccaatatctgtatccccattgtatctaggaagttactagcctgcttttgaccttacaggttcgtaggcagaagagacttgccttgtctcagatgaaaccttggactgtggacttttgggttaatgctagaatgagttaagactttaggggactgttgggaaggtgtgattggttttgaaatgtgagcacgtgagatttggaggggcaaggggcagaatgacatagtttggctctgtgtcctcacccaaatctcatcttgaattctactcccataattcccagatgttgtgggcgggacgcagtgggagataatatgaatcatgggggtggtttcccccatactgctgtcatggtagtgcataagtctcacaagctctgatggttttatcaggggtttctgcttttgcgtttctttttctcttgccacttccacgtaagaagtgccttttgcctcccaccatgattctgaggcctcctccagcctcagggaactgtggaactataagttcaattaaacctttttcttcccagtctcgggtatgtctttatcagcagcgtgaaaacagactaaaacagaaggggagaagaatgacccaagtggaaggagcagcaggcccaagtctctggatgtgaggtgacacaaaagtctggatgtgacattaaggacctgaaaagcaaatgatctgtgagttgtggcggcagcttaagtctcgaagggaaaggcagtgtggaagcaccatgtttacttgccttgtagtaaacattagaaataaaattgttgtcacactttcaagaacattagaaaagctcgagatataggtgccagacattgctacttgaataggactgaactgctaaacttagatcagtggtggacaggccatagccaaatttagttttaaatgtgttttgttgagcttatactgttcaaggttaactttcatggtgttaaacattcaaacatttcaatatttgaaatgcttttaaaaaaataaatttataaaaaacctggattttttgcttttctcaaagcttagaatgctctcaatcccacatggtaacaactagctgaacatgatgatgcctgactctggaaaaacacagtccctatcatttcttacagtttaaaaaacaaaaaaaaaacaaaaacaaaacaaaacaaaacgcaaaaaacaaatctagcctaatagcatagaggtacagacaacctggattcaagacctaaatcctgtgtgactggggcaagtttcttagtctctctgcacctcagttttgtcccaggaaagtgataataacacgtatctcaaacagttactgtaaagattaaaggaattgatacatgtagaacacttagatcaatgcctgggatgtcctacatgctatttaagttttagttattatttacttaactgcttggaaaatcatgtaggaccttcttagagatttatagcaatttcttctttctatactgggagtagkgkgggtattctgagcaacaagctgtctgaatgtgttaaaacaacaattgttttccccctagaggtctaaatgttggctagcatgactttatactttatatcatatcacagcrgctggggtgtttgagtctactcgccacgtctttcatattccttgatcagcatactarccagcgcattcttgagatggccmkgacagaaggccaagaargmaaaccaattatgtaagcccactttaaactcctgattgtattatatctgtagctgattgcgttataatactcctttggtcaaagaaaatcatatggctaaacccaatgtgaggaggtgggaagtgccctctgccttttagcaggaagaattgcaaagttacatagcaaagggcttggatataaggacaggtaaacacatggctttggcattttcagaagacttttagaagtcagtaattctggtgattatgggtatgaagtagtttgaaaaacctgtgaatactatatgaggactctcggtagtaagcgatggaaacattaactcaaggtattataaacaaaggtaatttaaggcttttaagactagtgtagtgatgactttcagaaggcttggtctaggtgcttcaacagtatcagcagtcctcagtctctctgcatctttcagttctgctttccttcaggttgggtttattcctatggaggaagatggatgcaaagagtgtcagatctatattctttcgggttcaagtttaagatcaaaaagataaagtactcctctctcaacaatcccgaggaaagtttaattatttgagagtgaagtaaatatccatctctgaatcagtcatggtttccagggcaatgtgatgctctcagtagtaacgatgattcacctgctctctctcggcactggggagtgtgtcaattcttcttatagaatgtgtactgatcctagatgaaggtacctttgttagagatagggttgaagtgcttctattagaagtggggagataacccagtggtgaaaaaacaagacagtctacggtctaccataaattatttatagctgctcactaaattagaagtccaggaagctctgttccctttttgtggattttcttgcactatttaaatggggtagaatctctgcattattttgtctaagctttgaaataattcaatgggaggtgtcttgaaataaggttatagatattttatgattgtatttattataaagttaacattcatctcagggtggaatttagtttacagtctaagaatactttctaatttctgcagagaaatatcacaggaggataaatgttaacatttcaattcaattcaacaaacacttattgtttgtaaatgtttgtcaagttgaatygaattaacattttagtgagcattgctgcagactgtgacctatgtttaagtatttgaaaaataatccctcctctttcctgctgttactcataatagtttttttgccttaactttccacactcttgatatccaacagtctattcctggggtgggcaaaagtctacctccaatgccaaggaaaagggcagagtactttgaggcatgtaatttggtatgaatgtgaaattataaaacttggaaagagtttctctagaattaagatttatagtaaattagcaacagaagggctttattttcatgatttctttcttttcaaattactgattcatttgtagttctgctttttaggaaagatagaatatttttctcaattctggggtctattctgtttgcttaagcctatatgcagtggtatggcagtaaattttctttcagaagttaaagaaagccccagtttgtagtgtctgcmaattttcatggtktaaatatttctgtcatagcaaattgcaagctaccaatggttgtagttgaggaaattcctgaatatttaacagtggactctcaaccactacaaagtagctctagaacaccactggttctgtgagtcataatcttaactcttccagctataatcgtaactctttcagtcttctaaccatgtgcataatgtgaagtagcataatctgttcaaaccaccgacagggtcaagatatttcccatgaagcccactgatgcccagcaacttgcttcagagtttaccaaatcaaaagcatttcacccatggttggaaggctccacctggaataattctaagtyacagwaacattgttttgtttccaagaagcgtaacttctttcagtagataactccagcaaagtaaagctgcacgtgatgattgttttagtatttgaggagcacrttattggcaggctcttatagctaaaatatccacttccctaggccctagggtcaggtctctaaaatactggaaaagctgtgcaactcttttcctttgataatgatacaggaagaattacactgattccatagaaataatgtttccatgttcctgaatctaaatggagcttaactttgaagtttttatattgactaagatttaaggatgagattttgatagaccaatgatcactgcaccgatcagatagccctcttyatattcccctgggaaagtaagagcagacactttcaggaggacaatgattccaattttatgggttgtcagaaatttagcaaggaaaaatttagtgcctaggagacctctaaggcttttcctaatttccatttgaccctgtcaacccaattgaagagagaayatttctcccagaaaatattaattactaaaatgcttttgtttttctttggttcgaaaatcagtgacactgagagcctaaagcaacatgtgattactgggcataattgaaacccagggggctcaggtttaaaactaccrctatggcacaaagccagtgactgtacatttctgatatctgcctaggaaagtaaaaaatgttttactatacaaggttacctgttgctgagggcaccttctaggcctttgttayggcattcaggttaaatggatatccactaagggatttttcaagcaggctagaagagtcatgtctaagtcttttcaacaacaacaaacagctcaggaactcccactctgctactttgtttggtctccagagtatcatttatctatctattcccttgacacacaatctctgcaatctctcaaatggaaatcatttcatagacttgcatggataccgaggggtgtattgttatcagtatggaaaaggtgagcagttacacaatggtgcttttgtgccagtgtatttctctaggtgatgggaggtacagagtctggaagactagggaacagtctttgttttcattttatctttatattggtgatctttttaaaagttacaattacagtagaatagagcacgtgggtgtctgtgatgaattccacaagtcatgtgacatgtgctgatctatgcagagcatacggaaagcagatggaaaaatctcaggagttctgggaggctcaatgcatcagaagagatttcaaatgagaagatgagactaggagagaaacttggtccaaaatggttcagggaggcgctaagcggctgaagtaagaaagggactggagaggctatttgcagagaggaaagaatgtcttgcaaaaggacaagaaaaataaaaacaaagggggagatttatataacccaatcagaactgagattctttgtaaggaagaaaaattgttttgcagcaagtttatcattaatgcatatgccaagatcaagccagaatactaatrtgttcttaccccacagtaggattggtgaaaactcaatrtgtatttttttctctcttttatgccaaggttagtggaaaggacaaagagtttcatgaagttattactgcttttcgagtccacttacttgaatgccttttgatagtagtttatggtttctgcattatgtccccaaactgaacgtactttttttccggcttgcaccatgtaagattagtttattaaatgtattttgtctttaggctgttttcatatattgaaaaaaaagttacgaggaataartcatccctagaaacataagcagaggtgacttaaaacattttggctttcctyccaacaacacatttcatttaagcatttatttaagaagaggatagggtactttttagtagaaacacttataaaccagcatttgtgaaagtatgctgtggccagtagacttccaagagatcttaatagatcatccctcaaaaaatagttccatggttaaatgtgtctgggagatgctaactactrtattattcctctcctagarattcgaagtactcattaggatatttaaaactttgagagggcctgtaatatagaagcattttttaactttaatcaatatgcagacactgttgatttgctcaccaaggaccattctctcttgcctgtagaaccttgattttgttcacgtagcaatgttcaatctgggaacattggtttagtcagccatcttccccaattattagtttaggggagggtatgtggctcagtcaacaagatactgtgaagacttctggggaaaatattcttacctaaatagaacttaaagtgcttttgctatagccccctctgctcttcggacactgctgtataaggatgggacatatggagctgtagcagctgtcttgtgaacatgagaggaaacctccctaacacagagcatggctagctgaaattaaataactggttcctgatattattgaacaatccaaccagcttgacaaatggccttatgaattaaggcaagtatagttttctgttggagaagatcttgctctgtcacctaggctagagtgcagtggtacaattatggttcactgcaacctccacctcccaggctcaagtgatcctccttcctacctcagcctcctgagtagctgggaccacggatgtacacttctacacccggctaatttttgtattctttgtagagatggggtttcaccatgttgcccaggctggtcttgaactcctggactcaaacaatctgcccacctcagcctcccacagtgctaggattataggcataagccaccatgcctggccaagtgtacttctaagcatagacaaaaatcaatctaattgatatgcctagcagtgttcaaacttatttgatagtgggactttttatgtggaaaacctattaaggtggtataccacggatcacagtttgaaaactctggtgtaagacctttgttatagtaatagctgcatctcctcttgcctcaaaatcacctctactttcaactcagctggagtgttacactgggtgtatcagtccgttctcatgctgctagtaaagacatacctgagactgggcaatttataaagaaaaagaggttcagtgggctcacagttccatgtggctggggaggcctcacaatcatggcagaaggtgaaaggggagcaaaggcacatcttacatggcagcaggtaagagcatctgcaggggaactgccctttattaaaccatcagatcctragagacttattcactgtcatgaaaacagcatgagaaaacccacccacatgattcaattacctcctaccaggtccctcccatgacccatggggattatgggagctacaattcaagatgacgtttgagtgaggacacagccaaaccatatcactgggctttacaggctctgaaagtgactgcgataggaacattaccccaacacaaagcccagatctacatggttagcaaaaagagttttaacagaaataattcagctctgttttaggatgcctttcctctaggagcacatttagccagtttgacaagcattttaaaatgatactatggttaatacatgcaagttttgtgtagccataacttgtaagggaaggattttaccaatttttttgtacatctttacgtgcatgaggaagtggaggcaggctcaggaaggcttaggaatttgcctagactcacaaagttatttagctgcacaattagaatcttctaaagttattcccaagatttctggagaaagctttcttcataggctcagttcaggatgaaatcataacaagcttttgagttaacagattgccagtacatttgtgcctgaaaagggagaaaaaggatggttcacaaagcttttctcctataggtaggaagtatattcatctatttgttttgtatttttaagttctttttcaaaaactatataagtaaccacrtgtatgaaactttgaaaggagatataaaaagggaatggaaaaccacacaccctcattgcatcttgtttccccctccctcaggtaaacaatttatgacgtatccttccatactttgtatatacatgtggatagagatttaaaaaaaaaaagtgtaaaaattgaatcaaatcatccccatttctcagaacctcacttttatcttttactaatttatcatgatcatcctgtgctttaagtggatataattcattcattttaatagctgcatattacattatgttgctatagtccgcattttaattccctacttatgaatattaatcttgtttctagttattttgtatggaatatacctatatacccacagtacagacatttagatagtacatatwaatatatgtgcacatatatgctgttatatctatccttgatattgataacttttttctttgtagaccagcatttcaaaactggtttgcttgataagatatgagtattacttaaaaggtttatagcaactttctatcatattcttaccaccactggatgttgtcactctaaaatttatttctggtatcattgggaaacatggttaatacaggaaatacttcattttatgtgcttaaccttattttccagatattgtgttttgrgggttttgttgtttttacaaattgagggcttgtggtaatcctgcatggagcaagtctatcaagtgccattttcccaacagcatgtgctcacttcatatgtctgtgttatgttttggtaattctcataataaaaatgtttgagtcatcagttctgtttgatgttactgttgtaaattgttctggggctccatagaatgcacccatagaagctggaaaacttaatattgagtgtgttctgactgctgtccaactggccattcccatctctctcctcttcaggctttccaatttcctgagacacagcaatatcaaaattaggccaactaataactctacaatggcctgagtgttcaaatgaaaggaagagtcacatgtctgtcacttcaaataatctagaaatggttaaagcttagtgaggatggcatgccaaaagccaagacagacaaagttaggcctcttttgccaaatagccaagttatgaatgcaaaggaaaagttcttgagggaaattagaggttctactttagtgaatacatgaataataagaaagcgaaacaactttattgctgctatgaaggttgtagagttctggatagatcaaagcaggcatgacattgccttaagccaaagcccaattcagagcaagaccctaactttctccagttctatgaaggctgagagaggtgtggaagatgaataaggaaagttggaagctagcagaggttggttcatgaggttcgagtgcagaagctgtctcataacataaaagtgcaagttgaagcagcaaatgctcatggagaaactgagcaagttatgctgaagatctagctaagatcactgaagaatgtggctacattaaacaggttttcaatgtaggcaaatcagtcttatattggaagaagctgccacctatgagtttcatgaccagagggaagtcaatgcccgtcttcaaagcttcaaagacaggctgaatctattgttaggagctaatgcagctggtgactttaggttgaagtcaatgctcatttaccattctgaaaattctaagactcttcagatttacgctaaacttactctgcctgtactctaagtggaacaaagcctgtgacagcacatctctttatggcatggtttactgaatatttgaagcccactgttgagacttgagacttactgctcagaaaaaaagattcttttcaaaatattactgctcattgacaacgcacctagtaactcaagagctctgatggagatgtacaaggagattaatattgtttccatgcttgctaacacaacattcattttacagctcatggatcaaggagtaatttagactttcaagtcttatttaaraaatgtgttttgtaaggctatagccgtgatatcagtgattcctctgatagatctgggcaaagtgaattgaaaattttatgggtttacccttttatacaccactgaaaacactgatgactcataggagctcaaaatactaataatggggatttagaataagttaattccaactctcatggttgacttttaggggtataagacttcagggaaggaagtcactgaagatgtggtgaaaacagcaagagaaatagaattagaaatgaagcccaaagatgtgactgaattgctgcagtctcatgataaaacttgaatggatgaggagcctcttcctatggatgagcaaagaaagtggtttcatgagaagaaatctactcagtgagcatgttgtgaatattgttgaaaggataacaaaggatatagaatattacataaacttagttggcaaagcagcagcaaggtttgaaaggattgactaattttgaaagaagttctgttgtgggtaagatgctttcaaacagcattgcctactacagagaaatcttttgtgaaagcagagtcaggcaatgtggcaaacttcattgttgccttattgtaagaaattgtcccagccaccccgaccttcagccttttgatcagtcagcaaccaacatcaaggcaagaccctccagcagcaaaaagattacaactcactgaagtctcagataatccttagcgctttttagcaataaggtatttttagtcacggcatgtgcattgtgttttagacataatgccattgtaaactcagactacagtatactgtaaatgtaacctttatatacactgaggaactttcctgcagcattcactttattgtagtgttctggaaccaaacctacaayacccccgagggatgcctatattgttttaatttgcacttctttgattattactgattttgaataacttttctgatatctgttgagcaatggaattgctttttatgaaagctagccagtgtgatagatggtttaaaaactttatagctacatgtcttctgaaaaagtgttcagagaatggcatatgtagaacayctggtactttgtgagcatacgtgcccatgtgtatgctcacgttatcgctcaaggattcccatattactagttaatattgacaatttttaatacaattgcatatagataatatctttgaaatatacaaacatcaatattttaatataaaaagctgtataaatttgcaaaaaggaacatcttaaaaactagtgtattccatattcacattatagaatggccttcctaaaatgacgtaataatccctttccagtttttatagtctgcatttatgtttattattttaaaaaaccatttcaaattgaagaagattgtattagtccagttttacaggtaagagacttgaggcccaagaggagcatggttgtgtctttaaatattagttgaatatttatgatttagtgacatgatcataggatcataactattactggaatctagttttcaaaggcattcctgatgttcggtgtgattttttgctattatatataaaaatcacaataaatgctctgacaaacacatttctgtcagcgtctctattatttccttatgtttgagtcctagatttgaagtactgggtcaagtgttgtgaatatttcaaaggctcgtgaatcactagttttcaaggccagccatttcagacttctcttttggtacagacaaaagccaagcctagaagagaggagtcaatatyatatagggcaccatgttctcaatgttgttttagtcttttctcactcatattccatatttcatctatgccctttacttaggtgtgacaattctctttcccccaacattcaaaatgactttatagatattatatcaatggctacagcccacttttttcccctcatattcaggtaattttttttcttgtattttttaagttttggggtacatgcgcaggatgtgcaggttacctaggtaaacatgtaccacggttggctgcacttaacccaccacccaggtattaagccccacatgcattagctcttttccctaatactctcccctcatcctcccctgacaggccctagtgtgtgttgctcccctccctgtgtccatgtgttctcactgttcagctcccacttataagcaagaacatgcagtgtttggttttctgtttctgtgttagtttgctgaggataatcagcctacttttaacatgatactgattatcagtcctcctctctgtgctggacttagaaaagattatgttgatctttcttgattttaagtgaacttacaagcaggattagacaccaaaaacaaaacaaaacaraacaaaaaactctttcctccaagccagctatttaatgtaagtacctatggttaaatcccccatttacagtatgaatgtaagacccacatgttcagagatatatatccagcctgctttatctggcttttcacaccagggttaaagcctgatgctaacatgtgagatagatatcatcatcaaaaagatgcatccttttactcaggccaaggaaattacagtaggtctggagtatttatctatccatagctctgcctgttccttgacctttatctgtatctttcttatctccaagccctgtctgaatcagttttgtcatatcagtcatgttcatgacacttttacattgcagattataaatattattgtgacttttaaytttaggtacctagtagatgaaatcaagaaaagagaaggattcaagttactgatggaagtaagtgattgcataattgtgcttgtgattttgtcagttaacagtgatgaaggtggtaattttcttatctgttatatgtttcattggtttttgtgttgcagagttaaaaacaagtcattagcttaattcatagtctattatgttaatttactctattagtgagtacttttcctttgttggattcacagaatatacttgcctttaagtattgaaaattaaaatgctcaataataattaccaaggataatattgaataaattatgacctctatcttggtatataaattgcatgattgtactgcaaatattcatctgtgatgtagtggtgcctgcatgtgaaaaatcaattaagtgaatgtacagtactgcatacagttttctctttttataaaataatgagcatattagctttggagcaatgggaaaataagtcattttgctgatgttggattgtttgctatgtgtaagaaattaggtggttacaaatgtagagaatatttttttctaaaacatgtttagaaaatataaatatttaatgtgtaattctggtttttaagaaatataaattgcaaacttcttagattttgttatagtatatgtattatagcagtttttaacctaatgtaaaaataacctagagattccagtcttggaacctgtgctatacataagaaatgtagctggctaggcacagtggctcacgcctgtaattccagcactttgagaggccaaggcaggcatcacaaggtgaggagttcgagaccagcctaacatggtgaaaccctgtctctactaaaaatacaaaaattagtcgagcgtggtggctcatgcttgtaatcccagctactcgggaggctgaggcaggagaattgcttaaacctgggaggcggtggttgcggtgagctatcgcgccattgcactccagcctgggcaacaagagtgaaactctgtctcggggggaaaaaaaaaaaaagaaaaagaaatctagcttttttggtatttattcaataagatgcattgaacaattactatgtcatgcatggttctaggcacaggagatagaaaacagaaaaggtcccccaatttcatgtttacattcaagtggaaactgaaaggcactaattaagcaaattaattaacagggaaatcaggtagtcttaaaacaataaaacatgttcatgagataatctagtatacaaataattagacaggttatagatatagtactgtactggggggaaaagtgtagaatgctgaaatggggacggcttatttggtttgagtaatctgggtaggggattttaaggttatctttgagctgagacctgaataaagataaacagcaagccatgcggatgtttgagggacagatattctggcagaattggtaaacaactgcaaggcttaaagctgaagagagttctgtctttgagcagccaaaaaaagttgtattgaatgaaggggagtgtgcagcaggtgatggaattgcagaggtgggcagagaccagagcaggtggtggtcaggtaagtcaaggtgaggcctttagcctgtatcccgaatgtagtcactggagatgttttaagaagacaggagtctgacttgcatgttaaaagattattcttgatgtcatgagaagagaggaatgttgaaaaagcaatagtgaagaggacaagagaaaaataagcaagacaaacttggaaactgtttttagtagccaaagtgaaatatgacaatagtcctcagggaagtttgggaaatactttccagagaatctagagcatggattcccctagtatctacaaaggaagcatcagactagaaagttctaagcttccaaagtgctagaaagctagacatatggaagatcttgcatgcataccaaaatgattaaaaattaaacaactttctggtagtactataaagacaacaaatttagagtgcgagaagttctgcagaacaacctggtttctttcaacaggccggtgatgtgaggaaaacagagggagtagtgataatctctttaggttcaaagagaccgaagaggcataaccaaataaggcatatggaccttgttgaaatcccagtttgaacaagccaactgtaaaaagtaattcttgtaacagttggggagttttgaatatgaactggctattagatggtgtcaaggaattgtcaattttgtgaggcataatggcattataaacatgtaagaaaatgtctatagtttttagtggtggatagctaagcatgtatgggagaaacagcagtcctatttgaattgagtttgatcactttatattttctcgggtttgagtttcctctattttctcaatttgagttgtgttattttctctggtgttgggagctatagtgcttatgaaaagtcctatacaccttgaaactgtacagtcttttgacagagctgraagtgatgagaaaaaagatgggccgattaaaaagttctttatatattcttcctaaagtcttagaaaagaaaaaccacttaccatcgtcattaggarattgcaaacactcatgtccttgcaatgaaagctaaggtgggattttagtcagccttctgcccctggattttttcatctgtgggagccagctggcccacaagcagtgcaggtggttttctaaatggttttccagaattcctggtgtaaggatttttgtatgtgatctgcatttgccgcttttctttttattacactgagaataaagcagaattagaccctgaatgtcacatataaagttgatagtctttttgcttatatgcatttgtatgtctatatatgtatatgtacatgtatttgagagagtatgtgtcactgttktctaacagcaaggagaaagtggaacattggaaattgtaagtgaacataacaagacaatacccagtacttgagtattttttcctggaaagaataaaaataactttcaatcatcttcaagaaatgtattattttaagtgaattctgaattattcataggcccctgaaaatcatctctatttttctgtgttggatctaagatctaatagatgttttcctagaggtatattcattcttacactgtcaattcacatattttattttttatctcttgggagagtcctaattattcaactttttcttttctcaaggtctacactaggaggagttattaatgtttcatcaactgagttatagaagatcttcgaggacatatagtcaacttcctgcacaatgcagcaaacctgtcttaatgtatctgttaacaggtggtcaacctgtgattgaatacttcctatttgcagagaattcactagttcattcctcttccagatagctctaattattcatgttctaatagtgaacctactaatatgtatcaagcacattgtgatttttcttacattgttatcttgtaatctaataaaactatataactacctcctaattgctaaatccaaagcacattattttaatcttcatcttgctgaaattctgtagcattgtatgttacccattcatcactccatctcttgatagtctcccctgtcttagtttctttgatttcctttcccaatttctcttttccatgtgacttgttcttttcagtctccatgtaagggacttttcatcagggcactcccttaaatattcttctaacactttgtctttggccacagtctccctgaaatgtcttcacattcagaactttgttatcaatagcctctttgtatgtcttcatcctcaacttagctcctaaactccaggcctttgtatatgaatatttcctgaaattttcacctagatgccacagacacctcaaattcaacatttctaaaaacttaagtgtagtattttccttaccaaaattctactttcttcttttggtcattagaactatgatccactaaccaaaaatcttgatgtttttactatctccttttcttccccgctaagtatatcttgaatgcttagtcttctccactcccaaagccactgccttagttcaagatctcatcactcttcaggttggtactatctaggtactgtctgctaacttgtgtcccacttccagtcttagatccctccagcctaactgccacactgctgctagagcagcttttcaaaratgagatctatttcctatagtgaaactctccagtgactccatgttcctctagaatcaagcccaagcttccaagtacatcatacgagaagtccttcatgacatgactcccatcttcgtttctagcttcacctctcttcagtacaccctgtcctctattcattccaagttcagaaagtgtcattttcttgtcctgatgcctagtcaatatctataacatagaaagctttgcttattaatttgaacagcttggttacccctcgctggacattatttcttaatgtttcccttcaaatatagtaccaagaaattaacatagtgatgtacctcactagtgcacattttaatggagctactcatccactttaaaagacatctctttttgccattatggccccaaataatagtcactaactgaccagtgcttgctgtgtgccagacacggtactaaattttgaaaacacgttttctctttaatcatcaaaccaaccctgtggggcagacatcatctacattttatagtttaggaagcagaaacagaaagtttgatactcatcccaaagatctgatgaagttgaaattcaaagccacatccttgcaactccaaaacttaggcttttttgctatccagtgctgcctttgaaatttttcaatagtctaatcttaacacctataagcttgaagtcaattaaaattcaccattccagcttttccttcactctatatttgcatgattgtttgaatctgtgtgctggattctgcatttacatttattaaaacagaatagtgctagctttagcttttgttacctattattctgatctaatgacattgtaaagcaaaggagatgaatttcttttgacataactcagttttagagaacgtgagctgctaccttagtgaccactaatttctttcccaaatggtctcaaaatttgctaaataattcttcctgaaattgataaagaactttagaatgttttttgtttgaaaaccggtatagaatgtattcattctttaatggcacattactcctttatcatgaattttttaaagattatgacaatgcacttgctgctccagagtttttgtacccttcactagatacttggactcctgtaaataccttcctaattttgtggattttagaacatagactaaatgtgttctcaggacacccaagaagtcagactttcacatatgtaggcaattaaaattaaggggtatacaaatgatttactctgaaaatactcattagtgctttgaagtctctttaagaattatgtaaaatacaagctacagaggcagagacaggaaaaagtcaaatatatttttgcaaaaattcaaagactttttcaactcttaattttggaaatgaccaaagcaaagatattccaaatgaaacatcaaatttcttccaatgaagtgaagtgtcagaagggctttataagctttcaaatgttgtagcactgaagccattccattctaaaagtgcttagtgatagaccttttgcattttttagtaagtttctgtttgggcaaaaggaatcagatctaagtcctaacttgtaaaatatagaacccataatagataaaacatcgtaaactgttttgtaatgttcctatgcaaatgaaagggaataacaaatttggtgacatattagagtccactcagaagacaagaactgcatggtaaagtgggaaagtgtaatatcaataattattagcaagggattggagtaatggaggattgcctcatagagaatgaaaaacctaaaaatgaacaggagtagctgatatagagagcagccaccacacctggcactgagatagagcgcccaagggagagtccatcccttcccaggactgaggtctagacctcttcagagagagtatgaccttggctcatgggatagcagaaaagtttactgagatgttacattggtggtactcactagaaatctagtctggagtgctgagctgagggaagccatctacaggggccatgccacaacttggaaatcactgcaagctacctagaaggagtgccagagaagtcatccaaggcaaggtgcctagctggcatctctctcctttgaaaccacctgaggggagtatgccaggaaaagccatttatgggctctccacttgctgcctgtctgctgtgatgccacgtgatgccacctgaaaggggtgtactgggggaagctactggggtagatgggtgggggtgtacttatgtttctggtcaccagtactgctgaaatgaaccacagattctgtaggagacccatgaaagtgagcacaccacaccaggaaagcattccttccttctccagtgtctctccagcaccctctgctgacaaagtctaagattggaccacatgtcatgggagaaatatctgcagagtccacctacattattttaggacactcaaaaagggtagatttctggctgagaggcaataaattgataactgacataacacaatctagtgacagataattactatatttttcttctactttctagtcaggtatagttacttcatttgaaaaatgtgttcacattaaatgctcaaagaatttgggagttcagtacagtctatcctagataaatctattatattaggttgctgcaaaagtcattgtggtttttgccattactttcaatacttcagagatccaggtataaattgtgtagatttgtaagaatgactgtagtctcaatagatgtttgtgaaaattgagttgaattacagtgtttcattttaaactactttttattaagatatgagatgatgggtctttcctcttgatgaaatgctttgaaactttatatactggagcataattctgacagttattgagaactgttgcaacattggttattacaaactgtttatggcagaaaatgaaaatcagttcaaatattgtcagtgtgaagcatcaaatgaggaagatgcatatgacacaatctttcctgaatacaattctatatgtctaatttgtgaacccccaacataatgtcccagatctcctagtcattgagtagtcatcgcatttcctatgtttttgtccagtgaggacaaagccttgtctgcgtgacaaaggctgggctaaagcctgttacaatacagtcccatgtttaagcaagtcatgtctgatagaaaaacagactggcagggaagataactgggttatgattacttagtgtagatgagagtttctgatagaacataaactgcccgcttcagaatcacttgacatgcttcataaaatgccaattctttagccttttctaggatggacttagacattggacattttgaacataggaacctgagttcctatgagaatctacattttgaataggtcccctagctaattcgcacttttactgatattcgagagccgggagtcaaggtgatgttcttttttcaaaagcagtattggctagggtcatagtagtgctggttagtgaagcccaagcaggtcacgctgttatcatctcacaggtaatcaaagcttttgcatttgccaggtgtaggggccaactttggctgccttaagaagaattattggaagcctatgatggtatagcaaataacttaaggatcagtgttggagagagaggatccagggcatctctgagcatgtatgtaagcaggcactaactgacgatcagagctgggttgagtcagcttcaractttactgttttttcctgatctttgcacatttaagatgaaagagaacctgctaggtgcacgctatggagtagaaaatttttaaataggatgttatcaagaaggcagaagggattgttactctataagattctgatgttaaaattttatacacmtgataactcttgaagaaactagctaagagttttaaaagtatttcattgcattctaagataaatcttaagataacaactttatattttttctaattmtcagcctgaatatgccaatatttgcttttggtacattccaccgagcctcagagagatggaagaaggacccgagttctgggcaaaacttaatttggtaagtaataagtaaatggtatttttctttttgatgaagtagattcagtgtacattatctgttgatcctataaataagagggcctagcaagcacagaattatctagagaagtgtcttctagtttgttaaaaagtaatgacaggccaaacagttgtagacattgtttacatttaacaaattaacatggttgacacacacccaaaacaattaggttgtctgtaaggtagaagttctgsctcacagtgtacttcaggaagtgacatctggtcatgggacacaaggttaaagttgtgtgatgaatgactatttatttcaactctgctactgcatctctgactgttgtaccaccttacttggaaataatgttagaagtctaaatctgatactttttgtaagcgtgagactgtcttcaacaaaggccctatgtcttacacccaaggggattacataaaagaaaagagatgctaagcagtgggtttcagctgatcatcgaacaaaatgtgcttggaagtgtcttcacacacagctgttggggctgatgataccgtgtgaggagaggccccaggctccagggactgcttgtgtctcatctactcctcgcctagcatggccctgccagttataatcctgcctctaatccagatttccaagcactatggagtctcgtgagtaacactacttgatcccactttctggatgcatgaacataatgcatactgaaagtgaacccatgggagtttcactggggattatgtggccatgacatgtagagtccaagttcttatgggctagcaccattaaaatcaggcaattccctacctcttgagtgggatcaagtcagcacagctgactttatgaccctggttagtaaaagctctgacttgcaaacccctctccttaccctcagggggaaaacgttttttttttaaaagcaattttcattgtccatagcctattttccccttagaagacaaaaaacaaaagactccctactcaggtaagcaacaaacatttgctgagtgtccactatactatgcactggaaatacaaacatsaaaaggacgtgtctctgcccttgagaaactcaatattcctagagacaatgagtaaagagacaatsacaaggtaaccaagaagtacctgaatggagattaactgtttgcagtgaaagtagagagaaagggtatctaccccaatgtgtgatactagagctgagtttttaacaataagcagatgtcagtcaggggacaattttaaagaagcagattccaggaagaatcacagcatgagaactcagaggctcaagaggggagaatgtgattcaaagaccacaggggtgcaaagaagcagtgatgggaggtgagaagagtaacaggcagagggagggtcatgggagccttgccttccacggcagaaagcttgggatttttgccccagtctaactagaaggaagagggcagaacatagcctttaagtcatggtcactgattgcctcacttggcagcgtgtccttttagcttcaggtcattttctgtttattcatggctcaaacctcctaacctgtaacataatagatgaccaatacagaatacacctcttatcaaaccctctcagggagcaaagatgtggagagatggatggtgttatatctgtgcccttatccatttcaggcaggtagcatagactttggggatttgtcttgtatttgtcacacacaaaatagcaaagtgcttaagaatacatttcagatgttaagtaacccataaagagaaacaggaactggacaatgtgagaatttagtggtgaagtttagaggaacattttttcactatgatgggatgtggctgacattttttagtagggtagagaaagaaattacaagttgagaaagatagggtcaccatttttctcactaagctagaaattgtttacgaaaaacaatgaagaatgtgatatttgtgtctaactcagtactgttggactgacagggattagaataactagacagactcatgtttgtttttagagaaattgaaattgagtatggatatataagctaatctcaaatacagaatataatgcattttttttttccaagacggagtcttgctgtcgcccaggctggggtgcaatggcacgatctctgctcactgcaacctccgcctctcgggttcaagcgattcccacatccctagtctcccgagtagctgtgatcacaggcacccaccatcatgcttagctgaatttttgtatttttgtcgagatggggtttcaccatgttggccaggctttgacctcaggtgatccacctgcctcggcctcccaaattgttgggattacaggcgtgagccaccgcacccagcctgtagtgcactttttatcttaattgggaattgaacaggaattgggacattctcttatccccaatatttgccaaaatggatgatcatacagtaaatatccagtttattttttttactgtcagccatcttggactctccatcccttaattttggaaatgcttttctgccatttacaaccatggtttccccttgcctgatctagtaacaacttcatttgttatagttgctactgaatagaaaaaatgcatgctgcagacaaattatcactggttctgagtttcttaatttcctatcattctctccctgcaagtcaggaagtgtgcatgaatttggcaagggggaagggagattatatatcacatagtttatgaggttttatgcttactgtagaatgagaatacaagtatatgatttataacctgtagtgtacttaaagcacacttgaaatttatttcagggtttatcttggatagagaatcacaaatcaaataaggctttgcccctctgattcagactaacgtcaggttgagctgtcacatttcagaatcgctggtgcgataaatcttccatttggcggcagaaggggagagggattatttggtaatgaatctggagagttgaagggtatgagcgcatatgtatgcttgcaagtatgtgcacgtacgtgagactatttgagaacacaatcactgtagcctaacaatgcaatgacactgtgatactggatgcctgagttccaacgacttcactttttcaagacgccctccgtaaaatcctcctctgactctcactcattatgatatcttaggtcttcattacttccctacctagattgtatttgtctcttttctggtctctctgcctcctgccatctccttttccagtttattttctttaccgtcaagcccctctttacctccgtctctgcttcttcatgtcactcttctgctggaagtctctgacttgcttcctgttccctagtcccatatagcaacagttctcaacccggtcagagtcaatgaccactatttatagtaaatataatatttaggagaataatataccctttactctcctaaaatgaaaccaatgaaatacatgacctccctatacagttttgtaaaaggcaacataagactttatatacaatatgaaagagaaagtttataagaaaagttttattatataaatacttgagcatgacagtattggaatacataaggaagtgataagattcttgcatatactcttagaaacacagtgaatgtagtctatgaatgcagactattataagtaggtgatgttagtgatgaaaacagcaacagtgtggtattaatgatatacttttcaaaaattatgaacttttgygaatactctgaagaaatcatttttcccttgctttacatggtagtagaaaactattaaaaatggccacaaaatatttggcattggtatgttaaacagttaggttctgcgcttgaataattataaccaagcttcttacctcatacatttctactaggacatttgaaagttgtgtaaaacatgggacacagttcaatgtcactcaagattgctctacacagtgcagggcagctgacacctctggtttccacctactaaatgccagtagcaaccctctcaaaatcatgaaaatctgaaacatttacccaaatttcctaggtattccctaggaatgttgtaccatttccttgagaaccactgtctcacaggataaaatcttaccatatcttaccaatcgaatcttgtctctttggcatccaaagctctccatgtctgagtaaattggrccagaggagttaggaaacactggaaattgggtactggatatctttcactaatcaaattgacaaatcactgtagtttttaatgttgatgtctactgttggtgagcgtcaggagattcctgtaagctattcatgggtaaattttgtaccatttttctgaaaagcaacwttataaaacatatcaaatatcttatctttcagcaattccttttctaaaaatgtattaagttatagaaatatggrggagaagctactaagacattcataggcattattttaaaatagcaaatatttcagaagaaactattcaactataaagagctggctaaattttagtacataacttataaacaaatttgtagtgtccagacaagattgtgtttcaaaataattcatattaaaaaggggtttaaaacagccactgtagtatattaatatcgaaattttatgcttaagtatacttaagtacatgtaaaatactatgttttaagggtgcataagaggtgccaaaatatttttagagataaagttgcaggygatttcttttatatttctctgcaatttgaaaattttctataatgtatgtttgtgaaaataagataacattaaaaagataccttagtggagtaattgatccaatgaagccagatttccttgagtgctttatctagacaaaaagttatccaggttttaaccatgtattcccccaagggccagaaaaaaataagcattaatcccaatatggtacgtttttaccatttaaaaattatctacatgtattaccttagaaatatagcatgtagatttaacaacaaagtttttataaggatgaattttaaggttttaaatattaaaatgttttaatcttttcttattgtaccactctaaggatcatgattatacaataattaattagtttgcaaactattttctcatgatgtgttcccaggtattgtgtccaatatgtcattcctccctatctctcccctccttcctaacacacagtatctgcattggttttaagtttagacgcattgctagtggtggttcctagtgatcttcaataggcttcctaggtttccctgaaagcttcgggcattgtggtagagttacacttcgcttttgttttgttaagacagagtctcactctgtcacctgggctggagtgcagtggcacaatcttggctcactgcaacctccacctcctgggttcaaccgattctcctgcctcagcctcccaagttgctgggattacagctgctcaccactatgccctgataatgttttgtatttttagtagagatggggtttcaccatgttggccaggctggtctcaaactcctgacctcatgattcacccacctcagccccccaaagtgcttggattacagacatgagccaccgcacccagccctatacactttgctttctaaagtaacttcctgaaataagtttgtatctttgcttcttctgaagctgccttatagtggtcagatattgaggatgagaaagttgaggatagaatgcaaagataagatgggaaatgttagaccccagagaatgtaattgaaaattccactagtttgttttgccccatcattactcagtattctgatgtagaatattycttattttgtcaatatttcataaataagtacactatgccaacacaatttacgttcttaaaagtaattaacaagctgtcttttcgtattcatgtatggttatttcaattttttccatttgctgacctgcagatttgtgactaatgttagtcatttataacaggctcctttctccttaatagtagaggagaaataaatcttaaaatctacttgacgggttkattgtttggtgataaaacttgatgatattccagatatctttagaaagagtttagtattctccctggcaggtttctgattaacggcacttgaagatgagactgcataatctgagtagggtgatgtgcttccgtggaaacctcacagtgaagacatctacacaggctgctgctttggattttagggagggcttcagtatctctttccttgccccatttatttcctgaatgtctttttgcatgtctaatatctggacttaggagcggctagaaataacagcaatcctgtgtataacgtctcctgatctcttagggacttgtagatatgcatacacacatgcacacatgttcacaaattaattgaaagctgtgtatttttcagaaytctgattttgtcattgtctttgacattagyatattcagtcactcatttttggactgtgaactaaaagcacctgtgtctttaaaggtgcagcactttaaaaaatgttcaaagatgaggttcttttttaaaccttatgctacagaatttatagtatatccttcaaaaatcctgtttcctagtagttatcactcgctttcaagctgtactttaaaatttatgtttaaagagtctaatatcaaagtgccttttaaagaaaatagctctaaatgtgacttaagaggctccccttacttggatagtggctggcattgtagatttcaagaatgcttaactaatgaatgtcctgaattttgtagataccgtatgctctttccccaaaccattaaaacctaagataaaatgttgttttaagtattctgtcaggtagagatattatgtacaatttgtcatgcattctaatggttatcagttttgttcttatgccattctgcaactaagggtcaagaagccacttaggtacttctgataattatggccagcttcagcaatcagctgaagaagctggagtgttccttcagctgaagggcagggaatactcagtgcttttctcgcttttatgctcaatctcttttctagttaattattgtctttctaaatatactccactggatttatacaattccaaccaacaaaaagttccaataaaattcttgttgtatgcgcatgtttaacgggaagttcatgatgagttttcctttgtatttaatagcatctttcaatgcataaaatttgttattactttgcttatttgctgattaatatattgttttgtggtctaaacattttcatagatgtgttttgtggatagtaacttgaactctccagaaaagccagataagtacagatgtcctcattataaatttttttttctttccttgagcttaacagcctctcttctcttgtttctgttggattgttctaatttattgtggcataagttctgagtttagcctatctcttgaaaattaaaataaagaatgaagctggcatttctgcaggctgaggctgagctcacgggcctgaggtcaggatgagaccagttctctgagctcatgggcctgaggttaggatgagaccagttctcaggaatttttgtgggagtggccacccacagctaacagtaaacacttgttcacttgtgacctactgatccactgggcaccctcgatgacagtcatgggagatgaggccaaggaacacagctaaatctgcatttcatgaacatctattgttctgcacacatacatgaggcatgagtatactattctctgtacggagtgccactggctttctgtgtaacatttgcacatgagccaagtttatcatttaagtctgtttctttagcgtctgttcgtgtaaggtctacgtgaaataattctgaattcccaagtatatcagagtgaacatcgaggaaaggcagaagcttaattaatgcttataggccacttaccactgtgtctctgattttatttggtttactcagtcgagttgcaaacccaagtacgtatagaagctagacaagtagcataaatgagaggagcctgagcataacatagtagggagtgatggggactgtgatacactgaagtatattggtcccagctaaagggaacaacctctactcagctcctaatcatgactgccatgcaggaatgcaggccagggttgccgggtcttatttttaagagaagctagataatacacagatgattacgtgaaccctttgtttttaatgttttcaatattggtaagtgatttagaaatgtgtaatatacatttgtcagtgggatctggccttcaggcttttagcttgtaattcttacctaaattcgtcagtccttgattacctgtgtgtcactggaagctccttgagatgagagtttgtcccttcatctttgctcctccatggcagcagttctgggattggcccactatcgactgagggatgcttgagctctctcatctactagaagataacggtctcatactgtcagatctgtcaagtagtgggtgttttaaggacggtgaccttgtggcaaatgtggcaacacagtttagacatatgggtgtgggtgcattttgatcttgtgttttctcctttccggattccaagaactagatggggcctctgggcttcaatgcctctcctgaagtttgtgtgttctgaagatgtctatcttcctagatgttcttgtagcctaagctggcccatgattagaccatagaggagacaaagaggcaggcacaggggggaagcaggaggaatttccctcaagccagaagagggtacaggagacaatttctacagataggaatcatcctcagcttccctctttgcgtaacctaaggaggtatctgggtgtgtgtgtgtgcgtgtgtgcatacgttccagacattggaacttctgcccctatcctaacagataaggatacagcactgtcaccatgtaccaagacatcatgttggttcaggtcataagtatttcactagtcgctggatggaccgatgacctaaatacgagcactgaataagatcctcatctctacagaatgctttggggctgtgggagctgtaataatgactgagtgactttcagccttgcctaggatggtggcttgcagttgaatttaattttatttagagaaaataaagtacagtactgtgacatttcttgcacacttgagttcatggagcaaaatccatacccacaacacaaccattaaggaaaatgctctggacttgatgcagtttgttgttgcaaaaacaaagaatagacccctgggctgaaaggaaaagactttttccatggtctctttgaagtgcttttgccagtgcccagcctgccccctggtggcacttttgctcatgttttcgttcacagctggaaaatgacacactaaatgcggagtgaacaaatgctgtgaaaatgttatagagttacagcatcacaggtgtcagggtatccggttctgccagaccaagaaagactcacctaagtcaaattctcagagatcaaattgttccttctcttcacttcaaatgtttctttcttcatctttatctcagaggaagtcacatcccttctccaaagcaaacttttccacatttgcctttgaggcttctttgtgcctcagaggtctttgcacctccagtctcgccactcttccttctccgcctctcctccccctccccaccccttctctctccccctcttctccttctcaaaatttcattcttatttcctctaatatcttgttccccctcaattgataaatatgtccaaggcttcaatgaaataaatgacaatttttccttaatgttttcccctcaagctacttcactgtctctttcctcatccctttggaccaaactcctgaaaataaaaatcttcaaatggcttgccctctataacaagtagtcccttctcataatttataaaaccattctcaatttggggcatttaggtttccagggttttgctattgtaaacaataacagatgaacatcttttgctcacatctgcttttgctattatttccagacgataaagtgctcaaaatgtaattgctgcctgaaaaaactcatgcagctttgagcctgattagctttgtattactaatttttaagaagtctgtatacatttgcaatgccagcagtaaggaatgagtacacaagcttcaatctaactaacattgggtgttataaggataagggggggrgtatggggagttatttagaaggtaaaaaatcctatctcaagtttattttgcacatatttattaattgttggtaggctgaacaatttctctttactgattgtcagtgtattcatttttttcatattttaagtatttatattttgagatctgatgtttttccttataaatttgaataagggtaacatggtttgggttttaaagctgtctttgtagcatggaatgcaaatatggccttcagtaataatatcctttgtatttagtcttctgtacgatgaaaaaacagcaagttttaaattttttatgtattcaaatctgtcaatcttttccttcataatttattccactgcttcaaagctgaagttactgttttcttataaacctgatattctattccatctcctgctggctttactgtcattcaattttttgtatttaaatccttaatccatgtagargttattttagtgtatyatgcaaagtatgaatctaacctgatcatttcctcaaagtattatcaagtttttctaattaattcctcctaacactttattatggggtcttatgttacaattttaaaaactatttcagttttccaatctgttctattgatctgcgtttgtttttgtgccaagaaccaaaggatttaaatggctttcctttacgataggttctcaaatctgctaatactctatcctcctggatcttttgtaaaatagcattctttaatatttttcatttttatatgttttagaacyctttaagttaaaaagggcatcttttaaatattcttattgaagattaaatcactgattctgaagtaaataatgcctctgccactcactggctgcatgaccatgaacaagttactgaaacttgctttccttttcattttttccatcaataacaggaggatatttaraaactacctgcacctcacagaactttgatggggattacagtatttaagcattataccaaagtgcttagaatagtgcctggcacagagtaaatgcttgataaacattagctttcattattattcatcctgttacctcatatttgaaggactatatgagccccagatatcttctccatgcctttttstttgcttaacaaaataccttaacactatcacaataatagacttcctaaagtccaactctcaatatgtcactcatgtttccccccttgtcccataggaaagtctatgatcattcagggactacagtgatctgatttactcaaccttcttaccttgtcctctgctaatcctatttatgtcccctgcagtctagctgactgagccacctgctctctcctgtctttacttggaaagccagcctatcactgtcatcaaaaacacactggcttggcagtcagaaaaacctggatgaaagttctggcttcatctttgtggtgtgccttttggtacagtacattaccactccatacctgtttcctcattaagagaaaaaaaatcacagtaatgatatgttatggattttcagggactaaataggatagtacatgtaaaccacttcacatagtgctaagtgggacaggctacataatttgcagagcctgatgtgaagtaaatgtggrgttccttttccagaaactactaaaaatttcaagatggccacagtagagcattaccaagcatggggcccyttgtcagctcaggagcttgtgtgactgtgctggttgcacatcttcaagacatccctgatgctcagggttaatgagagtgaatttagcattcctacctcctagtattttctctctgctttcatccctgatgccttgtgcctatattctaccacctcttcattcttggtgccccatgttcaatttcctcctggaggcctcagatatatacttgtttcttcctctgaatggggaatgatgcagtcttttgtaagccatttataacttttaaccaatatcatttaaccaatacagtcaatttttatgtctgactccaatttaaaattagaaggtcagcctctcagctttcccaagacttatttcctggcacctgagcatgagtaccccttttcatatactcttatgacacattttcttcccgtcttgccagttacgataataaagcaatatttgggaggggagttgggaaagattatgtcaagctagaggygagagaaacagacaaattatgcaatgcataggagaaaatggctgatgaattttaagcatagggatgatgcattacaattcccctatgatacagtagattgcaggggagatgaaggtggggacaatgtgtcacattagggtcatatttgagtttcaacccttccaagcctggctagtacaaaaactcatgcaaaataaaaatktggggctccttgtttcaaaattacccagagttttaagatgctgacagctgagcattaaaccaagcatgcccttctgagggcagggccttgttcagctgcacaggttgcacacccatgaagcaagccctggtactgaatgtttaataatggggttgattgtccttgtatgttttcacaatgttatcacatagtagatgcatagaaaataatttattgattcattcagcaaaataaggcatgaacttcatttgggcaacttatatgcttrttgtggcttcctgaagacatcatggtttgttctttgtccattatcccacctgtagttttacagaatatgactactcatcctgaaagtgtgattgagttggtctgcagtaaaaacctaggatcatatttttatctggcttttgatgtgcaggaagagcygagagccaccacttcttatgagtggtgatccrtgtggggaattcgggataaggacagcttaaggaagacaygttaggggagatgaacattttgatggctcttctaatgttgcctttgagggaactacctcctctgtcttgcgtaaatctagcagttagtgttgtaagttgctatttagttttggttctgctggtcaaatcatcagttcggaaggaaaaaaaaagtcaatttgcagttgtgactacagatggctaaacctscatygtcagacttttcctgcaatctgtccttggattatgctgtttcttatgaaaatgtcccccctctgcaggatgttctagaaatggtagtgcctcactgttttaggggtaggtagggataattcaaatgttggcagtgccacagcagagcttgctttagtcaactgtaatatcacttgcctaattccgaatggagattgtcagtacaacctggggtgagccgacactgaagtataccgaggtggactagaatactgtggcagtttagtttggtactaatcatgtctatcatgtgagttaacaattcttaagtgtaagatgatcagagaattcacatgggaacttgcctactcaaacaatatatttattgagcatctattgtgttccactgtycttggtgcttgggacatgcttctcgagtgatttcctctaataaaatgctcagcaaggggcttagaaaaataacaagggaccragtagtacgaaagagttggaargaaaatgtaactacacttggctctacttccatttttacaggaaaaaaagctcagtttgattcagtttataatgcactggagtcttgtagtttygcttttcttatgagttacataactcaagagaattatgttttaagtgtaatctaacaaattttgcatggtttctcttagagtctacacaccagaatctatcagatcatgtcttagaaattagtttctactgtgtatcttcttacaaatttgagtagggaaaatgactcggatctaaaaatctcttaagagaatttttcttcatgtcctcagttacttaagaactaagttttgaaaaactttaagtataaaatcacttcagtaaagygttaatatatttaataaacataagtatatataatgtacatttgcatttttatgaatgttaaaactttctatgctattctgaccaaattacggagtattttaaatcctgtatcctcatttagagatttgagrtttgtttagtagaaatattttatgtattttattctttgttaagaaaaaagtcaatgggaagattttttcctttttattatcaagagaatttataaaatcatttttcaaatatggataaccaaattatatcattttaaggtgatattttctgatatcttcacatttagaattttctggtcaaaagctgactaaggattatgttatctatatctctatagatggagagatagataaagatatggtctttaagacttacaatgcttagacctaaggatttttcaactttacaatgtgagaaactgttgcaattttgatgtaacgtatggtattcaataaattctgagatacgcaacactattataaaataggcttcctcttagactatagttgggcaaaatcatctaagtctgagcatatttaaggtagatttggctaagtggtgatatttggtaggttaggtgtaatagttttgacttacaatattccccccaccccccaccccccgagacggagtcttgctctgtcgcccaggctggagtgaggtggcatgatctcggttcactgcaagttccacctcccgggttcagccattctcctgcctcatcctcccaagtagctgggactacaggcgccggccactatacttggttaattttttgtgttatttttagtagcgacagggggtttcaccgtgttagccaggatggtctcaatctcctgaccttgtgatccaccagcctcggactcccaaagtgctgggattacaggcgtgagccactgttcctggccaatactttcaatttatgatgggatcatgggtatgtaaccccattgtaagctgaggagtatgtatatgtataaatacacatacagagttctacttgacacatgactttacctatttatggtgctagatttttaattgtcaacctaaaatgatatcagtatatggaagagataactgcactcccatgtttgttgtagcacactgtttacaatagctaagatttgggagcaacctaagtgtccatctacagataaagtatggtacatatacacaatggaatactagtcaaccataaaagaatgagatccagtcatttgaaacatggatgaactggagattgtaatgttaagtgaaataaagcaaggaaaagaaagactaacatcacatgttttcagttatctgtgggatctaaaaatcaaaaacaattgagactagaaagatagttaccagagagtgggaaggatagtggggrtctgggaggtgggcatggttaatggatccaaaataaaaagaatgaagragacctattatgactgcacartagagtgactattcaataactacatttttaaataacttaaaaagtgtggttgggacatttgcaactcaatagataaatgcttgagggaatgtatacctcatttttcatgatgtgcttatttcagtgcatgcctgtatcaaaacatcttatgtacccccagaattatatacacctactatggwgcccacaaaagttaaaagtttattataaaaatgttaagtttctaatctgactttgaagttgtttgttgaagtacatgagttcagatatgctttgtgtattttttcatgcttgacaattcaaaaatcgcatgaaaacttyagtcttcgaaggacccttatatattgaactaccaggtagaaaaggaagccttttaaagcatatgtcctcacttctcttttctcacctagattactgccatgaaccttctcaacataattcacttactcctagcatcgtcactaccccaagcccctcttctcttcactgttagaggccttgcataaacagccattgactccttcaaattccactatgtaaaractttcctgctgccttctctataaaacatgggttcctaagcagggcagtcaagayatttggtgatgtagactgtctcctgcatccagacctctcacctacccacgtcacattgcaagacctgtactcactgtctcggctcttttgtgccttggtttcagatactctattagattctcactcccayggccccagatattatatacatataatacatatacacatgcatataaacttcatattatatatcctgtgaaatgcagcatttgtgttgtgctgtttcaagattgccattcaaaatattgaccataggtttgaatctaattggtagagctactaggtggaggggatgctctagtgataaggtagaaaaagtgttccagattttttacttactggtctaatgatgttactttgtctacttccctcacacacaaatggatatgtctaaaaaaatctcattccttttttaaaaagttactacagactgatgaggattgatagtttcaattggataaagtttggtttagactcagacttcctggacacagaacaaagrtcagcttcagattcagggaaggaagcttacycaataattctttgcactaaaaatttggctagtataggagctaaaatataccatgcagtaaaaataaacatatctatcccccaggttctgtagttaattgactgcgaaaatgtgtgtgcgccaccgacactgggtgcctggaagaagacttggctacttgttttgtcaataagtcccacatatatttggttaacttagttgtttgtgtctagaattcaccaatattgagtcaattttagcttagcttgttgaggagctctgagaggctctagctgtcttcttccctggagactcagaattctcattgctatccacgatagaacrtctctcaatrtataatgtgatagaaatatagcctgatttagaggaaagctggaattttattaaagtaaataaagcatacaatataaagatttacgtccagggtctcttcagagatccttcattaaatgcctatatgaaacccgatagcttttttccattcaaartatacaatactagttgcaaaatgttttgtgggttgtgttctgcatggtaaattttaatccttgttttgccagtctaggtaaatatwtattagccattgattttttagaacagcacaggacatcagcctttaattttcyagttgaagcaggaatggccagtttccctatgtcctttcctttctaccaaatgactgcttgacatctttatcagtatatttgaggctccacaggctgyccatcatcaccctgcccccacctgaagaaaaacatgtggagaagtcccaagattakagaatcaattcagggccaagtcacataaccaaaaccactcattgctttacaagaatgatttcaaatagtattccttcaaattagaagcttcactagcctaaatcctttggaatgtttgtcagagcacttaagatacgtagtaattattaaatttggagtctggtatggtgagaggaagataacagattttgtgtatagatggcctggaagatggtaagagaaagaggaaacagaasgaaatattgctggatgtggtttggagagttttatgtaagatgttaggaggaatgccagctagacacagtctgttggtagctagaagttggtggctatgacaagttcagggttggacagaatttaggagtttcacagagtgatacaagtccctgaaaatgatatttaaaagagactaaagcttaatgaagagaagcaaaaattgaggaacatctattgataaggcacaaagagatgtaaggtcaagccagtaagtaactggggtatgagtaatatgtattgctatggaaacgaaggagatgaacctcgaggaatatgattgtgcaggaaggaagtgtcctacagggaagcattaaacttcataccagggtatgccttctctttctggtacatccaagttttctttgaaagaattatttctctagaaacatgacttattgacaatactgtgaaacaatcacaaaactttagtgatatgagacaataagcatttatcactcatgaatctgcaggtaaaaaggagatattaggtagctaatttaggctggacttggctggcagtggctgtggctccgtgaatctttcttcaacttactgaggcatgttcttatgagtgacagaggcatagagcacaagtccacctgcataagagcattttgtgagtctgttatatctgccgacattagcttggccatagtgaatctcataactaagcccaaccttaaaagatattggagactatgctacagttagccaaatccagccatatgcacaaayccartggcagtcgagcagaggaaatgttacttctaaggaagtgaagtagtgaggatacatatgcgtatttctgaagracctaatctaccacaaataaagatggtcacttttaaaaacaggtttaggcatagttcagcaatgtacaaaatgtggaataaaaccyagtgacaattcaacattaggctttagcttaccacagtgttactgtgggaacgtgtctcagttcaattcagcaaatgctttgtgccaagcactatgggaaatatcaaaggtgaaaatgacatagcaccttccatcaagctttcaacttgaggaaaagataaatgtttctaagagttactgtaataaaatgtccagtgtaacaagaattatgagcaggaacaagtactggaggtacagaaagaagggcaagagctcctcttagctattgtttagaaatcaagtgcagggagtagaatatactctggctaattttggaagaaaaagatttatagakaaagatttacataatcattgtgagagctaaagagacagatgtctaagtcctaccctagaactgggctgcccagggagctgctgcttctgctccaatctgcagaggcctgtcgaattgtggatttgccttamgagatgccagcactaaatccaaccagctccatcgtgatctgcactggaaaaaaaacggatttttaatcattatgactcttctcccacctaactcaagtttgaaattatgtgcaggtaygtctggctggctcactttaaattacatcagactaactgcaagagagttttggaaatgtgtaagcctctgcaatataggaagggactttagaaggagatcaaatgttgactcaaatcccctatatattccactggaagctcagggaagactatcaaaagggcgacacttgtaccagcttttacaaagtgctgcctaatggcaaggatggcataggattctgtttatgaaagtacttcattatgaggcaataaataaatacttgctttatggaaatacaatggagtcctcttgaatggagtcaccatgaaaacctttatctcagtgataagaatccaggaatagtttttactctcttcttccaccaagttgatatattcgtagaaggtccacatttatatttaagcatttaccatgttatcttatactgtgctaagcccattacatatatgatctcatttagmgtcctctcaaccaccctctatgaggtagttaccatctcatgtttttttgtcagttactcagagccartctgattctaaagttctcaagcacaatcattgtggttcttcctgagragaggggaagacrggaaaaaagataaaaggcaatacggagcaaagtgtaggaaatggagatctgacggaaggaagagctggagggaggctgcaaagaatagcccagagaaaactcatcagctaagraggggctctttcagagagtggagtgctccaccaagctgtcaaaggtgttcactaagaatacatacttggtgcatgcaactgtatgtggatagtacttggcagataggaatgtactacaaaggcaaagaatgttgagtaaagccaaggcatgatgtttgatggttggagagagtagtttggtatcatccagatttggttttgctcttggctgtgcaggaaactatgaaagctatgaagcttttggggcaagctrctgcatcttgagaagtttcgtctataaaattagtttaatacttaactcatggaattgagaaaacaaatttggattaatgaataaacaccatggtactcagcacatggtaacatgctcaataagtgttatctgcatttattggtactgggtaactgacccatcttaagctcagatattccttttgattttgctgaactgctgataatctgagcagctttgctattagtgtattctggtaagagaagagggaagtcttgggatccagaagatacggactagaactgtttaaacaggggaggggactacatttgtaggagttgtagaactccttcaaattcttgtgattttgtgaatctgatctactaatcccaagaactatttggatgattggaattctaggtccttctgtgtttactcattctctgtgggggggttatgtgccctagaaaataaacagcaaacttaaagcagaaatccactaatccatgggcctgtaatcatcctcaatatttactaatagcattacattagctttaaggctgtacacagccagagttctgtgagcaaggatatasctgctcataaagagactaactggtttccctttcatgtctttaattcttttcactttccatgcgaattgtcctaagcatttatgctttttataggcttctgatgatctagcctctgatctattcactttcccacttttgctaactaatcccttcctgcctttatcagctgatttttaaatgtcaggctgggtaggttgatttcagaggctatatttaaaaggagatctgagtatttgactcttgattgagacagcatacttagatatttgatgaaggtccaggaggccatttcttattttttcaatcacattttgggagcagaggtatagcggttcacatggcactctgaattaagagcagtctttctactgagatcagaagttctcagccttagtctcgaggtgagccagaagttgtgactaccaccaacaccctggaaatggaggaagctgaggggtaatgctgaaacagctgtcattgattctcaagacccacacattttctacttattacccctctcctttgacatgtcccccccatggactctggttggaggctagtgctgagttattgctacatacaaactacccccaaactccagtggtttaaacacaatcaagcctatctttcctaatgaatctggatggatctactggtcttggcaagtgtaagagagacaagccatcagctatgggtcaggtagggagctctgctggatcttggctgtgtttgctgctgaagggtggacaaggatggcctcatctgggacaactaaactctcctccgcatgatctctacttcccaatcaggctaatccaggcttgttctgccagtggtagtgttccgagagcaaatgtatttgcaaaggaagttaccttgaggccttgggtcagaatttagcacacgattacttctgctgttttctatgaaccaaagcaaattccaagaccaggctagattacagagatgaggaatagacttcacctgttgatagtaggaacttcaaaggcacagtgcaaaaagtsgtagaaggataattggtaccatatttgcartcattctaccacaaagatgcctttataactttatacattatagagtgttttatggcttgacaagtgtttacacatccacaatctcacttggacttggcaacgaatcctagatagtcaatttccttcttattctcatcttatgtaggaggaaactgaggccagatcagttgagtagctgagtttcakaacttacgtttctcttgttaccaagctccatgttcattgtcatggtccataaaaacattttatcaaaataaagtgaaaatgaatgcttgacatagctagatcctgtgccccgaagagtggcgagtcatttcatctctgctgctgctggttccctgctgccaaaacatttgtgaaactcctcctgcacagccctaggtctcctgcacagtcccaaggtttctcctgcgaggcctgggtgaggtgactgtgtgaactatcaagcagctgaggtcttaatctgcatataggaggcrgcttgtgggagtctaccaccagggaccatagcagtggctcacacagaggaaccagccatttaaagctgacttggaactgtgtatgaatgttatgtatgcaaatgatgacctcttggtaggaaaaaaaaaagtacctttggcatttgtttaaatctttttctaatcacaacataggtatctagacatttgccttttgtttcattcattcgtttaacaattatttattgaacatttccaatgtgtcagacactattctaaggaggactcccagacctgaatgagtttatagtctaacaggggattcagacatttaaacactacygctattaggctagtatatattttctacaactgtcacacacacacacaagcaaaaatggacgatttcctgtcgtaacatattgcaaaggagatagccctcctaggacaggcccaagaaattccttagggggagaagtcttcacttatctttcaggttactgtaatatttttagatgtgtgaataatctttgtatttattccagtgctggcttagagaagtttttagcttattagaatatctacatagaaaaacaagttttttagtaatagtatcttcttccaagaagctggcttggaactcyccatttattgttgctatttaataagaaaagcatccaggttaataaatcaagctgatggtttcaccatgtaaacatctttgaatattttagtcagtaattatctcctattgcatgcaagacaaatataaatgatatgatttacagtaaggtacaggttagtttttgtggtgggaggtcatctgtatgacattcactatagagtcccaagtcagctttaactggctaattttctctatgtgaagcactgcgttgtccctgggtaggctaaatcctctggatatcttgctagatcaaacaatattcttcaaccagaaatcttttcagagatgctgaaaatgctaaagtgctcccccgttttggtctgcttcctcagtgaaagtctcttggtttttcaatatttgaccatttattatcaagttactgaataatttaaaaatcctacccaagcacatgagactttcagaaaaaaaatcagtgccctgcagtttttgccccctcatagaacagagttaaaattcatttttagaaaaacatgctgggtaattacatcttctacatttgccagtttatctctgttaaacatagtaaacatctcactgcttaatttgctctgtcagccacggcttttagaagaaccagagctcttaggcagttgagattttatgtctgcagtataatttcacaggcagttttttttttgtattcttggctcatttacagtcaactatcttccaaactccatgaagcttaaatatttagccattgaggtaatacactctttgtcatctgtcagcttagcggtagaatttggactccatattcttgatgctcccagaaactcctgaagattcgagagtccgtcattggcattcctatgaggcttttttctatatccctttaggattcatgcttttaaggcttatggttgaatatatcctatcagaatgtagccccaacatattctttcctgaaggaagctaagatattacttgataacttgtttcatcagtttgacagaattatagtttgttcccccacaaaaggcttgcatgtggttctcctttacacatcttgaaaaaataaaatggtaggctttctgcccctcacattgaacttgtaatccatgrggaaagcaaaaaaggatgaagccatacttcaaaagccaatccacaaccttgtctatttttcttaaaagggtttttacttatttgggaggcacattagcaatcagacgctttttcaggaaagcctgtgtkactaatttagtttactatttgaaggtggaaaatatagaatacaattggtaatgcaagtagccctcaccacctcagtcctccttgggaaaatccgtaggtggccatggcttttagcgtgctaacagtagtgatgtcattttaggcaattgcttccctcttctggattcatcaatggtctagttacctcatttgcagggtccactaaaacaaaagttgagtgaggagcctcagagatttaagtgtacaaggaagctagcctgttttcttgcaatttatgaattagataaatcttgcataggaacacatgtatttgtaagtttagttaaaaagcaaattaagttttcatttattgtacttgtgcccactggattcacgttggtttcctcatattatctaaatatgaactgggattctctaagccacatcccgcaagtaaacaaaagagtgatcttaagtactgtaagaaaacaacaagttatctttaagtctgttggtcttcggacgcttatttgaaagagctcaatgacagaatagcaagaacagagatttttcattaattacctttctacaagaaactatccttccttaaatttggttttttaagattgaaaaaacctgagaattttttcctaaaaattaaaaaataaactaaggaaaaacctcaaccaaggtaaataagcaaaatgcaaattatgcacaaacctgccatggatattttcaaagacatatttgaaactagaattcaaaatacatggttttgaggaagaatttctgaatcaaaggaataaatgtcagaaaacatactattgtgtatagatcatgtaacgtagattggaactatctccattcacacaatctgaagggaatttctgcttgcctgcagtcaggggtggggcctgtgkagcgtggttaatatttcgcaaggttacttagaagattgaaatcagactaaataactgactcacccataagaaaaagacactgcacttatttattggcagtgacagcattttgattttaaagagtagctggtttaagaagatgcccgttatgactctcctttaggaatctatttttaaaatttaatatttaaatactgctgacaatgaagtgttcaaaaccaagttaaaaaacgaggattgtgttctcaactgaattcagaagccctaccagcttgccatcatcttatactgatttgacttctagccacttttagttatttgagaacttaattatcttgttaacttaaatagaaaactcttgtcttccagcagcctagattgttttaacctgccattaacatctcaaatgctaacaaatctttggactccactttctaaatactcaaaggaactaagagctgggggaagttcctctagaacagtcactttctcccttctgctactgtcacagtgctatgaagtatgctccagtggacgttttcttgtaacgatatttaaggggaacaggttaagagaaaggacagagaaaaacactcgcataactcctcgagactgggtttatgagtggttatggtgatttaaagaagcaaacagtgtcccacagcatcctcatcgccagggctatcccaaatttatagtaactagatacagagcattatctaaaagcagagactggctgcggcacagactccattgttactcccatcctctttcaccatacatgtctatctccatgcaaggtgcaccacttaaatagattgtgcttaaactgcacccgtaactgtcagcaagagrtaggcccctacaacgcctgaaatgaaagttaagctgtgtttcgtgccagcctgtgctagtgctcggtttgtggatctrgcctcccttaagtttaaaaggaaaagctgtcgaaaaccctaaagttacctgagagaacttaacagcactacatcagagccgcatcttctgctcaagcttctcagtgaagtactcagtcaggtaccactgtgtgtgtggaatgagaaaccacagcagtactttaacgaaataggtttcagcacatgggcctgggtagcctttagaagcattctgcctactgggtttaatttcagaatcgtcctatcttatttagacagccatcagtaagtctttgctgttgttcttttcatcttcagcctcattaccctttgccattcaatgggatattggggagagaaacaagattggttggggatgaaaagggaagctagatttagccctgccatttaatcctacttctgtgtttagtcagagacaaaaaaagctttccgagggactttcctcttaaaaactatgagccatgaaatggcgagaccatcggggggcaccagcgcagcagaaatctagttcagtttctcagtgcatagatctccgtgtctatgagacacgattgtagttaagactagatgaaggggtgggcttatagggagataattcctcaaactgtttcagtctttcagttttcacattagcctatcttctatagatacctccactcaagttctagaaagccttttttctagtctactagatatttccagcttgcctattttcataggcaaatagcattacaagatctagttgcccaggttctagttacccaggttctcggaatgttgaacaraagacacgaagraataaaagaagcaatgaaagacaaagcaacagaagaacggagtaaggaaagaaaaagcacagactgagcgaagacaactcacagaatagaaacaaacaccagyaagcggctcaagagtctccttaccacaatggtcccagggctttataaagccaaaagaattggcaacaccccccacgtgccctttagaggcctccaattggttatgccctttgaaggattggcctgtgaccaatcagaggctgaagtgaggcttggccckcaatcagaggctgaactggaaactcctgtcttgttatcacaggagcgaggatatggcccgtaagctgcccaatcttgcctagaactggctgcacctgctgttcttttgcttatgcgaattggctgcacctgttgttcttttgtttatgccttaaccccggttaccctaattcctattctcctgtctcaatagttctttacttctttctctcaaagcacgcttcttttatatttattacaaaggttgactttgtgtttcagataatgtcctctgtctttcaaaaatatttaaaatgtataatgctttattataggatccaccagagactaatgttcattgaaaataaaaaaatgagctaaggcgaatgaattagcaactttttagtcaagctgaaaataagttagtttgaagaagatatgaattgaaatccatatgaagccgcaggacaaattacatatacgtatatgtatattttatattgtgtgtgcgtgtgttgttaatattgacaattagctgtagcaattgtgttaaaaaaaaaagtggctgcaagaggagagaagggatagacggaaatttttatacagtgggcgtttgcatcatttcattacactggaaacatcaactggtactctttccacagctagtgtggcatttctcataaccttgcctttgcaatgttgtttgggcatctcggtagacctggtgttttggaagcctaagcagagggaggccgacagtatcggtgatgtcagtggatgtggacgatgcatcatacccacttgtgccactccgtgtgctgttacagctttcatgagatagactgttggtgcgtgtctggtgaccagaggatgaattgcccaactcaggacatttttgaaastgaaaaggatactatcaataatcacaccagaacaacaacataaagaaataagtacttttgtaagaaacsagcatctccagttatgtgctcttctgattgtaattttagcgccttctgtcccattcattaaaatatttcagagcaagagtgagaggaatattatatggggataatctgcagtattttctaatttactttgatgaagaaggagaaagaggaggaggagtcacttgtaaattcttgtactgtaacctgaatgataataagttgcctacacaacacacagctgattgaatgacagcaaaatctgacctttgtctaaagtacaaaacctcctgcccaaagcactcttttccattggccctcatcattggctgtagaataccctgatttaaatctccatcacagtttattcttcagttatgacagatagcccatttcattttatatcatagttgttttcatgttttattgccggtccctgagtataagtctaattatcctcagtagagtgcctcgggagctcgtgtcagctgttcagctggggcgaatgaaaccactcagtagaggacttctgcctgccttcaggtgcttctcaggtgttgcctagcagattgaaaatgtgttgctaggtaaaaaccttccttctctattatttcaaggaccacaaacacagacacacaaaatcagggaagcacagttggaatgtttgaaaactgttctgttctctaagatcaaagtaggtcccattagtctaaagtgctggcttcttgaagaaatgtcctaagattcacctgttgctaaaaatagkcatgagttagtcagtacattgctggattaaagatagtgacagctaattagtcattgytcaaacaatagaagagttgaaaagagaaagtgagagacactccagcattctggccagtcttcttttcttctgattttagagagaagaccaagagtgtaatgggaggtcactgtgttcctagtggcctatgattgaggctttcagaccttatgtaaccttttctgcttcacctaaaaggaaaatttaacatgctgagcaatacaaacacagcatttatttccatttaagactggatagaatcaattactcacagaaactatgataccccaaatggcaggctgaccatgtgacttcagagcaaccgctagaaaacacaaagcaagattccaatcaggaacagtgcagtgaggtttcctgaaagtcagactagggtacatgaaggcaagattgattcgggaattgataattatagtaaaagaaccacaacattgaatgtgagggattgtgttgttgttttgctttgtctttttttccctctgtgggaagtttagaggcagtcatataatatttattcagtgctaacagcacatggatcaacatcccaaggggtaagacattgaaatgtggagttgagaagttcaataaataaataaataaattgaggacacagttttatatagaagaattcaaaatgtaacggttgaattatattcagctttcttcccaggttaaaaattctagctgccacctctagttattgaacaatattatatttattgaatgttttttgtgtgcagcacactgtgaaataggtgctgttggtaccgattttctgrcgataaaagctattgagttccagaaaatgtttaaattttttgatagctaaagcctcttacacatatattgtttaactgaaaaataccatggctgatagatgcttgtttgaaaatctggtgtcctggcatcattcttctcaaatcctttggtgccattccagatgctgacattccggcagaaggaaacttgattgtatcaactctatggggtgtttcttacatccttactgtagtcagtggggaagtgctaagagaaaaagaggcaagtggactcattagctgaatctggtcrgtgctggagtacacactggtcattctgttttgtttttttcataacttaaaaaaattacatccttattcatttcagaaccatttaaaatagtctaaaggaaatgttaaatgaatcgaaccaggagttgatgtgggattttctacgtccatgcgcttcctcatatccttcactagatggtgttccaaatcaatccatagtgtctatgccattgatttggtccaggaggaaggtgagaaaacaccaagtcatccctttctaactcacctaacttcccttctctggcttcaagaataagtggacttttcatcactgttgagtaattaagtttgcatgctgttgaatttttttgtaggctgtacttgtaaatatttggggggttaattcagacaggaagcatttttcagccattgaatggtttcatgttattggcagggagttttgctaaactcatcattagtggccctagtgatctagctggtgctgtgaatcaggaacagactcgttttaactctctggcaaaggcagtcagttaaaccacaggccacaatcctgataagagctggaatcaggagaatggagtgacagatgggtagtagactgaaaatatttacaggataggataaacaaaggaagtggattgaccatgaatgcccctatttaaatctttcattcatattctcttagatatggccatgtctacagtcttcatttcaaaggaaattataaattaactttaaaagcaaacaaacaaacaaacaaactaaaaatccatttgattcagaaaatatattggagactgtcttttccaaagaaattggatttgaggattctgcacagatgtccaaagaaatgtatgggtagatgtgaatttatcctttaccraaattgctaagtttgtgaggtgtcagactctactcaattccacctttctttcactctctcctacccttccttctctagtattcagatagacaaatgcaccatcattttgacagatatatttatgcagttgattcattattgtcagtagccaaggagacattttctcgtggtgtgtytaaggtctggaggcagctccctggaaagaacttcagacaacccaaggtgctggatgctaaatccctgggaggtaacaaatggcctgggtattctcacgatcatttggctgttgacataaacagaaaaaggctgattctaattgattggtctgctaaaatgcttcatgtgcaaatcactttccccaggcctgtgatagtaaaaatcatctgagaggcaaaaagaaaaacgcaggaacctgacaggcaccatgttgcagagacatccctayatgtctgctataattacacaaggtaccaaaaagggcctgtgaggataaagagtggaaaattcctggcctaaattgcgttgtttcactgagggatttctcagtatccttctgccctttaatgcttaaactctcatatctcattttcactcccctgcattgctggccatcaggaacaccaaaatacaacattgaatttatagacaataattttgtagatatgatagatctggttcactwttttcaattattttaatggaaatttttattgtcaattatcttaatgtccattgttttcttgcatctccaacttatatgtcacttttatgtgttggcatttctgtgtgtaagaaatctgatggcccaggattagacactgttcttagctaaaggaaaggtacaaagtaaaaagagaagaaaactcctcctaacaattgttggcccacctgtcaccttatcaccccatcacctgtctcacctggtgcacctgtcaccttattacccttatcacagccctagtgctgttttttatgcccctgtgaaaatattgatggtgatgactattagcatctctcatgttcttcatgttcctttaataaggagggtcttatacttggtttcacattaaaatcatgggaaaatttggtaaaaattgtatttctagaaacaacttcttagagactggaggctcagtaggtctgcagtgagtggtaccttaaagtgtgtaattttaacaatggagaagaaatggaggctgggtgcagtggctcatgcctataatttcagcactttgggaggctgtggcctgccagacctcttgaggccacttgaggtctcraaccagcctggtgaacatggtgaaaccctgtctctactaaaactacaaaaattagccaggcatggtggcacacacctgcaatcccagctactcgggaggctgagacaggagaattgcttgaacccaggaagcgaaggctgcggtgagccaagaccccaccatggcactccagcctgggcaacagagctggagtgcaataaaaggaaaaaagaagaagaagaaggaggaggaggaggagcaggaggggtgggggaaaggggagggggaaggggaaggagaagaagaagaagaaatggaaagaataagggaagagaattttaatattttggaacaggatgaactccaagtagaggcctaggaagataaattttaaacgttaaatcaggcagagaatgtattggaaaaacaaatatatttttctctggtggcatttagatttacaaaaagaaaaagtdcaggtatctcaacaattgtcactatggcccatgcaccaaagatgatgaatattggccatgagcttctgagcacatttgacactaattattcatgatggaaggtatttaacagaacacagagcaacatattgagatccactgctttctgaaagaaaatttgatgtctcaatctgagtttaatgaataacaaaattgacttctgtttaattgagcagcttcttaatatagcagatagcaatagggttttattttctatcccttgtccatgcaggaaagaatttcatgatttgggtgtggaacacagataattattttctatcattccaaatgtacccccgcaataaaaataaagcatttccatgtcaaatcaatataattagggatctaattgatagacatgtaaatcatgacatatattaatatttattcttcattaccgtaagtttgaattgctcggcaaatgtcgacttaaaggattctgtgcttcaccttattactgtttgacctcattcattaacttggcatgaattaaataggccttcactaataatctactctgagtcctgaatagtagcacacagaaagattaaagaagctggaattcattaagcacttgctcactcatgcacactttatatttcatcttaattcctacaaaaatcttatgaaataacttctactgtctctattttacatataggaaaaccaagaacttaaccatgttcctcaatggctcctggatagcttttaattttaaaaccatataaacatagttgtagaacatgctacattaggcttgttatttagatttcrttcgccgctgttcgtgtttcttattctacaacaagggtcagcctayaggcaaaacacatcccattgtcatttttttgtaaataaagttgtattggaacatggccactctcatttgttttctattatttatggctgctttcacttacaacctgagtggttgccacagaaactgtatggcctgcaaagtctaaaatatttactatgtagctttttcttttctttttggagacagtgtgccactctattgcccaggctggagtgcggtggtgtgatcatggctcattgcarcctcaaactcctgggctcaagcaatcctcccgcctcggtctcccaagtagttgggactacaggcatgagccaccayaccyggctaatttttttaaagtttttggtagaaatggagttttttaatgttgcccaggctggtcttgaactcctggtcttaaatgaccctctcccatcagcctcccaaagtgctgagattaggggycatcatactcagctactatctggctcttcacaaaaaatttttgccatctcctgtattattgattgatattatctatatgactaaaccacctttatgatggtagatactccttgaataatagcttagaatcatcagcttgttgccttgactttgcctaaggaagtctaaatgcatagtatctgaatgcagggtttgggggctttgaatacagggaaaattaattacagctataacttacaaacaaacaacagttaccaggatttcctctaaagtagaactcacctagatctaaccaaatataccttagtttgagtcatatgaattaggtttcacttagttacactgcagcaacaaataagcctccctctccccacccacctttcccagccaaatctcaatggtttataatacaaaggtgtatttcttgatcatgcttcatgccctgggggtcagtcacagctctgctctgctccatggtcttccccccagcatccagactgatggaggagcccctgtctgggaaatgctattcttgcaccaaagggaaaggagaaagcctggcagaaacacacaatgactcttagagtttcagctcagaagtggtcacttagcaatggaacagagatatgtactcctcctacagcaggccctgtgtgtgggttatgaggcaaaggcaagaaggacatttaaataatgaagaacaataataaaatttatttttaacaggcaataaccataacaatcagtctcacatttaccaactagaaaacacccatgctcctaaccatccactcagggaatcagagtgtgttgtgaattctcagagtggttgtgttctgtaagtacctcaccagcccactcctctggatgggctattgttctgtgttttgttctagcaacccactttccttgtcttccatacgtgtgtttctgtttttctttctgggatgagtgcctttcacctgatgaataatcaatggtgaggtaaaagcaggcgctgtgacagcttgtgtttgcttccatcaattgttatgcgctattctgaggcaccttggtcactccacatatctccttcactcactccacatctctgcttcctatttgctggagttataaaatggaaagtaaaatcatctaaaaagctkcctggtaatataagtttcaatttcctttttaaagaaagccaacccttctgtgagcttgaagatgaaagttgcctgttaaatgcatatatttctggctattctgccttgaggtcagtgaagtagaacaagatattaaagatactctctcaaactgggtcagaactgtgttaaaagatgrgaggattatttcaggaagccacaaaataatccactcacacaggttgaaaaaaatttatgtagcatttttggactctgaaaaaccatctgaggagatggattagtcagctggtgtagcatacaagatcatgcrcaggttctgtttttattgctccattcagcagaatgtcattatttctaaagctaagcagaagcatgstttaagwagcaatttcaccattttcttcctatctctgaacaagtaaataaaaaaagtaatccaaaattacttctcccacttaaatgtagcaaaaaaaaaattacttgaaatatgctaaaatatatgaccttcaaaactaatagtagggcttagagtttatctcatgattatattattttgttttcttgtatgatatttagarctatatatattaaacatgaaataccttccccttaaactcagtaacaaattaggaacgtctggcttgaccaccatgagttaatgatgttctgagagtrccagccaatataatgaccagaaaagacctgaattttataatatttaaatggagaagacccaaatatgttcattttaaattgtgtgattgtatatctataaaacctaagaatatcaaataaaatacttttagaaatgtactgcagtagatgtacaaagttgaataactacacaaaaggtaagaaactgggagctagaaaatgaaaaattacatcagaaggtagctttttagtcagaataattttatcaccataataaaaaaaatatattaaataactaagagttaacttaaataaagtataatatctatggaagaaaactataaaagtttaaggccaaaaaaaaaaaccacttaatgttccaataactatttctgttttacaaatcactccaaatgtaggagcattaagcagtattttattatgctcatggattttgtgtgtcaggaattctgacagagcacagagggaatatgatgtctagagtctcatctgggaagactaaaatagctgaaggtgatttactgtccgggccaaaatattctggaagcgtctttactcacatgtttggtggttaatgctggcccttagctgggacctcatttggagctgtcaatcagagcacctacaggaaagcctctccatgtggcctggaattcctcatagtgggcttaggagagttgaacttgggaaagtcagtgtacctgagaacaatttggacaatagtccacctctcctgaccttgccttggaggccacacaggatctcttccactgcaccccactggtgattagtgtgccacaagccctctctcattcaagaaatctctttgagagaagtgtcaaacaaaattgcagtcatattttttaaatttacctcattttgaaactgaaaaacaccataattttaggtgagaagattaatttttccctaatttatacatgggcttaatataattctaatcataataattaaatgattttttaaactcatcaaaaacacttctggatgtcctctaggagactaagttggtagtaaccggcaagaacattttgagaggggagttctctaggaactgaatatattatagaattatataaataaaacaacttggattattctgagaatagacagatcagtcttacagaatagaaggcttaggcccaagttatttataggaatcgaacatgtttccaatacacactggggaaaggcaggcttgttccatcagcagtgttgagactactggttaaatgtggggatgtaggagtgtatctctatgcaaggtaaaaaattgaatgtttaaatggattaaaagtttaagtgtcataatcaaatcagaaaataacacacatttttgtaatcttggcgtgggcagagagagcttaagtataacaccacagtgttggaatacacacacacacacacacacacacacacataattatataatatatataatatttatacaaacaaaccacctatctcacacatatatatatatatatatatatatactaggaatacatatatataatacaaacacctatatatatttatacaaacatttatatatctgatatatcaaatatatattatataatatattatataatatataatatatattaatatataatatataatatatattaatatataatatataataaatatatttgatatatcaaatataatatatttgttttttatatattagatatatatatgtttgtttgtataaatataaaaattgttcaggaaataactaaaaacaaagttaaaagcagataacttgcaacacgtaaagtcagaattaatgttcttaataataaagggtttttctaaatttgtaagaaaaagatgatcacccaaaacaaaaatatacaaagaacataaataggcatttcacaaaaagaagacattcaaatggctggtagataacttgaaaccctaggggmatatatgggagagtaagaaagtaggagttgaatagtgattacctggaaraagcaaaagagacctttggrgggaaggtgatagtgttttgttatgtaactgctttaggacgtacgtagaggttcaattrtgtgaaatagtaatttattactatcattacttgacttgaacataacttgacgtgtatcacttaccctaaactcttaagcaaaagaagcttggtttcagcagagccacatgtttctctaggacctttctcacaacttccccaacttgggaaagaatgccrgactccaagagcaactttctccccttagacgtggcatgtaggaattcccttagctgacatcttgagggctattttgcagttattcccaaaaaaagatcttgaataataacaaaaatacattaccagtcgaattcaaactctgtctttttaaataccagagccctttttgccaagcaaactcttacgtagaactctgacatacgaagcaggtaaagcagagcttagtttaggcagaggtgggtcctgcctgctttgctttcttcttaccccttgtgggagcccctctatccctctgtagcctgtagccccctggacacaatagaaacatcatgatttagaggaaagagtaatttccaaccttaaacactaggagtgttgagcaagctccataaaaaataatgtgtaacttgctttcattaattttctcaaaatgtgcaaatcaaaagcatttcattactcaagtaaatggtctggattgcttttaaaaaccgttggttaatatttacagcattaatggtaaagactctttattagtatttataaagatttccaggaggaacaaacacctcatacttaacattttctcaatatttttatgaataatacaggaataagaattattttaaagtatcctcatggtagctttctttgattcagcgacagaagtaaagtaaggtacataacacttgggactttaaaagttcaggttttgcctctgagattgaaataccaaggtgttttaggatgcactatagctgaataaagaagtgcagtaaaacatgaaaatgacataaatagagatgcaaagagaaggtatagggagagctgagaacacatcctgtggtgtgcaactaactttgtatggataatgaacaactgtattcaaacaaacaaaaaggtcaaaaagacaacttagacttcagtttactcctgaagcaaataatcagtggaaaaaacctataaacaagataagatacaggtgcatgggtgcaggcaggtgggcacaggcaggtgggggcaggtagatagtcacacaggaggatgggcacaggaaggagggtgcaggatggcgaatacaggaatctcaccaaggcataattggaatgtctcggcagcctgtatagaacaagatgtctcttaggtcaaagcagcataacgccatgggctcccttcttttttcatcccctgccttgtcaggcccctgcatctactataaaatcagtaattctgtaattcaggaagctaggcctcccaagcctgatatgcaggttctacaatgtaaaattattgctgtgccaacactggggccgcttcccacatctgtgcctgtgctgctaggtaggagttttgcctttatgcccagaagagcctcgttggctgtcagtggcttgttagagtggaataaatcaaaagagaaaattgtagctgctaatttcccaatgccaaatattgaaaagtaatagaattctcagagaaagttgccctgagaaaacccgtgagaaaatgaatcataattttcatcttctatagagtgtatttcaggtgcttctcatctcactaagtgtgtgggtaaggtgtgaatgtgacatctgtgtggctaaaaactcatgaatatgacccacttattgtaataggcagtagtgccgaaactaaagcatcgtatgcctgctgaaatggccagacacaatattcagaaatattggaccactgcccatagaacctaaagaagaacctgggattgtactcattctctcctctcagatggagtgatactcattgaatatgttatgaatccttggaaaacaacatgaacatacctttaagcactgaagatcccatttactttgctctgggccaaagcaaggttaatgactcccgagaaaaacttaaaggtctcaggatatgtcaagaaaaagtgtagagatgtcggtgggaattatggggctcctgagaagtgtttctcaacagaggcactactggcattttggataacatgattcttccttgggcagatttattttcagcattgtgaggtgtttggcacccttaaccatgagacactaactgcaagtagcactccacagtcattgcaaccatccaaaatgctttgccatgattccaaatgccccaagggagttggtagcacctctggtagagagctactgaataactgcatttagggagcagtacagggatctcccaacataggcagacatttgggagttggcccacaacagttactcaggagctattagctcaggtggctgctgagacacaactgggtattaagcttttgctttatagagtgtataaaatgtttattgtgtccattgttcagctaaagctttcagttcagtttcgtttgtttttatgactgttcatttcagctgccttgaatatatgactgacattaggtttattggaagtgctgtcatcattgtcactatgttgtaaacaccaaatgtgaagctcactgtgtttttctggcttttggggtttctaaactctttgtttctgtagctttgctcatctgtattggaaagaacatgaatgaggcagttcttttattttgcgcatgtctgattttcagatatactcaggaggaaaataagggtaaaattcatatttgaaaaaggtatgtccaatcaaagtatggcttttttcttcatattctgccaagctaaaatgatctcttggatgcacatgatttcatgggctatagaccaccaattttacataatttaaacttgagagactcatactaatgcattttacctctaaattatggattggggaggtatcaggggaaatgagtaaggttgtatgaaggagtaagagaagaattagataggtttaaaaatggcagaaaatatattagaagagaaaaattgattctttgagcartcaaaactaagaggctcattgtttcctgggccatggttaagtgttttaaacactttattagattttatgattaacaaaaaagttggctaacaacttctttgaaggtcactggtttgttttattacaaaatcgacataagcaatgcgagaggaaattctcaatttcctctcccctcttctgtcaaaattgcttttcctttactaaactcctcttacctccaacctcacctttgcctctcccaaagtcctaagtaagagatcatcattcaccaaacttacatcatgaaaaagagcatttgggtggcctggtaaatatacagaccactaggcttattcgactgaaattcaaattcagctgctctgattggggcctgaatctaggtgatttgtattttcttgtacgtttgggacataccaaatagtattcttcaacctttctttgataaagacataagtgacaagaaagcacaaggagactgcacaatgctggraataagctcatgaattttaagtacatggccttttcatgggtccaagaaaaagtaactttttttacttttaaaatgtttttgtattctaacaacttatgcaacagatagaaatttctagaatataataaaaactcatccctgcccacaataaattttagtggaaaacttccctccaaaaaatctgccaagattatcaatgactgtgttactttgtaaaggaaaaatgtaagttgactttatcaacgtttgaaaaaatcctggaacttaaatggaagattaatggcatacatgagttgcaatatttaatttctgaaacttcaaacttgcagcctgtctcataaatatttaaatccagtttagacacttcggggagaaaataaattatttcatgtttttcatagcacttgcaaatgttcatgtctcaagagataataatgaaataatgtaataaaagtccaagcgggagtgtaaattgattaaatacaaatttattttaagaaataaataatattagttcctattagtgagtgcctagyatgccaagcactatgcttattgtgttctcattatttcatttagtccacataaggaccctgcaaaggattatcggctctgaatggaagagaaatatgattcccagaggagttaaatattggcccaaagtcacagagaatctcaggaattaggtcacaagtcagtctaagctagtctgttggtctgtgtatggtcggtctaatccataaagtttatcatctgaactgggacacttatggccatgaaaaggggtgttattgataattacaggaaaacatgtataaaatgggtgtctcctgagcaaactagatatttgatcacactagtgtgaacagagcttgtttatttaatcatcaggcaaaataaacattgagagcatggaattcaatagggccacattaaaatacttgctagttttaaaaatggatccaaaatgtaaaaggaaaactgaaaaacaaacataatgaaagattatgttaatttagtccatcacaattcaactgaaatcttctatgattgcatatgaattatatttaataagtatgttgggtacatttaaatatgttcaatctgatgtgtggtagagcccccaaaatctttgagccatgcagttcccattattccactcagcccaccaggaagaaaagcttcaagttccaccatgttcaaaatgccttcttcctttgcacccaagagtgcaaaggcccagcttcgaacagaatttattgtctgctggtgtttatatacccaccgccatgacacagtgttcatcactcaccaaaattccctaggactgaccctttgtagtcaacccttcccctcagcccaagtcctggcaaccactcatctcttctctagccatttgattttgccatttccagaatgccacataaatggaaacatatagaaggcagcctttgagtctggcttctttctgttagcataatctattggagattcttctatgttgtgttggtagtttattccctttaattgctgagtagtattccattgtataggtataccacagttttgtttatccattctgtacttgaagtacatttgtgttgctttgaataaagttgctgtaaacattcacatttcttttttcatgaagactatacagccaaaacaccaatgtaaagaagaagaagaaaatagagtgaatgatttcattcgatttggcatttttaagaaaaatgttctaaatttttcattaacaaacaattgccgtagaaggttaaattgtatagtgtgaccccttctacacaatgcaatgggagatttagttttctttactgcatggatcaagtagctttcaaaaagggcagcacccttgctatttttctattccagaaggaaaatgtgtaacttgatgaaacaacagagaaatcagatcattttacctaagactaaatcaggaagaaaaacaacaacaacaaagtagagagatttagatggtacctgaacacaaactaagaaggctattattttcccctctttacattgtcaggtgctctaagaaacatgaaggtgctaaagtacttgtctgtcaagtactggtttcttccttaatggggagcaaaattgactatatgatgaargataatcaaaatttctgcagtttatggctatggacaaaagcaagctgtgttgggagggcaaatgtctggtatgtaagatgtctcatttgggagaagagacaaattactcagacatatttggaaatacaaagaaaagcttctatattgtgggttagcaattttttttatttggtgaaactatccgtttaatacattttaaagatgtaaagctaaccattaccacaaaaatttttttatataagactaaaacaaccactttcttttttgcactatcatatgtttggacgataaggaaatgctttctgtcaacagctgttcatttagtaacaacctgcctggctaacatggaggttacacactagaggatatatatttagckgaatccaaagcccatttcagctctacatgttgtgagctgcacgtgtaaaggaaaatccagttcatatttacaggcagaataattcagttcatatttatggtcagatatgtagttcagagataagaatattcattaggttttaagaagtatttgtatgagacatattgttgagctctttcatcaccagaaacagatgaaatccactttccactgaagaatatacttaaacaaaaattgaaactaaaaggcaaacagagatgtaaatcgatgtgagactttgtgatctaacatggttctgaagaccttaaattcactggcaaccataatgctttagttatggagataaataccagaaaaattaataaagcaaataaaagaatttcatgctttctcacatgtctaacttttcacatctgcagaagctggcattcaagactctctaggttggcttttctcagatggttaatcagccttcagcttttgaggactgtggctamtttctcctgagtacagtgagacaggaaaaactctgccttctagatagccactgcattggagcaccccctcagaagggggaggcacggggaaagcccatcaaagtctgaattgtcttgacatgttaatacttctcttggactgaaatccttccacttaagctctccccttgatgctgttcatgccctgaattctggcccctgccttgatccgtggtgtatctccacctggcttcagaaaatctaagatgaccccaaactacaaaaaaagaaagaaagaagagaaagcaagcaagcaatcaagagagggagagagggaaggagggagggagggaaggaggaaggaaggaaggaaggaaggaaggaaggaaggaaggaaggaaggaaggaaggagaaaaggaaaagaaaagaaaagagatgactttacaggggagggaggtatgtaagtctcagtgatagttttgggtgccagatacaaagtatgaacatttcatgccaattttttccatgaactagatttcaatatcccactcagcagaactctcctcaagttgacatagaaagtgggacacattgggaacccagattacgtgggaggaaagtataaagcaaattagtttttgtgattgttccagaaaaactatactggaagaaagccacagcagcaatcccaacccatctgtgttaccagtctgcaataagaaatttatggaaatccacagtttccatttagaaacttttatagcaaccttaacagattagctttactattgaacttaaaaataaacaaaattgggcttgtatttttatttcattttgctagtaattgatttttattgtattttactaaagtattagtttataatgcattgaaaaaaataaaactgatccttccccacagatagtttgaaaaacactttgtattttattacttttttttaagacagagtctcactccatcacccgggttggaatgcagtggagtgatcttggctcaccacaacccctgcgtcccgtgccgcagcctccctagtagttgggattacaaagaagcagcacctcacccagctaatttttgtatttttagtagagacagatttcaccattttgctcaggctggtctcaaactcctggcctcaagtgatctgcccgccttggcgtcccaaagtactgagattacaggcgtgagcaaccatgcccgaccctgaaaaacactttgtattttgaaaaactgttcttgttaacactgagtatataacaaattcttaaaaagaaatgtcattttatggaaattatcattttattttaatcaaaggcaataatgatgcctggtcagaagctttttatcgaattgccctgcttggtcagaaagaaagtcattttattttatttttccttgggtttaagcaacttttaaatatcaaatcctatttggtgctacagcgatgtgcaacgagactctatttaaatgactaaatcactgatggaacataactcaggggtagggagagacaaattccacagaaatgtgtacattaagtcaccgtgtatccaaatagaaatgtcagaatcttcctccacttaagatgcagggaccagtgcactgaggcacaagaaaagaatttgatttacaatttgaagaaaaaacagcagaaaaataattgagagctggaaagcaatctcactcctgccaaattgctttcctctatgcgcgccccatttaggggtggtatctggatacctacatttagttcatgcatattttccttcccctgtgaccatgccatcctgtcagattaggactgtctctgctgtgatcagcaaaaaggaatatccaaattacctagcattggattatgcctggagcttcataaataaaaaatggttgattttaagtgcaaaggtgataagctgactgttagtgagaacgtgcttggtccctaaattgccaaaacatgaattcctttcaaataagctttaatttgaatttatgggaatcagacaagtgaraggacattgcaaattgtaaagaactggtaaaatacttgttaaaaacaacaactactactaccagcagaatagtttgtgataaagatttgatgaatatcagctttgatgttattactttctttcccgcgaagtattcatagacaagggagaccttccttttttacctagtagtaactgcctgtaggaattaatcttatagttcatagactcataaataaaaatgtgttgtactgttaaacccttgcttagctagttctctgagtcatatatttagttatgtctttataatctcagaaagtcagtaacaaaatttgtcctagaagtttggtttttattccctgtgttttgcccatggaagtacagtcatgcgctttacacaagagcaagaatttaaacatccaaagtatctttatattaaaacatctgaggtgccctcttcctttacctttcttgttcacgttagaaagtatttctggcttcctcacaagaaatacaaacgtgacagattcattttgataattgcctcatgtgagcctcagatatattatgtactggaatcaaaattytaatgctctccaaagataaggcataaaataccattttgggagaaaaaatggaagtattgaaaagtaaacaggaatacactatgcaaattaggcctgagccaagagcatgcctgttttacatttaaaattggctacaagccagagccagttataccctgggtacctggaggacgaaggagaggaacatgaagagaattttgatttcaaaaacaagaaccacagaaccgcaagctgtaagctctaaaactgatagtctgtggcccttctagctagacatttggtccatgtaaaccaggtcttcccaatcttgattcagcactggcactactgttgtctttttctcacagtttgcattcagaaagccacttgttctttgaattaaaaacaagtgtacttttatgatgaacctaagtcaaagcgtggttctccattgccctgtggccagagagattttaaaagcagtacaatatggtgggtcagaggtttaaattatatgtgagtgtgtatattaacatgtgcatatatgcacaggcacacacacacacacatgcttatgcacgcagacccatttatatccacatatgcacgagaagccctcctacctaaggtgaggaggattagtcaggtaaagcaaataattctagaaaataatgtgatacatacataatgtgagcattttcccatttaatatttgtatctttatatttaaatttttaatgttatatttgtayatcagtgtacatttatgttaccatcttttgatggaaaggttttttccacctagtgaagatttccaaatgctttttataaacaagtgaaacttttcttaagtagaggtctgatgatgagagggccctccactgttcttgcataaactacattcttcaggaatcatctgtcttatgcagctcgggtttcttcaggtgaagtaagtactcagacacctgtgtagcgatctccgtgcagaatcagtctggattctcaaaagcttttacagttctcttgcctagtgtgatcacaatgatgtttagccatccccctttatctcttctttccaaaggactcaacttagtttttacaaaaatcactttttttggcactcatctatctttgttttacatatttttttactagattttagaattactacttgcatacatggatttggaagaaaactcaaccaatgcatacaaattcatgggtttgaagcagatatgtataagcatagtagagagttacttcctagcttctggcttccagcatcaactggacatttgccactcttttcaagtgaatgcaggctgttgtttagttacatttttctaatctctagaaagctcagaataaaatgtgtcacatatatttagaagtttgtagaacctgatggcccatgcttttttcactaacttgacctctaacatcaccttttctacattttttcttttacactcatatattttcttttcatatcttgtgataatgtaagaaacttccarttttttgctagaatggcaatgtgattttcctgaataggtgtttgttttgttattgcaagcactgtgtagtccatgttttgcaagacttatattctaaaattagtacatgtggaaaaaaaagtgttgagttaaaattaaccttgaacatcctttgagaaggctctgtggttaagttcaacacataatatcttcagaggtctaaaacacccaattttttcatcagctttggaacagatcaagattgtgttgagtgtcagatgaagtcatttgacttgctgacaaaatgtgggtatgttcaaaaactgggctggtgtgggattatcacattacgagagagggagactcgtgggaacccagattcatgcccctcacctaaggagtttaaaagcacactctgcctggtgttctttctatatgtactcctcccttctggaggagtaagtctcatcttcctgagaaggcaaggatagaaactcattatattccctttccacatattcacataggacacactcaaaaagttttcagagttaaaataaaattcaagtggaaaaactttgcttgtatttccaagacagtaaaaatgcattcttaatattttaactcagtgtatcaaaaatgaacttcactattttaaaagtttacaacctagctctttggtggccatactactgattagaaaatggactgattttcccatgtggttcttaaattagactagtttcttcaaacattaaacttttagaaaaatctgtgtatctggattatcagggcctgtacttctcatgtcagctatagatctttaaaatatgtgcttcctaattttattaccacatttacatctcttaataagagacagggtgtttatatttcatatatgagaataatatctaactttctttttttctaggatgaaaaatacatgttctattaataaattaataaacttaggcttcaaaatagaactgtacataatatccatatttgttttttcttggtagacaactggaagggtttccttcttttccatctatgactaattttctttattcaagatacctgaactggggtgttttttagttaagacaaatttgagaatgagactgtaatccctgtggacacctgatttgtttttaatgaggcagcattgaataatgatttacacttaagagtatgggcttagggagaaaatgcctgggaccttgagatactgatttactcgccatgtacctgttttctcgaccataaatgggcacattagtagcatcttcctcactgttattgtgaagattaattaatatgtctaaagcacttgaatcagtactcatgagtcctccataaattattattattattagtgtcaaccttgtgtgaatgagaatgggatccaaaccagtggatgcccagtaaatgtccaatggctggtgaaaatgctaytgaaatgccttgatrttctggtctttcacccytctccccttttctccccacacaggtggccccagccattaaggagaggatgatgaagaagggaagcttgatgctgggctaccagccgcaccrgggaaaggtcaacttcttccrccaggtggtgatcagccctcaagtgagccgggaggacatggacttcctcctggatgagatagacttactgggtaaagacatgtagctgtggctttggtcccccagaggcatagatcctatcctgggagagtttagatccagaacatcttggagatacacagtagattgcagcccttctgatgagaaatagggaatactcccagtccaggcccagcaaaaccaaaatgctaagcaatgaatattaaggactctctagctgcctgggcattactgttgctaaaagaagaaagtttaaaaaaaaaaaagattttctcaaggaatgcccctggaacacagctctgaagagagtttagtaagtaccatgtaggttctggattctaagcttacattgctctttaaagaacttataaactaacggtttaaagcagtggttctcaaagtgtggtccctggactatcagcatcaaagcatcacctgggaacttgctaaaaatgcagattctcaggctttctctagaccaactggatcagaagctctgggggtgaggcccagtattctgtgttttaacaagcccgtcagggaattctgatgcacagtaaaatccgagaaacactggtttaagaaaaaccttgtaatgatcgaatacccactctgatgttttgccagcaaagggatatctaatatttcagaagcctctgagccagtctttgaaaaaatacaactatggcatctgcagcacaaatatttaaggacatcagaagcatgtcaaagctatttttaaagagagaaactgtataagatgtttacttcatagagatttatgttttatgcaggctgaatgtttatctcaaaagttaaaattatccattctcaaaagttaaaattatatatatatatatatatacacacacacacatatatatatatatataattcaaagcacaataattgaaagcacaataattgacagaaaaatacaggttctattaataaattaataaactgttggtcttcaaaatagaaatgcatgtaatatccatattagttttttcttggtagacaactggaaggttttcttttttttcgtctatgactaattttctttattcaagatacctgaactggggtgctttttaagaaaaatttgggaaatatatatgtttctgtgatatacatatatacatatatatgtatatatatacacacacatacatatgtgtgtgtatagtatatatatatatacacacatatatgtttctgtgttcctcttttagcttgaggggcttgtttattatcttgctctgtgcctcatagggaataaacacaatgaagtccagggttgtacaacattccctttcctaagctttgaaatgtcagtatagattattaagtggtttatattacagaatctgggattcagcagactttcagtgtaaatgcttcctccatttctcctgagagtgggtgattttaattctatctctgaccctggtcctaggtttctaggagagttttgtttaactaagaaattgacagaattcataggtgtgggtgtagagttcaccaagataagattatgaatataattaaaggtctgcattaaaaggtgaatgattgaagagtgttaaagcattagacttagcacattcaataaccttttcgtactccattgttaaccaatgtcatttaaattttgagtactatttgcttttattgcttattttcattttagtgtgcacagtttctcggtatctctattggtcaaagaatattaaatctgtctctgaattacttcaaattctcaggtgaaacctattggtgtgtgtgtgtgtgtgtgtgtgtttattttgcatttcttgttgcctttttgttttaatgtctacataaaatatttctaaaattgatgtttgtaacaatttgggtttcatgaaacaaaaaggaacattactatacttagtgttgttgacttttcttttcctgtcatctcctctttactggattgtaccaatacattttagaagtgaactggacttggttggcattttagtttaatgactgaaaaagtaggttgaaagctctctgtattttagttaacaccttgaataaaatggaaaaagcagttatagcaaagagtggactctcttgtttagtctttctcaattactgggtaagccatgggtatctcagccacagttcaactcctgctgtgcctttttacgagagagggcagctccttgatcaatgtaaaaaaaaaactgctgccagaaattttgaaaatttcattattttttcttgaaatattcagacataccacactcaatcaggtatttgactaagtggtcaaaaataattttttgataaaagtatgattataatgcatttattctttcattaaaacatttatagtgtgcctgctatgttctaggcaattatctaggtactagaaatattcagggaataaaatagacaaagtcctttctcttctaacattttcatcctaatggagacagatgacacataaatatataacatgtcaggtggcaataaatattctgaagaaaaacagagtaaaaagatagagcatggaagggagagtgtggtgggccgtgctatggtagaaaagttggttagtcatggcctctgttgaggtaatatttgaatggagacttccaggaagtgagggagagaggcacaagggtagctgattagaagatcttctagatagagggtatgataagtcagacgcctgaggagttggattcatggtatgtgtccaaggatcaacatggaggtgagtctggctgaagccaagtgaatgacagagtgagtggtgaatgatgaagtaaaaaagtgtctgggagtgagctacactgggttctgtaggtgaagacttagagttagatggatatacactggaaaatttggacagggtattgatgtaattccatttatatttgaatcaagatcacactgattactgcttagagaattgggtgtgcgtggggcaagagtagactcagagaactaaaataggaagcaattgaaagagttcaagcaagaaattgtggtagtttatattaccattttagtggaggtatggtgaaaaggggtcagattctggaagcatttaaaggtggagttgatagggttggctactggtgtggagtgttgaaagcgaaatgaggaattgtggctagtttcgtatgcttttggcccgggcaaccattataaaggagttgccatttactgagttgaagattgcaggaacagtggttttgcctggtttcagccatgtaaaaactgagctgtctaaaaaccagccaaccacagatggtatataagtaataattatgagtctcaacttcaggggagaaattgggattgaagatgtaaatttaagatctatcaacctagggatactatttcaaattatgggatcaaatgatatcatgtagagcatgcttgttgataaaaaggagacacaggccaaagattgagcctaagaataccagcttgagatgaggggaaaccagcaaaggagactggaaagaagcagccagtgaggcagaaggaaagccaagagagggtggttgcctacagaccaattagagaaacatttttcagaaaggaggaaaggaccaactctatcaaaagctatggatgagtcaagtaagaactgaaatttactagttggcaatgtaaagccatttacttgttgaaattgtatttgctaaaagtaaacatttagaatataattttcaatatttattttagtaggcatcagattttattaaatcaaaaggcttttaaattcttcttctggcttttggtttttaatagtttttcttcattggaaaaaggactactaataataaagagatttaagcttaagaaattattacattgctaatcagatcagataagaaagggtttagcagcatattacagaatactcaaataattgtgatttgattaaagaggcttatgtttctttattcaaaagaagttccaagatagacaatccagagatggtcttatatttggttacctcataggcaggcatgagacaaggatttgagagcaagtatcctattcatttggtgatgccaggaaacactgttttgggagtggtacagtgagacaggaaagggaagagaatcagtagtgattattagtgagcaaattaatgctctgagcaactgaggcttgatcctacccatgacatcggcgaaagggtataaaatataccttggagatgtcccatctgagggctggggaagaacaggtgttaatccattggttgataaattggttgaaactgatcccaggggcattagctccctgacagtcccccaccatgctccccctatggccctagtaatcctttggacagagagtacagatgcttgaaggtaaagtcttcagcaggactggtgagtgcctaggagatttggaaggagcactgaccactttggaaacaggagatggtacctttaccatgttacccaggatccttatatatttttattgtgccatccttagagatgaattaagtcaccatgttttacccatggttgcaactctgtagttccagccatttttttccacaattcaggcacaagaaatagaaaagaacttatttttcaatgcccactccatttgccatatttctcttcaggagagatgagaaaatgtaggtttttgtttgttttttgctttgttttagctagacacattgatgaccacaaccacataagtagttccactagtagtgaagaaaactatgagaatggacactggcaagcaactcatcgtttttgccaccatgacacaagcatggagtgacaccagttcttaaagcaatgttttgtttcccaggcagcacagaaattaacttagattgataaagcttgattccaattaaactgtttagaattcaatttgtctcattctagctgatcagagccagcttgcctggttcatgcttatctaatccaactagaaatggattgatacaacttgaaatgtcttaatccccttgactcaattagagccaattttgaactggaaaaaaatttgactcaatttaagctcttcaggaccagtttgattccttttaatttaaactggtctgaagtagcctaacataatttgaactggcctgattgcagtttgaagtaattttatgtctctctgttttgatcacattctatttgagctagattgaccttgggcaaatttatttcaactaagtagaacttgtatgattgttcaaatttgtataggatttattttacacaatgtaactcaagaaaatatggattaaattgctcaatccaactggattcagaaagaagttcccttttcatgaatctcttggctttagggaccacagttcagtagcaacagtgcaataaagggactcttgactagcttttcagggaaaactcatctagtgatacaaaaacaaccccaggttaaatgtaagtcacaagggaagaaaaatgagagctctcagtcttcattctgttttccacttcttctcaacgggcatgagattagtcaaatgaagcactggatacttagacccttatagttccatggggttggcggtgagtttgggtgtgggcatgaagtacattagaaaatagtataagttttctgtttccttaactctctaattttgcaggcatggcatttcttatggccaaaattctataagcttgagaatcctctaatgccggaatccaaggataattatagcaaaaactaacatttattgagtccatactacacaccaagtactatgccagccacactacatggacttatttgcttctcataataccctatgaggtggtagttattattatcctcaacttataattgaggaacctgaggctcagtttaagaaaatctcttaagattatcgatctagtaagttatagattcaagagtcaaatctaagtccgcttcaccccagagcccaggctcttaacttcttgttagtatagctatatggaaagaaaaggccattaagaaccaagttgctcttagaaggcaataattacatcataccac

SEQ ID NO: 95390 - DNA, 27700 bp, Homo sapiens
tttttaataaagatgggatttccccatattgaacaggctggtctcgaactcctgacctcgtgatccgcccgcctcggcctcccagagtgttgggattacaggcatgagccaccgctcccggccttcctccagattttctaccttccgcaggggtcccttctgtagtttgagatttctgtacttctctaaaaattgtcccccacccccaccccactcctcgctcccctggggttcatgaattaatgaataggagattggtacggcagagaggtaagcaaggccccgacggcccaggccgcctgaggtcagccgcctttctcaaaaccgcgtgccagatatttggaagaaagaactgggttccgtgggcctcatactcgcgaaattttaccctcaccttggccctcaggcctgcctgggctgcactcctaaaggcagccggcgctgttgcctcggggacatgaaagcccgggcagatacagggtgggaggcgggaagcgtggcgggtctcctggaacctccagggcgtctaggagtggtgcgaaaacgccctccctccttcccttcgctaccaagaaagatctcgcagtggaagaggattcgacgctggggatcaccgcggagatccacactcgtctgcccagacccgtccccgctctcagcgaccctccttatgtcccgggccaccccactagccagcgcgttgggccccacctcccgggttgggatccccgcacctgtgcagagtggctgccgagcacccgccagagggcgcgctgactccgttgccagaaccaggggggcaggggcgtgcgcccgaggtcgagcaaagcaccagtacagtggtgaaaagggggtcccctagatgcccccatcaggccaataccctttggctttgtttttattttattttattttaattttattttgagacggagttttggtctcgtctcccaggctggagtgcaatggtgcgatttcggcccactgcaacttccgcctcccgggttcaagccgttctcctgcctcagcctcctgagtagctgggattacaagtgctcgccaccacgcccggctaatttttgtatttttagtagagacggggtttcaccatgttagccaggcaaatctcaaactcctgacctcaagtgatctgcctgcctcggcctcccaaagtgctgggattagaggcgtgagccactgcgcctgacctattttattttgttttattttattttaatttttttgagacagagtcttgctctgtcgcccaggctggagtgcagtggcacgatcttggctctctgcaacctccgcctcccgggttcaagcgattctcctgcctcagcctcctgagtagtgggattacaggcacgcaacaccacgcctagctaatttttgtatttctagtacagatagggtttcaccatgttggtcagcctggtctcgaactcctgacctcgtgatccgcccgcctctgcctcccaaagtgctgggattacaggcgtgagccaccacgccaggcttattttatttttatttatttttgagacagagtctcattctgtcacccaggctggagtgcaatggcacgatctcggctcactgcaacctccacctcccaggttcaagtgattcttgtgcctcagcctcctaagtagctgagattacaggcccacaccaccacgcctggctaattttttgtatttttagtagagacagggtttcgccacattgcgcaggctggtcttgaacttctgaactcaggcaatatgcccacctcggcctcccaaagtgctaggattacaggtgtgagccaccatgcccgggcttttattttatattttattttttaaaattttattgaaacggagtttccctctgtcacccaggctggagtgcagtggcatgatctctgttctgggccctttgcctccagggttctgttgtggctggatcagtgttaggcatctcggggctgcagggagactggctgcagaggaatgggggactgctgagccatgagctttagggagattccaccggcctctaaatggactcagctctggccaccaaatcagcccgaaagccctgagcttagtttggttgcctcaagcctgggatccacctagttcaggtaggggagcttggagcttaggccagcgagagggagtgcaaagggccaggtagcaggaggggcgaagggtgttggctgtgtgctcacccaaggaagatagcacaactagactggctcctaagtctctggatttattctgttgatgaaaagagtcaaactctgtaaaatatttggacactttttttttttttttgagacaagagtctcgttctgtcacccaggctagcatgcagtggcgcgatctcggctcgctgcaagctccgcctcccaggttcacgccattctcctgcctcagcctcccgagtagctgggactacaggcacctgccaccacgcctggctaatttttcgtatttttagtggagacagggtttcattgtgttagccaggatggtctcgatctcctgacctcatgatccgcccgcctcggcctcccaaagtgctgggattacaggtgtgagccaccatgcccagcctggacgctttttttggatggagtcttgctctgtctcccaggctggagtgcagtgacatgatcttggctcactgcaacctccgcctcccgggttcaagtgattctcctgcctcagcctcccgagtagctgggactacatgtgcccgccaccacggccagctaatttttctatttttatagagatgggtttcgccttattggctaggctagtctcaaactcctgacctcaggggatccacccacctcggcctcccaaagtgttgggattacaggcgtgaaccactgtgcccggccctattcagacctgtgaaaggtgctaaactcttaatctcttcaggtttgggagggcctggaagaaaatctagctatgttaatagagattctttacagatgcaaaatttcctccacaaaggacagttttgcaggaccatttccaagtatggcaaagaaacattgttttggaatattttgactttcttgtcacctaatgttatgccagagtcagattgcaaagtaagttccgatatataggattaaataaaacccatctaatgagaatttatggtttgtagggcaaaccatacaatttgagatagtaatttgagcaatattaaaaaaaaaaaatcagggccgggtgtgatggctcatacctgtaatcccagcactttgggagacctaggtgggtggatcacctgaggtcaggagttcaagaccagcctggccaacatggcgaaatcccgtctctactaaaaaatacaaaaatcagctgggcgtggtggcgggtgcctgtaatcccagctattcaggaggctgaggcaggagaatcgcttgaacccaggaggcagaggttgcagtgagccgggatcacgccactgctctccagcctgggtgacagagcaaaactctgtctcaaaaaaaaaaaaaaaaaggtgtcagcctggcatgtggagaacgacccacaggaacgagggcgtgcattgggacatcagtgacgaggctgttgtgggaatagggtagtgtggtttggggagtgtagagctggcaagcccttatgaccacctgagttgtggttctgagaagcatggaagcatccagagctcaggatgatgccaagtctgcagcctgggggatcaggtggatggcagagtcattgtgaaaagggaggaccctcactttctgacccttctccacagtgccagcatgggtcattgctgaccaggccttgccatcctgcccctaatggctgtggttcctaacacatgcagggcctgtggggttgaagcaccaaggaacccctcttgaggacagggctacccttccaggggcccatggtcaccggatgctgctgggctggcaagacatttagactgtggccagagtccaaggtggcccagcacctcttgatccttctcttcctccacataacctttgactggacttctgcccgtccctaggcctgcagaagagtctctggtctcccacgctgggttttcaccagatgggtcttcactgatcttctgttgggtcacgggtgaaggtgggggaggcaggggctttgggagtgggagttctgagccagggccttagcgggagatggctggaccttaagagagggtggggctggtcacagtggcacacatctgtaatctcagcactttgggaggctgaggcaggtggatcacttaaggccaggagttcaagactggcctgggcaacatagtgagaccccaactctacaaaaaataaaaaactagctgagcttggaggtgtacacttgtagtcccagctactcaggaggctgaggtgggaaggattgcttgagcctgagaggtcaaggatgcagtgagccgtgattgtgctactgcacttgggtgacagagagaccctttctcaaaaaaaaaaaaaaaaaaaaaaaaaaaaggaaagaaaagaaaaaggggccgggcacagtagctcacgcctgtaatcccagcactttgggaggccgaggcaggtggatcacctgaggttgggagttcaagaccagcctgactaacatggagaaaccccgtctctactaaaaatacaaaattagccagggtggtggcgcatgcctgcaatcccagctactcgggaggctgaggcaggagaattgcttgaatccgggagacggaggttacggtgagccaagattgcaccattgcactccagcctgggcaacaagagcgaaactctgtctcaaaaaaaaaaaaaaaaagaaaaagaaaaagaaaaaagaaagagggagggtggtggtagcccagtcaccaacatgtttcactataagaactcgagaagggcagggcaagatagtggcttcatagccaggtcagctgcttaccaagaagaaggaaggaaggggcaggacaaatttcttgggaccaggtgggatgaccagggtgcagctgccccttcgaaggggtgggtgtgtggaggatcaagacctctatttcccaaatactctcgtccctctatcccacagtgacctatggtgctggcatataaccagctgtcaggtctttgcccactctgttcgcccctgcttcctggcgcagggagtccatgtcctctctggttccccaggtttgcgagagtggagggggaccacgagctcccgatgcctctcctgctctgcaggggaacttgcagatggcccatggcgcagggtcgagactcaagcccactcccaaccccgcgcccgaactgcccggactggcggggtgacgctgcactctgcgcccctaaaacgaacagattaacccctctcttgggaactgaacatgctgacctggcctctcccggttccccccgcatctgtaaccccggggcagagttacaggggctgactggccgcacccaggtgccctcggggcagggtgtgctaagaattggtgtgggggctgcacaaaggtcctggtcagctcctggtcacctgaggcccaagaactgtccgggactcacttcctctcttcttgctttaaccggggtcgctcagcagcggccagcgctgcaccccttatcctctcccggtcttgtccgttccagatcctccaggtcagggggtcgccaagtgagagctgcgcagcgtggatttcgggtacccagggctgggcggggtacagcagcggcgagctgggttcccgggtgggcgactgacagcccggagccaggcgatacctcgatccatcgatgcgctcggcgctcagcgtggtccaggaagcagggggttgggcaagggcggggcggcgacctccgactgggaggggcgtatatggcggcgagtccctattggccagccatttgcgggaggcgggccctgattggccggggggatgcgggggatgcgggcggcggggttaagcgcgtcgccaccgcccccgcctaggcgagagcccagagagctgaacctgcatcccggacctgcggcgaccgtcgtacaccatgggcctccacctccgcccctaccgtgtggggctgctcccggatggcctcctgttcctcttgctgctgctaatgctgctcgcggacccagcgctcccggccggacgtcaccccccagtggtgctgggtgaggcacgggtctcgtggtggatctgtcggtcgggcgggacgggccgcgggcggggctgccttcccggtctgcttctgttccagtcacgaaatgggggagcgtattggtatctgtcttgtcacttaggtgatctagatctgccggctcacctcccgccatgctgggcgcgggtgtggtcagctccccacctcctgtcctggtagaaaatgggggtgagtgggagagttaccatctggttattcatagttccacctgtccgcatcattcccaagccttgcctccccttatcccatttttaagctggaaagacaggtgcttcagccccactcctgagggatggtgggggtgtgtagagtggctcctgagttgacttctgcatcgacctgggcctggttaggaggctgtcaccctcgacccctccaatgccacatatgccagaaggcattgctgaaaggaacctccttagggaaaggattgctgtcctagctggccaccaactcccacaacttatcagatgtgtggcattgcctgagggaaaaggcctaagggaaactgaagacaactgaagtcaggggaaagggttgggacaatggccatgaacctgtgtcaggcaacatgcttgtactcttaccctgccacacatgcttggactagactatgtggaggctcggtgacctcccctgctcacccsgctccttgatcacaaccctggcaactctacaacggccactgtatttccttgcagggatgggcagggatgagacctctgtctggggggccttgggtgcctcattgaggccgtcactcccatccagagctggtgtgtccgtggccagccaggattcctgaaagcagagrcatctgaggcatgaattacacgtggagtctagtgcagcatgatctccatgctctttctgctgagagtactttaaatggggacgatgcaaatcacagaagggtagagttggcaggtagggtggtgccaggcaggccccaccaggagttcccagccaggaaaagctccagggggatactaggcccaggttcaccatgggatttgggcagacttggccctgcctccccaaagcttgcaggataggaataacagtgatccccagagaggaagtctgtgtggggcaagcacagagaatccaccaacccagcctggatgggtgggtgtcaagtaaggcttcctggagtatatagctggagctaaggccaggagagagtaatgggtcggggagagacgtgagcatctcaggctgcctgggatcgagtcacaggaggagtggactgcacaggacttgtgactggttgggtcatctgaactttatcttgagggcctcagggagtcctgggttggcctgcagagttctaagtctgaggggcgtggcattaggaagcatgtggtctgtggcacacaaaatggcacayagccattttgcctggattgatgctaaccgcactcatcaattcagtcagtctgtttatccttggtcacagcagaagagcctcagaccccacccagaatcacagagcagcaggagtcctaacatgcccagcttctcagggagtgaggctgctggccttagccctgggagacctcacggtgggcagttggataagcagctcctgggcacagagcagggatctgaccttgactgtcagaagatcagaatcctctaggggtggatcctgaaatggtggtggaggaaagagagaccagcgatgtgatacagaagaccctgggcaaggggaagggaccataggcaaggccatttccacctcttgcagcctcagtctccccatctgttaagtggaaatagtaaggctgtcccctcccagtgttacttgaggtgaaaggcatgtggatggctcttttcctagttccaggcgcagatgggctcaggaagtggccactgctatttttaggggccacacagcctgaccagggtaaggagcatctgagcaaagcagatctggtgacttcctcttttaccatttcccctttggtagagacagtgaccagggtctctgccctgccctgcccagtccacaggcatgtcatccagaggctgtcatgacagggactccctccctctgcacccataccatgaagggaggtgaaggcatgtgccgcccctgcctctcatggcaccctgaagacactgggatggtgcccagggagggcacgccctgttcagggtggatttacggtcagttcccagtgaatgtccaggagagccaagtgctggtttttcactcaatgatcatggaccctaaacggggatgtgtttgggaagtggcgagagcatggcatgtgggggcaggtgaggcccgaaaggtcaatgggagtaacgagactgtgaagggctttgacgcagtggggagggatttgggtgtcaccagggccccagagttctgagtacactgaataggatggctgggatggagagaagtcaccctagggcctggactgtggtgataatggtgctggttcagggtggctgtttccaatacgggctcccagccatgctagggccctccagatgatctgctctctggcaccttactggactctggcctttagtaaggcctgggcccttggtaggctggcrggtgccaatgtaagcttctctcagctgtgtttctgttcatttccctcccaccagcctgtcctgcatactttgtctggttgaattttagctgagtggcccagggctctgttctgtttccttcttcctctctcagggcgaacaggaccctgtcttctatgtagcctgggatagctatgggtggaagacttttgggttcaagcctccagggtatatatctttttttttttttgagaccgggtcttgctctgtcacccaggctggagggcaatggcacgattttggctcactgcaacctctgcctcccgggttcaagcaattctcctgtcttaggctcctgagtagctgggattacaggtgtgtgccaccacaccaaggtaattttttgtatttttagtagagatgggctttcaccatattggccaagctggtcttgaactcctgaccgcaagtgatccactcacctcggcctcccaaagtgctgggattacaggcatgagcccctgcgccctgcctcgaaggtatatatctaatgacaagggccttggccaaactttggaggttctggaatgcaaaggggtctccaagcccctcctcccaggcagagctcccatcggggtccattaaccatagaaaccatgtgtagaggtgtgtctgtgtttgctgggggtgattcagaccaagatctcatttaacagatacggaaactgaggcctagtgtggggagtgacttcaccctgaacccccttccaataatctgaatggcccaggaggatgttccagtgaaaatccaggagacttactttatctggagttggagacaatgttagggcccttccccaaacatgtcaggcctctcccaagccccccacaggcatctctgcaccacacagcagtagcagcttttctgcacaaagatggttccctggcctttgggtcaaggtccctgctctctgaatttcctgccaccagcactgtgctttaatttgagatgtggaactgcacaggtctgccatattatctgtggctcttcagggggtctgctgcagacatcaaagttcttgggagtcttgaacctgccgggctgagggctcacacatgtcctgtgccccctgcagtccctggtgatttgggtaaccaactggaagccaagctggacaagccgacagtggtgcactacctctgctccaagaagaccgaaagctacttcacaatctggctgaacctggaactgctgctgcctgtcatcattgactgctggattgacaatatcaggtgggggctggggcacacagaggggkgtgctgctcaccaacagtgcctgagaggcctccagagtctgttccttctatcctcatctcgaggtcactgacctctctccttccccaggtcctcggtctggtctggtctggtctggttggcaccacctctgcactcccaggcagaactaactttcccttcctgctgcccttgttcctctactctccagtcctggcctctcatgcctacacacaattttttttttcttttattttgggatggagtcttgctgtgtcactcaggctggcgccatctcagctcactgcaacctccgtctcccaggttcaagcgattcttgtgcctcagcctcccaagtagctgggattacaggtgcccgccaccatgcctggctaattttttgtatttttagtggagatggtgtttcaccatgttggccatgctggtcttgaactcctgagctcaagtgttctgcccaccttggactcccaaagtgctgggattacaggcatgagccactacgcctgcctacacaaaatttctgtgtcccagcccctattcagagcctcggcatggcccccacccctttccttgtctgtgcctcggcctcccctacctctccagctgcttattcttcttgggacatgccatgtctttgtacctgctgttcttttggcctggaatctatttctacaccctttgcctgataaatggcttccattcacttttttttttttttttttttttggagacggagttttgctcttattgcccaggctggagtgcaatggcgcgatctcggctcacaactcttttttttttttttaacttttattttttgagacagagtcttgctctgtcgcccaggctgggtgcagtggcgctatctcggctcactgcaagctccgcctcccgggttcacgccattcttctgcctcagcctcccaagtagctgggaccacaggcgcccgccacagtgcccggctaattttttgtattttttagtagagacagggtttcaccgtgttaaccaggatggtctccatctactgaccttgtgatccgcctgcctcagcctcccaaagtgctgggattacaggcgtgagccaccacacccagccccattcactctttaaaacatgaccctaggccaggcatggtggctctgctataatcccatcactttgggaggctgaggcagtcagatcacctgagctcaggagttgaagaccagcctgggcaacttggtgaaaccccatctctaccaaaaatacaaaaaaattagctgggcatggtggcatgcacctgtagtcccagctacttagggggctgaggcaggagaattgcttgagccagggaagcagaggttgcagtgagcagaccactgtacccagcctgggttgcagagcaagaccctgtctcaaaacaacaaaaacctgaccctggtccctttgtgacatgtcccttttgactccccagagcggtttgcctctcctcccaggccccatgcttgcttcctctaaacatcatcatgtgcccgaatttgtctgcaggcatgtttgcccaaattgcacaggcactgtacattttatatactttctttcagttagtcttacagcaaccccgttttgaaataggtgctgttttctttttttttttttcaccagtgttacttgccaacaggtggtttttaaacctgctttacaactgcgaaatctggaggctcaatgaggttacaaaattgactgtgctcactcagctaataagtggtagaatcagaattcaaatccagaatgtgtggcgttgagctgaggttccctcccaggctgagttccgtgaagggagggagtgtgtgtctgttttatccttatagcagtagaaccagaaacacagttggcgcctgataaatgtttgagctgaatggagtctcccaaattaaaagtttttcctggtcgggtgcggtggctcatgcctgtaatcccagcactttgggaggctgaggtggacagatcatgaggtcaggagttcgagactagcccggccaacacagtgaaaccctgtctctactaaaaatgcaaaaattaaggccgggcatggtggctcacgcctgtaatcccagctagtcaggagtctgaggcaggagaaacgcttgaacctgggtggtggaagttgcagtgagctgagatcgtgccattgtactccagcccaggtgacagtacaagactccatctcaaaaaaaagaaaatacaaaaatacaaaaatgagccgggcgtggtggcacacgcccatgatcccagctactcgggaggctgagacaggagaatcacttgaacctgggaggcagaggttgcagtgagcagagatgggggcactgcactctagcctgggtgacagagcgagactgtctcaaaaaaaaaaaaaaaaaaaagtttttcccagagacccgctagctgctcctccaggtgccctggcctgccggctgtttgtgatgcccrttttgatgactccttcctcctctgtgtgttgtgtgactggggttatttctgggctgttgatgtgcatttctatttttatactggggacacagcctcaggtgctgccagttggaggtgccagctgataccaagaggggcctgtctgccttcactgcttctctgacccgtttagattttcacccagcgcagaactgctttggctttccagaacagttttctgcattttgctgtttgataatttatttttagtagcaacaagctactttgctatgtggtcattgggataatctacaaattgccctggagagaatgggcctccaggacctgttatctgggtcagttgtggggatcctgtcagcttcagtggctgatatctaagtgggcaagtgggactcaggaccaccagaaactccaggttcctgtgttttgggggcacatttgcttcttcagtgtgtggcgaggccagagcaaggttcccagcctcgcacagaggcacaaggcttttctcctggtataaggtgtctcccctggcccatcaccctgttcccatcatttcttcaggccttgacaaccctcttcccacaggagatggtgcagcagctgtgtactgagccctgaggcggggtctgtcctgtctggttctgtttggcactgcagctacagaaactatgagatcacgtgtgtggtgttagaagctgctgagtctgtggtaatttattacacagttctagaaaactaataggctgggtgcagtggctcacacctataatcccagcactttgggaggctaaggcaggaggatcgcttgagcccaggagtttgagaccagcatgagcacatagtgtggccctgtccctacaaaataaataaacaaataaataaataaattagccagacctggtggtgcctgcctagctgttcaggagggtgaggtaagaggatcacttgagcccaggaggttatggctacagtgagctatgatctcctcactgtgctgcagcctgggcaacagagtgagaccctgtctcaaaaaagaagaagaaagaaaagtaagaaagggctgttagggatcttaagtcagtagctggtggtccatgtcctatgtcatggcgcttaggaatttgctgggcaagccctgagccttgtggctgcagtctgacagttgatacagccctggggtactgggaggtcataggagcatggttcattcccttcctccatggaggatgtgtttggaggttggctggctgctgtgtccaatgcgcagaggaagcgggacccaattatacctacctggggccacacaaggccttcctcctgtctctccccaccagctcccatcatttctctgggccttgctccttctcctacctgcctacccacccatacagcagccctgaggcatggtgcctttctagggtttgtttttgtttgtttgtttgtttttttgagacagagtttcgctcttattgcccaggctggagtgcagtggcgcaatctcggctcactacacctctgcctcccaggctcaagcacttctcctgcctcagactccggataactgggattacaggtacacgtcaccatgcctggttaatttttgtgtttttagtagagatggggtttcaccctgttggccaggctggtctcgaactcctaacctcaagtgatccacgtgcctcagccttccaaagtgmtgagattataggcgtgagcccctgtgcctggcctagtgtgttttgttttgttttttttttttttttgagacagggtcttactttgctgcccaggctggtgtgcagtggcatgatcacggctcactgcagcctcaatatcccaggtgcaagtcatcctcctgcctcagccttccaagtagctgggaccacaggcctgcaccaccatgcctggctaattttttatttttagtagcaacaaggcctcactgtattgcccaggctggccttgaactcctggcctcaagcattcctcccaccttggccttgcaaattgttggaactacaggtgtcagccactgcacccggcccctgtctggttctgttgtgtactgcactcaccacctccttcacctgggatacgttgggctggcaggagctggatgcaaggagatggagcgatggaaagctgaaagagggtagactgcctcttggggtccagtgtgaagttcacggcagaatcaggactggtacttccttctcccaaccaggtccaagaccctcattctagagtagggtcacgggggagaggggaatgttgctttgacaggggtcctggggtcagtatttggagtaagtatgccttggtggggtcctcatttggatgtaattactctgatctgtgctttttatttttatttatttatttatttatttatttatttatttatttatttttttgagacagagtcttgctctgtcgcccaggctggagtgcagtggtgtgatctcagctcactacaacctccgtgtcacaggttcaagcgattctcctgcctcagcctcctgagtagctgggattacagtcgcctgccacgacacccggctgattttgtatctttagtagagatggggtttcgccatgtttgtcaggctggtctcaaactcctcactcaggtgacctgccagcctcagcctcccaaagtgctgggattaacaggcgtgagccactgcacctgggcaatttttgtatttttagtagagacagggtttcaccatattggccaggctggtttcaaactcctgacctcaagtgatcctcccacctcagcctccctaagtgctgggattacaggtgatctgtgctttatcaacctgctttgttacttttcggtctctcctatccatctgaccaaacctgggcatgagaagggagtatgactcaggacatgatgcactgttgggacacaccaagctcagtgtcccctccgggtcactggctcaatatcctctcacaacaggctggtttacaacaaaacatccagggccacccagtttcctgatggtgtggatgtacgtgtccctggctttgggaagaccttctcactggagttcctggaccccagcaaaagcagcgtgggtatgtagcccttactcaaggcctccgggagctgggatggggkttctgccggactggagctggagctggaggaactctgctggtttgtagggacagcctgtgagctgtctctgatcagygtgggcacagagccctgtagcattcttccaaggacctgctagctgtcacagtctccatgctgggcatagtgtaggtggccggcactagctgtatcttttcttatcctctgtatttctgtctacaggttcctatttccacaccatggtggagagccttgtgggctggggctacacacggggtgaggatgtccgaggggctccctatgactggcgccgagccccaagtaagcaggcactctcattccctccctgamgtctcgggaggtaggggtgaggtgatcatgggcaccacagaccttgggctctccccttgtccttggctgtctcctgtccctgggcctctggcatccagtctagtggtcacagccaccacctttggtcagtcttatcctgtcctccatttcccaccctgggacctctgggcctgtgagccctggggagaaatataaggcttcctcccttcatggaaggcggggggacccagaccgctctgtttgaatgtgagcaccctcccctccccctctcgtcttgtgtctggcctgagaaaagctcagtggttccggctccaggacccttcccacctgacccctgcctggctctggcctgcagatgaaaacgggccctacttcctggccctccgcgagatgatcgaggagatgtaccagctgtatgggggccccgtggtgctggttgcccacagtatgggcaacatgtacacgctctactttctgcagcggcagccgcaggcctggaaggacaagtatatccgggccttcgtgtcactgggtgcgccctgrgggggcgtggccaagaccctgcgcgtcctggcttcaggtaagaccctacctggcccagcgtggggggctgttgccaggaattctgccctctcttcccttcctaagtgtcctcctgggccagcatgcctcgtgtctgtcccacggtgtgtggggtctatgcaaatctacccctaaaagtccaaagaagaaagaggctgacaaatctagtttctcagagaaaagcatttaatagggacatacgaatagaagccacatctgtgtctcaggtgggggcaagacaagatggtggatccccacactattagcccccagacccagagcttatattctgtagggaaagggcractccgatgcgatgtgttgaacattgaaggatgataacacagaggctgttttgatttatggttaagtacgtgcacaagaaacagtagataaagtggaaatctcagtggccttcctggatctggggttaatcagaagccaacatggtggattagtatccaaaatggagttgctttggtctccacaatgactattctcttgggtcagccctgttttttttttaatttttattttttgagacagagtctggttctgtcacccagactggaatgcagtggtgcaatcttgtctcactgcaacctctgcctcccgggttcaagcgattctgcctcagcctcctgagtagctgggattacaggtgcccgccaccatgcctggctaagttttgtgttttagtagagatgaggtttcatcatgttggccaggctggtcttgaactcctgacctcagatgttccactcgcttcggcctcccaaagtgctgggattacaagtgtgagccactgtgcctggccatccctccctcttaccccatccttacttcttcatccccaccttcaccgcagaggaggaaggctagagcattttttttttttttttggaggcagggtctttctcactctgccatccaggttggagtgcagtagcgtgattttggttcatgcaacctccaccttccaggttcaagtgattctcctgcctcagcctcccgggtaactgggactacaggcgcgtaccaccacacccggctaatttttgtatttttagtagagactgggtttcactatgttggccgggctagtctctaactcctgacctcaagtcaggaggatctgcctgcctcagcctcccaaagtgctgggattacaagcatgaaccaccgcacccggccagatttttttgtatttttagtagagatggggtttcaccattttggtcaggctggtcttgaactcctgacctcaaatgatctgcccaccttgacctcccaaagttctgggattacaaggatgagccactgcacctggcctctagactacagttttttatttatgagttgcgcctccatctgtgggcagcacggagcctctgtaggcaacacagggaggaagcaggtgcagatctggctgggcctgcttgcctggcaattgggaaagccaccccttttatggctcctcccccgtcttttcatgactgttgcagctcaccagctgcagctgtagagtagagcttcttcctctagaagggagctttcctccctctgctaggacttgggggaggcttatggaccctcactttgggagctatgagccagggctgtgccaagcatctcatgagctcaagtgcctgccactgcttgacctgcttggtctactggcattgtgattgggtcaggcccagtgactctgagttggctggaagacactcagatttagtgaggactcattatagccaccacttcggtctagcctgggcctggagggacggatgtgggcataccctgagtttagacaggtagccccggcccctttcagagtttctctgtgagtccccttagagctttgtttcaaaggctgggaagctgttctgtcctgccttggcagtccaggactgggtgtgtggtgcggggaggtggaagtccgtgcacccctaggggctttccttgcctcaggggtcccccagccaggccacagcaggcagagctgaggccctacagtcagtctgagaggcctccctgctttcagatacagggtggggtgatgggtgaccatggatcctgaacaggccagaggcccctgttcccaagttgcagcttttacttcctggaggcctccctgactgccgggtgtttgtgttgttcacattcctgtgtatagggactccgcctccatctgcagcctcccctcgtgccctgtctccagcacgcctggctgcccaggtcagcgcacatgcaagtgggtggaatgaggccacggctggctgaacgctggtctgagcttaggaaaagaaaaactggtacacagttcagtgtcataaaagggaaagcagaacatgtcatctccgagttgccaacctgctgactcactttagactaggtcagtgcccacaggcctgatcagcacttggaggatggtagagtttacaggcaaggaagcatcataaatcaccctgtgggtatgtgccgccttactccctggtgaggaaagcaaaaaaaacaaaacatagcttggatgtgtggttcccagatgtagcaaaaataaagagaaacaataaaagccaaggcaagcaaactgggcaacatagcaagaccccatctgtataaaaagtggaaacatttttagcccaggcgtggtgggacgtgcttgtagttccagctatgcaggaggctgacataggaggatcacttgaacccaggaggtggaggttgtagtgagccaagactgtaccactgcactccagcctgggtgacagaatgagaccctacttcaaaaaaaaaaaaaaggaaaaatttgccaggcatgaggcatggtggcgcatacctgtagtcccagctactccaaaggctgaggcgggaggattggttgagcctgagaggttgaggctgctgtgagccgtgatcatgccattatactccagcctgggcaacagagtgagaccctgtctcaaaaagaaaaaaaaagagccaaggcagggatgggagtcacagtgattacaatgatgataaccgggtagagatgcgggactgtggactgggcccctggctggggtctggcaggggcctggtggtgaacatgctgcccaaccagctggcattcctaagcacagactgaccagagccttctccctgcaggagacaacaaccggatcccagtcatcgggcccctgaagatccgggagcagcagcggtcagctgtctccaccagctggctgctgccctacaactacacatggtcacctgagaaggtgttcgtgcagacacccacaatcaactacacactgcgggactaccgcaagttcttccaggacatcggctttgaagatggctggctcatgcggcaggacacagaagggctggtggaagccacgatgccacctggcgtgcagctgcactgcctctatggyactggcgtccccacaccagactccttctactatgagagcttccctgaccgtgaccctaaaatctgctttggtgacggcgatggtactgtgaacttgaagagtgccctgcagtgccaggcctggcagagccgccaggagcaccaagtgttgctgcaggagctgccaggcagcgagcacatcgagatgctggccaacgccaccaccctggcctatctgaaacgtgtgctccttgggccctgactcctgtgccacaggactcctgtggctcggccgtggacctgctgttggcctctggggctgtcatggcccacgcgttttgcaaagtttgtgactcaccattcaaggccccgagtcttggactgtgaagcatctgccatggggaagtgctgtttgttatcctttctctgtggcagtgaagaaggaagaaatgagagtctagactcaagggacactggatggcaagaatgctgctgatggtggaactgctgtgaccttaggactggctccacagggtggactggctgggccctggtcccagtccctgcctggggccatgtgtcccccctattcctgtgggcttttcatacttgcctactgggccctggccccgcagccttcctatgagggatgttactgggctgtggtcctgtacccagaggtcccagggatcggctcctggcccctcgggtgacccttcccacacaccagccacagataggcctgccactggtcatgggtagctagagctgctggcttccctgtggcttarctggtggccagcctgactggcttcctgggcgagcctagtagctcctgcaggcaggggcagtttgttgcgttcttcgtggttcccaggccctgggacatctcactccactcctacctcccttaccaccaggagcattcaagctctggattgggcagcagatgtgcccccagtcccgcaggctgtgttccaggggccctgatttcctcggatgtgctattggccccaggactgaagctgcctcccttcaccctgggactgtggttccaaggatgagagcaggggttggagccatggccttctgggaacctatggagaaagggaatccaaggaagcagccaaggctgctcgcagcttccctgagctgcacctcttgctaaccccaccatcacactgccaccctgccctagggtctcactagtaccaagtgggtcagcacagggctgaggatggggctcctatccaccctggccagcacccagcttagtgctgggactagcccagaaacttgaatgggaccctgagagagccaggggtcccctgaggcccccctaggggctttctgtctgccccagggtgctccatggatctccctgtggcagcaggcatggagagtcagggctgccttcatggcagtaggctctaagtgggtgactggccacaggccgagaaaagggtacagcctctaggtggggttcccaaagacgccttcasgctggactgagctgctctcccacagggtttctgtgcagctggattttctctgttgcatacatgcctggcatctgtctccccttgttcctgagtggccccacatggggctctgagcaggctgtatctggattctggcaataaaagtactctggatgctgwaaggtgccctggcctacattctgctctgagcatgaggggagggaggtggtggaggtacaaggtggctacagaggcaggaaattaggggctgggcctttacaggagccttgacaggttgtctcagcatcaaagcatggttcctgtgcccttctgtggacctcatcctcctgtcctctctcctggaatccagttcccttcctgggactaagaaccagaacctgaaacattcctgtggaaatggggtcctgtcctccccctgctcctgcctggtcagcaggccccacatgccacccaggagctgggagcaaggacagtcctgcaggtcaccctggctacaccctccttcccagcctctgtcctccctcagcttgcaagtgtcagcatcctttgaacctagagttctttttaggatgccacccttctttgcatcttcagctcatcagcctgccatctgtacccctggggaggtacagatgagagagatcaagggaggaaaagagactactaggctgagactggtatggacaaagacagaaacagagacagagccaaggaaacatggataggggatagggtcccagcctgaattttgtagtccagagcccagccggtacccagttctgtcttaactcagccccrcaagctggggcgccagactttgatacaccaggggccacaagagggcgccctgaaccctctcactgaaccacctgttagccaaacctggaaggacgaggtgacccagagtgggggtaaaaatgcctgtggtaaaaatactggggtccagctgcagctctggcctcagtaaaaggatgacaacatgaaagggagcttcaccccaggccctgcccaacctgactccctgcttggccctgacacccccctactcatggcaccccactcatccctgacccattttagcttcaccatcaccctcagtttcatagctgcagagagaaagggcatggaatcagaggaggcttaaggatcagcatactagggttcaaatctcagctctactagctccagccaagttgtctggggagcctcctgaccctcagtttcctcatccaaagaatggggacatctgggtgcattggctcacgcttatagttccacctactcaggaggctaaggtgggaggatcgcttgagcccaggagtttgagaccagcctgggcaagactttatctctaaaggtgaaataggccgggcgccatggttcacgcctgtgagcccagcactttgggaggccaaggagggtggatcacatgaggtcaggagttcaagaccagcctggccaacatggtgaaaccccatatctactaaaaatacaaaattagtcaggtgtggtggcacatgccttgtggtcctagctactctggaggccgagacaggagaatcactggaacctgggaggcggaggctgcagtgagccaagatggcaccactgcactccagcctgagcaagacagagcgagatacatctcaaaaaaaaaaaaaaagatgaaataaatctgtagtcccaagtaggaagctgaggcaggaagatcgcttgaaaccaggagtttgaggctgcagtgagctatgatcacacctgtgaatagccattgcactccagcctgggcaacagcaagatctctaaaagcaaaagaaaagaatggttacaaataaatgtatcctgcagggtggtcctgaggaacactgatggtgttggagaacatctgattcagggtgtggtgtacattgggctttcagctgatgggctacgtaactgggtatgagactgcaaagccagacggagctggcatatggtgtttttttttttttttttttgagatagactttcgctcttattgcccaggctggagtgcaatggcgcgatctcggcttactgcaacctctgcctcctgggttaaagcgattctcctgcctcagcctcctgagtagctgcgattacaggcatgtgccaccacactcggctaattttgtatttttagtagagacggggtttctccatgttggtcaggctggtctcgaactcctgacctcaaggtgatctgcctgcctcagcctcccaaagttgtaggattacaggcttgagccaccaggcccggctgagccggcataccttatatgaagctgtggcagggacaagtgggctgggtgctgacacaagtgtccagagctgtccttctgctcagccagggaggccggaggaactgatctgggaggcaaagggtgcaactcgattgatccaaatatatacgtccactcactgacacttaggggaggggttccaagcagagggcaggagggcagcaccagcgaggattcctcaagtattgtcatcccaggcctgcagagaggagaatggaagggttttaggcaggggagatacaaagtcatcgcaatctgtattctaggagcatcccctactctgtggagatggggtaaggggagcaggatagggattgagaagccgttgtggctggggagaagaaaacgaggtataggccgtgggaggagtggggaggaagggtctgaggtgctacccatctctggctgggtccctgtcactgggtggcagggagcagggtcttgggtatggtctggaaccagaggacgtgcacttgtggtcataaggctgggggaaaagattccagggccctggagaaagtcagtgcttgaggtgtggacaggaaatttcggaggagggctcaggcgcccatgaggtcaggaggctctagacagagagccccagagccaccagaggaaaaggaactcgagagaaagatggaggagcaaacagagggaggggaagggggcaggaggtgcagctcccccaagagggggggcaggaggtgcagctcccccaagaggggtggcagccctcttgggaagatgaggacagagccccagggaggcctggggttggcaaagggagcctgcagtttctttgtgggtgcgggggcctcaagggctacgagtctgagctgtgcgtgtgtttggacaagtccccagagtgtgtgtcttcctggggttcctagactgcgagtggcagtsgcccggcggcggaggccgtttggatccctgtgtgagctgtagggggcgccctgggcgtcgggcccaggtcaagtgcgagataggaacggggtgcgggggccgatgagagctccccgcgggaatgtccgctgtggacgccctcggaggccccatctaactccagggcggagagcgtggccgggcccagttcacgggctgctcgagccctgacgaggcagctgggggctgtctggcgtccacgctcacgttctgggccggcggaccccgtaccggccaggccgtggcggccacgggggcccggaagcgccgccgccagctggccccgcacggaactgtgtcccgacgcggcgcgcgctgtcgcgatccggcggcgggtgacgtggcggggcggggcctgagctgccgcgcgcggcggcggcgcgaccgagcatcctggcggcgccgggccactgggaggtaacgggctgggccatgggcgggcgcgccgggagcggggccggggctgggccgcgttctgtgggagccgaaccctgtgggtcttcgctgccgccgtcgggagcgggatgcggcccagaaacagcgcggggctggccgatcggggccgcgcgagaggcgctgcgggtgagggggggcgccacgaggagagagggacctcgagcgtgagggccgagtgtgggagaaacgctgtatgggtgcgagccccggaggctgatggtgaccgcgagggagccagtcttggggtgtgctggcgacgcggcgagtgtgagggagaccgggggtgtgtgtggagagggaaaccccaggtgcgagggtgaccgggacgctgagtgcgcgggccgcgccgcgagcgtgagactgtgcgacggtgaccctgagtggggctgtgactgcgcctccgactgcaggacggagaacctgtgctgtgtggcggccgcggtggggcaaagaaagacgcgggctcaggacctcaggagccaggcttcctggggctgtcgcaagaatgacgattatcattttaaaatcagtccttttactttagagaatgccgcaaggttttgtggcgtgctggagcctggagcgttgggctgctggcgctggggaacccgcgtgcccctggtgattatggctcttttgagcgtccctatagcctgtcatcttgtgtgactatctctcctgaatgtggggagatagacgtgaaacattctgaaaattctttgctgggctctaagcaaacatgttgtgtaatggtcagtataaataggaatcagggtgtcggcgaacacgtttttgagtacctcttgtatgccctgggcttggtgacacagttaaaaagaattcagtctctgcccttgataggggaaaaagccagggcagctcatctcgcagggcggctgttcagtgcccagccatccggggcttgtctctcagaactgctcccagatttcagatctgggaggagcagacttgaaaggctgtgagtacttccttatatcagttccacctctttttggtggcggtgaggccttttggggacctgcccaggctgcctgcattactcaggtcccatgtgtgctgcgcagacggcttttgcttcccaactttgatctcagatcgttattcaagtcgttacactggagtttattttcctggcaagtgtgtggaaaaccaccagcctgattttctcctctcttcctctccttgtcctccttccctatttggccgtggatgtatttttattgcatataccggttttatgatccccatctccctggaacttcttagtagaagaaatttcctgacctttgtgcttcctgctgtaatttcttggatgtatattagtttctaaaaaagttatgcaggccgggcgcggtggctcagtcctgtaatcccagcactttgggaggccgaggcaggcggatcacggggtcaggagatcgagaccatcctggctaacatggtgaaatcccgtctctactaaaaatacaaaaattgagccaggtgtggtggtgggcacctgtagtcccacctactcgggaggctgaggcaggagaatggcttgaacccgggaggcggaggttgcagtgagccaagattgcgccattgcactctagcctgggcaacagagcgagactccatctccaaaaaaaaagaaaaaaagttatgtaaacggtgcccacgggacctggggccccagagctgcctagacttacatgatttaatgtgacaaggccagttctctgacaggtttgggctggctacttcagttatacccaccctgtgggtgtcatggaacctgctagtaattaggactgcccctgccgggcatgtaaaatttagattttacaaggaaatatcattctgctgctttcttggttaattaaaaataattacatatatatatatatttaaatcagctttctcaggttaaaagagttcattttttgatcagttccctcccactctttgttgcagagtttatgtggccgaggcagacaagtggaattaggccttgctgcaggggacttcatttccttctcagtactggacccatttatgaggaggtggcttatgaaagtgtgatgttcgcgtatttcttgacaggtgaatattgttgcgctgtcttttcttttgtttgtgtgatttacaaagagtttttacttgtatacagtgtgaatacaatactagtaaacagaatggcttacacataattaacaactctttagtattacatattaaataacactgtaatttattataaaaataaattatacatttatttatattacaattctttataaagagtaattgtggtgggttttttctttttttttggagacagtgtctcactctgtcacccaggctggggtgtggtggcgcaatctctgctcactgcaacctctgcctcctggattcaagcgattctcctgcctcagcctcc

SEQ ID NO: 95391 - DNA, 160145 bp, Homo sapiens
acaattaaatggtttttggtatattctcagagtttgtgcaaccatcatacaataaacttaggacatccttatcatccccaaaagatgccatgtacctttttgatctcatcccctagtctccccatccctctcatcctgagatgacgaaggtttgtattttcaggacatggcacatgtgtttgcatatttgcatgtatgcacgtatacacaatcagcaactatggaattgtcagggggaagaagcagtatctgggaaatcgtgaccatgcaggatccaacgcagtgggtgaaatttccaaatgaaatgataatagaagggcttgataaaactccctactgattggggtcagagtagtggtggagaagatgaagcccttacaatcaattaggaaaagcaaacaaaagaaagtcatgattaagaactcaggtttttggagtggagtgtttgagttccagttccagctttgttatttattagctatgtaactttcagtaatttatgcctctctttacttgtctgtataatgtctactcttctccagaggtcatggagctcataggcacacatggttgctacctaaaatgagacctacaataccttggtgggggtggattgcagtgtctggtcaaggagtctctgcagggcagagtgagagagggtgtcttcaaacataccttttctctgggggtagtgtccttgggtaaggcttactggatcccttcaaggctctagagattggattttctggatttgacatccaatccctccttttggaggtaagtactcagactagatgggaaaagaccttctggagtgaaaggccaccatggggcttatgatatcgtgatatactaagaaaaagatatttggtccttgccttagtccattttgcattgctataaaagaatacctgaggctgggtagtttctaaagaaaggaggtttgtttgcctcacagttctgctggatgtagaagaagtagaagcaggtcaggagattagtgggtgtagtactctgaatactccagcttttccactctttcactcttgccatttcttccttttttttttaattattatttttttcagtggcagagtcttgctatgttgcccagattgrccttgaactcctgggctcaagcaatcctcctgcttcaacctcccaatgcacaccaccacacctggctatactcttctcatttcaaacaacaagccctacccgccttttcccaaactgatactcattattcctgtttcatacttgacaatctttcattgaaaagtagaaattccagaggtcatgacattttattgagtaccttaacatttattgaaaggctgttctaactagtgattaagaatatgggctttggctgggcccactggctcacacatataatccagcgctttgggaggctgaggcagaaggacggcttgagcctaagttcaaaaccagcttgggtaacatagtgacacccttgtttctagtaaaaaaaaaaaaaaattaaaagatttttaaaaaagaaaaagaacatgagctttggagtcagatgtatcagtatttgaattccagctccatggcttcccagatgcagtctttggtaagtaacttaatctcagtttcctcatctataaaaatgggggtagtaataccaacttgaaagtttcctgaacattaaataagacagcgaaatgccttcttaaatagactaagaaggaagttggtaaatggtagctaatatttccacgctgctctatttctttcttggtgccaagtgttttacatacttatcaacccaataaatgggcataattattctcattttataggtgaaggaattgaagataattcagtggggcatggtggctcatgactgtaatctcagcactttgggaggctgaggcagatggatcacctgacgtcaggagttcgagataagcctggccaacgtgacaaaaccttgtttctacaaaaagaaaaaacaaaattagctgggcatgatggtgcctgcccatagtcccagctactcgggaggctgaggcaggagaatcacttgaacccagaaggtgagaccacgccactgccctccagcctgggtgacagagtgagactctgtctgaaaaaagaaaaaaaaagaattcataaagtgaaatagatatattagctatactgcagatgaagaagaggaagcatgaagtatttaaataactcactgatgtctcaaagtggagcaattatagagcagggatccaaagccatgtctatttggtttggaatttgttaaattcctgatatttggcaatttgctgttagttgtcatgcttgacaggttgtgatagtcatggtgatgtttattagttgcattaatttttaagaatcaactttggtcacagacctgagatacgtgcatgactattgcaaataaggacgagagtcccaaatgttagggaaggggatagtcctctatgttgcattttttccatcaggctctatgcctttagaaacaatgggtggtcctttgttttcttctataacccaaacaatctatgattatctttctgcagctgtcctagtcaattatcagtattatctgaagttatattattttaaatagcactgtcaggagctctgtataactgctttctctaaatttaccatctattgatgaaccgacataaagatatcaaaacaactggagaccaatattaataaacagtaattatataattgcaataattgcaatggttgatctgtaaatacaattgtgagtttcctagtgttacggaacctttgaggtgtcgatttcctggccagaaacctctgtggctggtggcacctttgccagagttcttgtcctgggtccaggaagaatgaggtatgcagacaagtggagggtgaacaagacaaagagaagctttattgagcattaaaacagctcggaggagacccgcagtgggtagctcctctctgtaggcagggtgtcctgaagtctgcccagctcctaggagagaggaggccctggagagggtagctcctctctgcagctggttgtcctaacatctgcccagctcctagcagagaggaggccctggagagggtcactcctctctgaagctggtagttctgacatctctgcaagtctctgaagctctcagctgagagggtagctcctctctgcagctggttgtcccatcatctgctcagctctggctgagttggggattttatgggcctcagaggggagcaagtgcctgccgctgattggtccatgggcagccatgggcaggctcggaaaaggcaccacaagttcccactctggttcatggggctggcagcccaacccccagccttcaggccctccttggccagaagctggggcctcactggggacccacccccttctgcccaggagtctgtctgcctcccactgccattcatggtgcctgggttcagcctcaactttgctccaagaatggagcaggtgccaacagcagggagaagccaggcagcaggagcaggcatttctgagcctgtgagggcatgcagggccttcctgggcccccaagagtgcagggatgcctggggctgcagccgtggtttgggtggctacagctgccctcggggagggcagggctcctgcctgctcctggccccctaagagcacagggaggctcagatctgcagccacaccttgggtggtgcttctgcctgctctgtggagcaggaggccccagtctgcagctgtgctgcagaggcaaccagggagttcccaccccaactcagaaggggtgggtctcccgcttgtccctggctcccgccagagagcgtgcagccctggccatgcctccctgctgcagcagtaggccgtctggagcagccgctgccatctctagtacagtaattctcataattttattttgccttggtatccattttgaatatgtttaactttctcatatgagaagcagggctcaatcacctttgatacagtttccagttctctgcttcctcccagttcttcaatgtgatccatccagatatctgcttaatgcaactgcttcctggtgaccatctccctatgggacaggtaaatgcagcctgcttgactcacctgttgacctccataacccacatggactgtgtagatgggctccagtgaccacctcacagtgacagggtgactccatggaacttgtgcctgcttgttctaaactcaccaattagaacttccatgggaaactgcttgggtaacacgctggaccccaacagaggctttagctccacaagtgccccttccttgacccccttccactggctgaactccctgtcacctccagatttaccctccctctggtgaccacaagaccaaattagaaagaaaccataacaataaaaatcacaacacccagcagtcaacatgtacatcattatcagaaaagaggaaagatacaaaggaagcaaagttttccttgtagtaaacttcaggaaaattttcctgcatggaactttacaaaagatagaataaaaagtgggctgtgcatggtggctcacacctgtaatcccagcattctgggaggtcaagttgggtggatcacttgatgtcaggtgttcaagaccagcctggccaacatagaaacacccatctctactaaaaatacaaaaattacccaggtgtggtggtgtgtgcctgtgatcccagctactcaggaggctgaggtgggaggatcatttgagcctgagatgcagaggttgcagcgagaggcgatcacaccactgcactccagcctggccgacagagccagaacctgtcaaaaaataaaaaataaaaataaaaataaaagtgccttcaacatcattttacagcagatgcagtaatggaattcagtctactttttgtttctacattggataaaagttgaggacataatgaaggatgttttgcttaggactaaaaaatacaagaaatttctgtggcactagacgtatgctcatagcagcacacttttcaaacagtattcttttttttttttttttttttttttgagacagagtttcactcttgttgcctggactggagtgcaatggtgcagtctcagctcagggcaacctccgcctcccgggttcaagcaattctcctgtctcagcctcccgagtagctgggattacaggcgtgtgccgccacacctggctaattttgtatttttagtagagacagggtttcaccacgttggcccggctggtctcaaactcctgacctcaggtgatccacctgcctcggcctcccaaagtgcttggattacaggcgtgagccaccgccccctgcccagtattcttaaatgcaagctttcccattagagatctgataaaagctaggtagcattaattatactgcaacgtgctttgatgagtacctacacactaaattgatatcccgagtttctggaagagctacatactctaaatcccatctcagcgtatggcttgtttgaacccctgtaagactctttccgtccaggaagggccatgggacatcggtacgagtgggtgggctggagaaagaactcctttgcctgtttgctgttctcatccttttcctgaacgccacgtagtaaacatcatttatgcttatcagggacgctaaaccaacaacctgagatccataagtaaggcagtgaccaacgatgggctgccacactttcagccaacttgaggagacaaaacttttttgttcacttttgcagcttacttaacacaggaccgcagggcatggtccagggagtacggggagataattccctccgggtggttcttatagaaaagtcttccctgaattattccatagccttggaaaactactttctttccttttgtattggacaaaccatccaatctcgcttggagaatggggcaaggcctcgggtcaccgggcttcggcggggcagtgaggggcgggaacacggctccggagggcggggccaagccggagcgaggcggcgggtccggacgccgtgcgcgtgcgcgcggcaggtcggcgccgggcgggggcggagcggccgtcgcaggtccacgccgtaaacagacaacatggcggccgcggtggcggcggcacctggggccttgggatccctgcatgctggcggcgcccgcctggtggccgcttgcagtgcgtggctctgcccggggttgaggctgcccggctcgttggcaggccggcgagcgggcccggcgatctgggcccagggctgggtacctgcggccgggggtcccgccccgaaaaggggctacagctctgagatgaagacggaggacgagctgcgggtgcggcacctggaggaggagaaccgaggtgaggtgcgaacgctgggcaggcgcggggcagcgggcggccgctcgctctcaggacgggcataaggtgcagcgtccgccggcaggacgcggggtcgaggtcaggcaggcgcaccgaacctgggtccctcccctttctcacctccctactcacccagcgtggccgcttccttgtgcacctatttcttgcttttaataacctaaacgtgtacccccgagcagcttacctgtaaagtgaccgcattcagcgcggcaaacagaagtgcagcttacgccctccgctccagacaagccaaggtcaatatataccctggggatttaatccttgctaccaggctttattgttgctgtgtaatggctttctgtaaactcagctattagtggtggagttgtaaaagctgcggtgaaactgccttttattattacggagaatcttaaatttgaagctgctcagctggaacaatttttcctcttgttcattttctcttagaaagttagtcttgagggactgttccacttcatttaaacaattttgagcactttttattttcctcagctctggcgataagaatgtggatggtatggatcttgcccttgagctaccttctacgggaggagacatcattagcaatacaatacagagctttgaaggctttgaaggaggctgacaatcctagggaatactgttacagctcagttcctttcactggcagtgcagggaaaagctaaaagggtcgtgaagggtggaatagcagtttccacccttaacctccgggttaagccagaggaccagtgttttaattttgacatgcatttgttgagcacctataatctgttaagcagaagtgaaaagcgtgtaagtcgtgattggttttagtgtagtgaagcagatcctggttattagtaggctgtgtgaactttcaaggcatggtaagaggaaagggctgtaatacctgcagggtttcgccatttgaaaggggttccaaggcattctttaataggcagtggattttgccatttgtgagggttcttgggcagacttatctcacgtgtaaaacaggaaaaacaataccaactttataggtttgttatgaagatgagatgagattgttaatgtaaattgccactagcacgtagcagtgcttcaggagtgtgatgaatgactttattccttacttattattccagacagagacaagaacatggtcaaaggcatggagatgtgaacatgtgtggtgtatttgggacgtaacataaggcaagtgtggcataagcagaatagtaagaaattcagctggaagcatagactagcactggagtgattagagcctgaatgccatcatcttttgggtaagcttagtcatgccgggacttcacttccgttaagtgtaccaacaatatgttagatataaagggattgcaagtacagctactaatatgcaccatattctatttttttggtcgttatgacttgaatgcaattaaaggaatatttgtgcagaatgtctggacagactttaagttaggatctgaatggwcagaagagagaatatcagataataaaagataataaacgaaaatttttttgggtatcatggtttctttttttttttttctttagccttgatttcctgatgagataggacatacatcatggtttcttaaagttgaccccgcctcctttgagaattggcaagaatgacgactcaggcttggctaacattacctaggctttgctttgctttactgttgaaccagcaataagcagtgcaaagaaaaacatgaggtcaagggtactacaggtgaaggagtttcctgggtgcctttatttctcttagaggtgggtccaaaatttggtgctctcagcagcctctaaggaataggataactctcctagtcacaggagcctcaaacagcatgcagcactttaggtgggtgggggtaagtagtgcagaatacaccaggtctcatctgttatctgggctccatatttgtaatttgttgtaggaggcatagctctataaccaaatttccttttcttttctttttttttcttttgagatggagactgcccaggactttgaggctgcagtgagctatgatggagccactgcactccagtctgggtgacacaacaagaccttgtctcttaaaaaaaaagaaaaaatgtatgaacctatttatgtagaatagctccaacagaacatatgatccatttatgtaaaatagcaacaacaagccaaatggtaatatacaactctatttctgtatgtagatacgttgaacattttctggaaggttacattacatgtaactgtgataactgtggcttcttctggggaagggaatgagctggttctagggaaggaggactttcactttgagtgtattttttcattttgtataagcagaacgtattttgttttgtttttaaagtctcagcaaagttgttacattcatctttcagttgtgtgagctttatagagcaggattcatgctgtgatgtgaccttgttacagattcactgaagatttttgtatgttttgtgaaaagtcaggaaaattaaggttggcatgtgaacgcctaagcttttctgagtttggtaaactttctaggttatgtgaggaggatgcatgataattgagttcttgagaagtgattgaattgtgaattaaagtgagacagttataaaaaaaaacttttagactttgctgaataaagctaaggttttattccattttagaataccaaaagcctacagatacatttgatggtacagttgttacatattagataattcatttcagattgcagagctaatttctagctttttgaagtggaagtactcaaaacatcaagtctcagatatgggaccaaaattgctggaattaactgtgttagaaacattttgatggcactttacccttcagtaataatgtcagcattatcatatctagcagaaattatggtgaaacttttaatacttactgcatgagaggtgttcatgctagaagggaggttaattgggtcctcatgttgtaaattttacatgtatcatatcattcgattctaatacagtcccatggagtgtggaactgttagtatcttaatagagtaagaaactgaggatcagagaggttaagtaacttgccgaattcttartagagtaagaaactgaggatcacagaggttaagtaacttgccgaatagctagtaagcggcagactgggatttcatccccagcaatcacaccttagagcctgcattcttagcccttggacgttgtatcaacttggatgtctgaaaggcacttcagattcactttaattaaaaacagaaactcatgagctttactcccctccaccctcaccttggtagttttatgattttgtctcattaaatgtcatctttcatccaattggtgaagccagaaacctggtaaatactccttaacactttcttccagttaaatcagtcctcagtctaggcatcattaactcatttaaaatttttgaatagttcttgaatcctttcactttcctttatttttaccaccaccaatctcagccaaacctgttatctgttgattggactcgaattgtgtcttgaagctcccacccctgtctacttctggtatgatctccaagtatagaaactattcccccgccagttttatatgtgcatgtgtatatgtttatacctacgtaaactccttcaatggttattaggatgaagaccagactttttagaaggtctgtaaggatatttctggcttgtgctgacctctttactttcattggtcactctcttctccccctcgtaggttacaggacattcagtgggaccatgactagtttatgcttttcctgtttcctctgcctggcagtcagcccctctccttcactctcaccttgactcctacttatccttctaaccttcactgtctggggtaagctttccctaaccatctccttttgccccagaccattatcaattctggttacaagttactgtagcaccacttacagcttgtaaagcagtttgaatggattattaatgatatttatgattattaatgatttctatgattattaatgtttgtatttccctcctagactctagttccatggctgctgatcactatagtacgtactcagtatgtttgaatgaatggacacatctagtcttagctgcttgattttcttcctgaggaaactgaagcttgaacagtgtaacacagttttattcaagtatagagttagattaccacttaatagctgaaggaagttacttcacctctccaagtctccatttctttatccgttaactattgataaaagtagtgcccacctcttgggttgtggtggggattacatgagttaattcgcttaaagcacctggagcagtgcctgaggcctactggtggtagctgttgtcagtagtattgggacctacccaaagtcattcagctgtttaatacagatcctgtcagatagcagtcctttatgcttttctctgtactgagagcatttggaattcttgcaaatttactcttgtgagcagaagttcatctttatactttaaagaatgggtctgcacagtttcttgcacagcgaaggcatgtgtacattttgttgtcttcagtttagctcagttgcaaataagaaacatacccaccctgactcagtggaaggtatttctgatacactgtgaaaatttgtctactccaagaacaagaaggttagtagaggttgtgtagaactttgaatatcaaattaggatctttgaagttggatattttgaaataaataatgaaaggattttaagtaggggatgcattctatgcatagtactgtttttagaaaattggtaactggaaggaatgggaggctgggtttaggtgatggtctttgattaaaaagtggggcagttaggagtgacagctgggtttgtgggagagataatgaactttgttttgtataggtygagytggaagtacttcttggacatctaaatggaagtgccctcaggttaagtatatcagacagaaatcaggagagaagcttgggatagaattactgaaaactgtgtagtatgaacaacaaaaaaatggagatattaacaactggtcctagaaaaagcagatgctataatacctgcatgtgacaaggtttattagcggttactttggtatctacttgaagatgatgaaaccacattttaaatagtatcctttaacttaaaattttcactaataagtctagtcttccctctagtttgagttagtgatgtaaaatttaccaaaatgttgcaaattatcttggtgcttaagaagagatcgattgaagggaacgtgatgtcatgaatttctttgatttgtyaagttcraagctagctagatgtgtgatgtagagtctgttctctgaatgccttgctcactcaagtgcttgtactttttttcccctttaactaggaattgtggtgcttggaataaacagagcttatggcaaaaattcactcagtaaaaatcttataaaaatggtgagtgtaaagattaaactgtttgcttctaatattaagatatattattgtcatcaatgtaaaaatgttttgttttttttttctctttttcctcctatgcttcctatttctgtttagctatcaaaagctgtggatgctttgaaatctgataagaaagtacggaccataataatcaggagtgaagtcccagggatattctgtgctggtatgtaaatatgttgtattatgaaattaaactgtagtctgatttttcctcaatagtartctgttttccattagaatgttctttggtttgaaccccattaccaacaactcctctttgtctgtgttttactgattcacaagaaaaaaacatgcttagtctgtcagcattagaaagaagcttttgcaacatttagattgttttggaagttgaaaaaaaatctttgagccattaaaatacttgtttgtagtacctgtagtacatgtagtacaatgttgtttgttgtgtcttaattgtggccaatattctttagtttcattctttttttttttttgagatagagtcttgctctgtcacccaggctgcagtggcgtgatcttcgcttactgcaaccctcgtctccccagttcaagtgattctcccgcctcagccccccgagtagctgggattacaggcgcctgccacctcgcctagctaatttttgtattttgagtagagacaggatttcaccatgttggccaggctggtctcgaactgctgacctcaagtgacccaccatctttggccttccaaagtgctgggattacaggggtgagccactgtgcctggcccctagtttcattcttaaggattctcaattttttaaagcttcaatctctgtggcttctgccttaaaatattgcagaatagtgtgatatttagaaatatgcagtgtattttggcttttgataaggttttattgcctccttaatacatttcttaaaatgtaggataccgaaaagaattagttttaattccagttgagtaaccaaagagtgtaggtttattactcccagctgctagggttatggtgttatgcagtacagatttctgttttcacatttgtcaaatgtgagtaatactgtctgcttagtaggagtgcttataagggttttatgtatattttgagttctttgtttttttaaacaatgtgaaagacttatatcaagagaattaggattcttatgtctagatcatattcaccaggtgaatatgatcttgaggtaaaggagtataacacatgactgatggttgagaggttctctaaaggtcattggatggcttattgggaagatacagagtagctttagggtttttaaagaaggcccaattatatgaatttttgaggagtgatatcaatgttgtgaagacagattaacattttaaaaataagtgttagtggtcatcccggcattgtttttctgttggcagtaggttttataattattgcactatagttactggtggaattctttttattttacatattcttttgcagcccatttgttctagatttctgcattaggaatatactttgaaaaaagctttaatgctttagcacagtttgtggatgtctgttacagattgcctttttgaggacatgcaaaatgtcctcaaataatataccacatgctgtttattagaataacatgttagccttgagtactttttaacaagttaatttaatctatttactttgctttatgtgcttttaaactttcgtacaatcaggataatcttttaactcaagatttgtgactgtattttgtcaacaaaagtcagtgtcttaattatagaaaaattggggcatatcattctcttttagtaattcagtgtatatgatggaactgttctttcagatttctccgaaaggttttcctttcttgtttttttttttgagacggactttcacgcttgttgcccaggctggagtgcagtgccacgatcttggctcactgcagcctctgcctcctgggttcaagtgattctcctgcctcaccctcccgtgtagctgggattacagatgcccgccaccacgcctggctaaatttttgtatttttgctagagacggggtttcaacatgttggccaggctggtcttgaattcctgacctcaggtgatccacctgcctcggcatcccaaagggctggaattacaggccacacatggcctcttttttacatgtatttacatttataagctgaccagtaggtctgtcttttttttttttttttttttttttttgagacggagtcttgctctgtcacccaggctggagtgcagtggcacgatctcggctcctgggttcaccccattctcctgcctcagcctcccgagtagctggaactacaggcgcccgccaccaagcccggctaatttttatatttttagtagagacagggtttcactgtattagccaggatggtctcgatctcctgacctcgtgatccgctcacctcggcctcccaaagaggtctgtcttttaacatgtacatatgaaataaaattataggtaaataaaatctctttacattatttaaagaatatttaaacttacagcctatattagtataaacatcttaatcaggccacatttatcagttattgttgaggaatgtggtctttcacataattaaagctttaatttgtactccaaagtagtaatattaaaagaaacctctgctgggcgcggtggctcatgcctgtaattccagcactttggaagtcgaggtgggtggatcacaaggtcaagaattcgagaccagcctggccaacatagtgaaaccctgtctctactaaaaatacaaaaaattttctgggcgtggtagtaggtgcctgtaatcccagctactcaggaggccgaggcaggataattgcttgaacctgggaggcagaggttgcagtgagccgagatgacgccacctcattccagcccgggtgacagtgtgagactccggctcaaaaaaaaaagaaacctcaaaaacacagtgtaccgtttattgattatccttttagcctcttctccatcccttgaaagtcatcattttccctcttctttttcttctcccacaaaggtttctctgtatatattaatactgtattccagtgataccttgctcatttctaaatatttaaagcttagcaaatggtcttgcctcaaatttcttgagcataggaactcctcttattctttgagaatcatcttttacattctcagaacacagcaaacaacagggactcagcatttatttgctggaattaatcagcctttaaactgtgctttaattcactgatttttttcaggaatggttgggatataataagcagcttctctgaattgtctcataccactctcctatttactgatagtaaatttggctacatcttttttctaaaatgctaggaaaacagataaacattaaagagattcctacattgcattggaggttgggccaagtgatttctgacttctcagaaatctattatttagcattattaagtacttcacttacattttaagttttttaatcaatttttagtttaaaaaagtagcatggtaggtcaaaatgtatgaaaatgtatacagagagaactctctctaaccctacttcctctactttattcatcccctaatataaataattattatttttgtcctagtattttactttattttatatatatgtatatatatacacaaatacagtcatgtgctccataacaacattttggttaacagtagcctgcattatacaatgctggtcccataagattatttgtttttatttttttgagacggggtctccctgtcacccatgcaggagtgcaatggtgtgatcttgtctcactgcaacttccgcctccagtgttcaagcgattctcgtgcctcagtctcctgagtagctgggatacaggtgtgtgccaccatgcccagctaaattttgtaattttagtagagatggggtttttaccatgttgcccaggctggtcttgaactcctgacctcaggtgatccacctgcctaggcctcccaaagtgctgagattacatgggtgagccactgtgcccagcctcataagattataatactgtatttttactgtacgttttctgtttaggtacatataaatacttagcattgtgttacagttacctacagcattcaatacagtcactgtacaggtttgtagcctaagagaaatatgttataccatatatcctatttatgtaggggatggtttcagggtgaaactgttccatctcagatcatcaggccaccttggcctgattctcataaggagcgtgcaacctagatccctcgcatgcgtagttcacggtagggtttgtgctcctatgagaatctaatgcggctgctgatctgacaggaggcagagctcaagcagtaatgctcccttgcctgtgctcacctcctgctgtgtcaccggttcctaacaggccacagaccagtaccattcatcaactcgggttggggacccctggcctataccatctaggtttgtgtatatatactcaatgatgtttatacaaggatgaaattttctaaggactctaccaggatgttctctttaagtgacttattatataccgatgcgctcattagaatgttaagtagatatttaaagtcatacatataaagacatataaatacgatacttataaagtgatatacatggagtgtggaaaataacctgttacaagcatagagagagttgtatataaaatgttatggccattattactgtagctgtgtaaactatgtctgtgccaataagttcatgggccaggtggctcacacctgtagtcccagcactttgggaggccgaggtaggcagttggcttgagcctaggagttcaagaccagcctgggcaacatggcaaaaccctgtctctccaaaaatatactaaaattagccaggcatggtggtgcgtgcctgtagtcctagctactcaggaggcttaggtgggagagtcgcatgagcttggaagatcaaagctgcgagccgtgattgtgccactgcatttcagcctgggtgacagagcgagaccctgtttgaaaaaatgaaaaaaaaaagatcatggattaaaggtgatattttttctgtcttcaaactttctgaaataacttcgttatattaacaaattatattaagcaaatatatgcaaagtaaataattttgaaaaatacaaagtatattagtgtatttttctttttttggaaactaaaattgggatattaactgagttcctaaattgttgttacaactttctttttgttttttttttttgagatgaaatcatgttctgtcacccaggttggagtgcagtggtatgatctctgcttactgcaacctctgactttcaggttcaggtgattctcctgcctcagcctcccgagtagctgggattacaggcacctgctgcaatgcccagctaatttttgtattttgagtagagacggggtttcaccatgttggccaggctggttttgaactcctgacctcaagtgatccacctgcctcggcctcccaaagtgctgggattacaggcgcgagccactgtgcccgacccattacaacatttgagaagataaattttagactaaaagagttcctatagaataattcagaccctttaattttatagaatccctgtgaagtgaaagacctggttaaaggtggtggcttagctgaaactacttctcttgacagttaggacagagttttctcttagactgtggtttctaatctagaacctagaaggaatatgaggtgtctctttaaagttcttaaaattttatacacttagacattttagtggccctacattgagaaggtgtgtaatgtcaaaatgtcattgttacagtaatgtattaaaatggatgtttctattaaccacagtaatatgtaaatacagataaaaatatgtcatagttgtcacagatacagacagtgtttcccatacataatgtgttttcacatggtgtgctataccccaaattttaatatattgttgatcgtgacattctggaaaagtctttctggttggccggctacattggatgtaaatgtgtgatcacagtcatacccttcaggttgggaatcactgttgtgtattctttcttgtagattagaacaccacttctgggttcatggcttgcctgtacttctcttagaatactaagaaaaataattttgttagtcaaagcttcttgtgaagcattggctacatggattatgtgagattggactgaatgtgtgctgcctccttacatattctaaaaactgtttaatcacttttagtttaccttctctctctctccctctccctctctcttctctctgtgtgtgtgtgtgtgtgtgtgtgtctgtctctctgccttacatacacacacccacacacacatacacacacacacaagtcaaaacaattctgctatttcaaaatgtttatgtagttaaaattttaatatttgccaatcacaaaattctaaagaagtctgattgggctgctgcgttggatgtaaatgtgaaatcaccgtcatctgtttatttttgttcttttacttttctaattcaaagtaacaaagtgcacatgcattgtttttaccagaacatttttgaaatgaaattttgtgagaaattactgagaatgaggattttttcttttgaaatttcctaagatatatgataaacaattcttggtaattgattgctatatgtagaaccctaaattgtttcactgaattacaccagtgtgggttttataaaaaagtaaaggtagttttgcttctgcttttgaattctagtaaattatgttatgactaaagagtgacttgtcactaaaattgtcaacatgcattattgaatgttgtgtgctgttcatatggataaaaatgtcatgatctggatagatgtgtgggcacgttggactatgaagtaacctggccgttgttgtttcagaatcttagattgtcatatttatgtatttaactgttagtccttcagagagtttgataagtaaygtgaagggatagataccacaaatttgtagtagtttaacaagtttgtattagtttagctatatagggttttgtttttttgttgttgtcatatattgtttgttggaataaaaaatgttttatttaggtatgaattacttggaataaagtttaccaatttaaaatgtataattgatgaattttgacaggtatttaaaccatgatcagaatcatgatacagaacatattcgttacttaaaaagttttcttgtgtccatttgcagtcaagccccttcccttgccctgatctctgaaagtactaatctccttgctgctcctagtttagcatcttctgtaattttaaaataaattgactcatactatgggtagtcttttgtgtctgacctctttcatttaacataatggtttgagcttcatccatattcatgtttcactagtttcattttattggcatgtattttattttattgctgagaatagtatttattgtatgactgtttsacggtttgtttattcattaggtgatggtcatttgggtttttccatcgtttggcttttatgcatcacttctgtgaccattcacacacacctttttggcaatgcataattttatttctctcaggtaaatagtcagaagtagaattactggttttatcctgtgtgtttagttttgtaagaaactgccaactgttttcggtatcattttgcattcccactagcaacggatgagagtttcaggcgttccacatgcttaccaacacttgataatatgaggtttaaaaattgtaggcatcctaatggatacaaagtcatatttcattgtagttttagtttacatttcatatgtgtcacctgtatatctgttttgatgacttgtttatttgaattttttcccaatgtttttcttagaatctcatctcattgagttgtaaggttttttttttgtttttttttatattcttgatacaagacttttatctgttatacttggtaagttttcttccactaaatggcctgtcatttttctgccttataatttgttttgaagaacaaaagttttttatgtgaagactgattttttaaaaatttacatattgtttcttttttttattatactttaagttctagggtacgtgtgcacaatgtgcaggtttgttacgtatgtatacatgtatgaagactgatttatcatttttttttccttttatggtttgtacctttttgtgaattttagaaattttgttttaccccacagtcagaaagattttctcctgttttctaatacttttgtagtttttatatcttatatttaggactctgaagtattctgagttaatttttatatatgttgtgaaagagaataaaaaatatatttggtctttgcccttgttcttggtacagagctcttaaaaccctgggagtttcctgaatggtccaagtgctttttgttgtgtaatgagatgaccctagatagcttcaggatgggggggcagcttgtcagaaaaagcagccatgggttagaggattagaacttttagcaccctctccccccagaggggaaaggggccagagattcagctcagttaccagtggccagtgatttaktcattcatgtctccctatggaggtaatgaaacctccataaagacccttaaacagcggggttcagagccaggcacggtggctcatgcctgtaattctgccactttgggaggctgaggcaggtggatggcttgagtttgagaccagcctgggtaacatggcaaaaccccatctctaccaaaacaaacaaacaaacaaacaaacaaaaaaccctcttaactgggtgtggtggcacattcctgtaatcccagctacttgagggggctgaggtgcaaggattgcttgagcctgagattttgaggctgcagtgagctgtgattgtgccactgtgctccagcgtgggtgacaaagtgagaccctgtctcaaaaaaacaaaacaaaaaatggggctcagggagcttctaggttggtgaacacattgattttctaggaggttggcactcctaaagagrgcatggaagctctgtactccctcttcccataccttgccctatgcatctgttccattggtctgttcctgagttgcatatagtaaataaagtgttttttttttttttttaaattctgagtcattctagtgaattaagtaacctgaggagtttaggggaatccccaaatctatagctggttgtttcagacatatgggttgcccctgggacttgtgagttgcatctgaagtgagggcagccttgtgggaccccttaacttgtgggatcccactaattttggatggtggcagaatttaactgaattgttggatacccgcttgatgttgaagaattggtgtggaaaccctcagacatttggtgtcagaagtggtgttagaaaaaaagacgtcataattggtctcaggaatgggatttgctagagcatctcacgaaactcaggaaagtgctttatttactattaccagtttattataaaagagaaaactgaggaacagtcaagtggaggaggtacttagagcaaagttagggtggagggttgcagagcttccataccctctccaggtgtgycacttacccagcacatccatgtgttcactaacctgggagctccctaagccctgtttcagggattttttatggaggcctctttacataatgattgattacatcattagccattggcgactgagctcaatctccagctcctctcactccctgaaggtgtgggtagggcactgaaagttctaaccctctgatcatggcttgatatttctggtgaccagcgcctgtcctggagctatctaggggccctctaagagtcagttcattagcataaactcaggtttggttgagaagggcatgttaggaataacaaaagacactctgtcactcaggaaattctgagggttttaggagctttgggccaggaacctggaataaaaacgacgaagtattttttttatacacaggtggctttttttggggtttttgttttgttgcattttcaattctcccagcaccatttgtcagaccaacttttcccccattacattattttgggacctgtctaaaatatcagttgacagtatatgtgtgagttatgtcagggttctctgggtactttttttttttttttttttgcgatggagtctcactctgtcacccaggctggagtgcagtggcgtgatcttggctcactgcaagctccacctcttgggttcacaccattctcctgcctcagcctcccgagtagctgggactacaggggctcgccaccacgcccggctaattttttgtatttttagtagagacggggtttcaccgtattagccaggatggtctcgatctcctgatctcgtgatccacctgcctcggcctcccaaagtgctgggattacaggcgtgagccaccacgcctggccttctctgggtatttttaatgccaataccgcactgtctgttaccatgttcaggtcttagacatgtttggttaaatttatttctaagtttttcatatattttgatgttactgtaagtggcatttcttcttaattttactcccaattttttattactagtatattgctagtatattgatttttgtatattgtctttgtatcctgcaaccttgttaaatgcactttttacttctaggactcttttttgtagatactctggggttttctacaaaggtagtcaagtcatttgtgaataaagatagttttacttcttcctttcctatctgttcaccttttatttttttttatatatccattacattttcattatagagttgactaaaagcagtgtgagtgttcgtctttgtcttttctcaatcttatggggaaggcatccagtcttttactactaagtatgatgttagctgtagttttttcacagatgcagttyatcagggtgaaaagtttctttttatttgtagtttgctgaggcattttttttttttcatgaacatgtattgaattttgtcaaatctctttttggcatctattaagattctcatattatttttcagcctgtcaatatggtgaatgattgattgattatcaattattaacaattgtgtattcctggaacagacctctcgatcattaatcctttttatatactgctggatttgatttgcttaagttttttaggattttataacttttcataagggaaattggtttgccttcttttattgtaaggtctgtagttctggtatcaggatagtgctggtctcataaaatgaattgggaaatgttccttccttctatttccctgaacaagtttgcatagttgttattatttcttacttaattgtttggtaaaattcaccaacgaagtcatttggtctaggaagtttctttgtgggaagatttgtaactatgaatttgatatctttaataaatacagggctacttgagtttcttctgtttgaaaagtcaaattctgtaacatattcgaagagatttattctgagccaaatatgagtgaccagccccaggagatcatgagaatgtgtgcccaaggtgttcagtctacagcttggttttatacattttagggagacataagacatcaatcaatacatgtaagatgtacgttggttcagtctggacaggtgggacaactggaagcagtgagggatagggggccttccaggttataggtagattcagtgatgttctgattggcaattggttgaaagaatttatctaaagacctggaatcagtgaaaggcagtgtcttagttgtggagaccaaggttcttattatgcaaatgaagccttcaggtgggaagcttcagagaaaatagattgtaaatgtttcttgtcagacttaaagggcctgttctgtcagtcttcaggtcctgtgttgatgttaatgctggtcatctgtgcctgaattccaacgggaggagagtataatgaagaatgtcctactcccactcccactttccatcatggcctgaactagtttctcaggttagctttggattgcccttggtggaggggagggtccatcagtcagttggcgaactcagaattttatttttggtttacatttctttttgagtgagttttggtaatttgtgtcttttaagttgagtgagttttggtaatttgtgttttatctaagttttcaagttaattgccataaaattgttcatattattccttatccttttactacattgaatctataatgatatctgattgattatttatttatttattttgagacagggtcttgctctgtcacccaggctggagtgcagcagtgtaatctcagctcactgcaacctccgcctcccgagtagctgggattacaggcatgcaccaccacacctggctaatttttgtatttttagtagagatggggtttcaccatgttggccaggctggtctcggactcctggcctcaaggccgcctgcctcagcctcccaaagtgttgggattataggtgtgagccactgtgcctggccgatgtctgattatttatttttgatattgatacattgtgtcttttttcttaaatactagcaaaacattagtcacttttgtttatcttttcaaataagtggcttttggtttcctttattttgcttttctttctattcattgatttcttcattattttcttctctctgtttgcctcgggtttaatttactcttatttctagcttcctaaggtggaagtttagataactgatttgaggcccttcttttcttatagttgacccttgagcaacatgagaggttaggagagatgacacctccacctgcacccctgctcccacccctcacagttgaaaatcctcctataacttgacttctcaaaaactgaactactaatagtctactgttgactggaggcctcactggtaacataaagggttgagtaacaaacattttgtatgttatatgtattatatgctttattcttacagtaaagtaagctaaagaaaagaaaatgttactaagaaaaccataaggaagagaaaatacatttactatcaagtggaagtgggtcatcacacaggttatccttgtcatcttcatgttgagtaggttaaggagaaagaggaggggttgtcttgctgtctcaaaggggtggcagaggtggaagaaaatctgtgtacaaatagacctgatgttgttcaaaggtcagctgcacttaaattttaatgttttcatttgagcacgtcagagatgccgttaaaaatgactcagagtactcgtgccctttctgtgtaagtaatgattgattggttgttgctaattcatttctgactctaattccattttttaaaaagcctacctgtataatattttaggatctgtagagattttaaggaataggaaatatatattagtaataacctgctgactaatctgcttccactcttgccctttccccacacagcagcccaagtgatcttaaaaaagttaatggatcacatcactctgctatttcagacactgttcagaaataaagtgtgtgggaggcagaaatgacccccaaagttgtccacgtcctaatgctggaaccttacatggaaacaggaacttcgcagatgtgaggaaggtgaagatcttacgatggggagattttcctgatgtatccactgggcccaatgtaaagacaagggttcatacaagagggaggcaggaggactctgagcaggagaaatgacaacaggaagcagaagttggagagaagcaaggaaggggccatgagccaaggaatgtggacagcccctagaagctgggaaaggcaagggagctcatcttccctagtgcctccagaaggaatgcagccttgccaacccattttagacttctgacctagaattgtcaggtaatccctttaagcttgtagttatttgtccagcagcaccaggaaactgataccaagtgtgtcaggtctcgcctactctggccacattgccttttcccaccaatttcccactgcctttcttactctctctgcttgacaaagctcattcttctctccaactcgttgtgctcagtgttctctttgtgttcagaaaggcctctgctctaatgtcatcttaaatagctgttccctcatcacttaaaccaaagcaggtctccctgcttcccccagcctccatcacatttttctattttagcttcatctctgaacgtttctgttcttgaatttattttttacttattgattatcagtcagcctcccccgcagataagctcctttcgttggcattaggacagaggcctattgccagaacagtgcctggcccatagaaggcacttagcaaatagttcatgggatgactgtgaaccattttggttgttgaggaagtaacattggcaaaatgtcatggttaaataaaacaagctttgatacagagcatgcgtaggtggcttgtgtggttaagaagagtgatttgttcttgagatattgtcagtcttataaatagaaggttgtatctagggtaccagtaaatttaaccagtggagattaaaacattagctttatgacttaccgttaaacctgtttcaaagatatggctttgatgtgttcccagatggacttcaagttctctctcccacctgctaccacaagggatgtcttggaggagcacagctgcctctgttggggtgagcagagaatgggccccccctagtgggtgggcagctggtcagagagcctaggtggttctctcagtcccctttctccaaggctgcccagttatgtggtgaggtgagcattgtgggcagtgggaggctggaaggggtccttcctgcaggagacccctcttgcatgaggccaggggagtggaattcagctctagaactttggtcagcttgagtagagctccggcagttagaaagggagacttcaaaagttagaaaaaattagatttttgtcagtctgcttctggaaattgatactcagtagtagtttgccttctcrgggctttctctgggaactggcattagtctagactgaggttagtaaattttgtgtgtaaaaggccagatattttaggctttgtgtgcctcttaacaatttttgtcacatattctttgttttatctttacaacccttagaaaagatgtaaaagctgggtgcagactggcctgcaggctgttttttgctgtcttctggttcacactccagttttctctgtttgttccrgctggaggagcaggggtcagttacactgggctttgcaggaagaagctggagaggcttggccatggaggctgtttttcttgacataaaaataaaaatgttcattttttcttgtgtgcttggtgagtgatctggaaacagttgtacaactcatagtttgagaagtattttgttcagtgatagtgtcatttgggtgaatgctagatttgaaggccagcaccaattaggatgatcttgaggtttatggttcttaaaaactccctgagttgaagtttcatttgaataatgtattgcttttcggggtaaaataaggttgaaagagatggaggtagtcaatatttttacattctctaaagaaaaaggcaacatgattaataccagtattatttactcattaaattttatattaatggatattatgtttgttacctttttgtgactgtaaacatttggtaattttttttctttagaattatgtgaaataactgtcaattggttttgttttgtgacagataggacacatgcctattaggtatctttcttattcagtgtggttttgctgcagaaggtagttactgtcctggaggatcagtccagctggacataggtgttgacaagttctctctattcctgctggtcatagcgtgaatgcctttcagctcagtgtaatctctaggatttgttcatttcatagctccctggttgttttttctttctctagtaattttctatgaattgggagtttactgttcagcctaagcattagggaaccctagtgcattttactggagctcttcctctgagaggttaccccacctttccatttatctgccctgtaaattccagccacctcagcctccctgcacgctgatctcgatcagcaagaccacagtgctttgttggggtacccctgccttctaccagtctgtcaggtgtcttcaggaagaaaacagggacagtcacaggatcccagatggtagtcttttactgcctgttgatcaatagctgagccatttcatatattttgagggaggggatccagtaccagttactccattgcagccacaggtgcaagttcttagttcctattagtggggaatggtattgaagaaccaagatctgggtacaacatgtgctcactgttacatgggtgtctttgcttctcaagacagacctaagaaataagtagataaattacattacatattcacacacacatgtttacaaccatttctgtacttacatgttgaaaaccatgagtttatattgttacctccatttccagtttatcaccacagggttcattgttaccttctccctttccatatttgtagtacctgcagtatattgactcatttgctcaatcctgtaacttactgaaagtaatttcagagttgctgatccataccactgtggtaaacataccttttatccagagcttattacctattgacagtacagtccctcacttaatgatggtttgacttagcgatttttcaatttacgatggtgcaaaagtgatacgcattcagtagaaattgtaaccccattttaagttgaggagcatctgtaaaatgcattttccagttgtgatattttcaacatcccatgagtttattgggatataaccccattgcaagtcaaggagtagctgtactttatatctttggactgaaggtatgtaatactgtaatatacaatactaaacatattgtgtgaagagttacttaggttatttctttattgtggttgtgttttattcattagaggtaatgttaggtttcctcactcctatttattttattttgatatatgaaatattaatatggtttcagaagtctaaactattcaaagagatataatcatagaagtgtcagtacccacttcctccctctaatctcttccctccagttcccacccttgagggtgttagtgagtctcattagtttctagattatccttcatgtttctgtctgcaaaattaaggctatacctatttgttcaactatttccaatctttcttatgctagtagcattttatatatattcttgcacttgagtttttgcagttaacaatacctcttcccagcactttgggaggcccaggtgggtggatcacctgaggtcaggagttcgagaccagcctggccaacatgatgaaacctcatctctactaaaaatacaaaaattagcagggcgtggtggtgggcacctgtaatctcagctactcgggaggctgaggcaggagaattgctggaacctgggaggtggatgttgcagtgagccgagatcgcgccattgcgctccagcctaggccaacaacagcgagactctgtccccctgccaaaaaaaaagtacctcctagaaatcagtctctgttagttcattaaaatgtagtgatggctggaagtgtatgagggatctatgagactttttcaggatggaggtgttactatagtttgcatgctgatgaaactaatctgatcctattgaagagggagaggtgtcatcacgtttcagaaagaagcctcgaagtaggccttcaagaggggctgagacgctggacagaaatggagggttttggttttggttagtgaaaggacacttcactttgaggaaaagtgacatctgatttattagagccttgaattctaatagaaatcctgtggcagaatagtccttttcatcaaatgggcaggtaaaattttactggttgagtttccaagatagaaattttttatttaattggagtaaaaggtgggtgcaggttctggatgaggatataagtgaaagcacttacaagttggtattcttattgaggatctagtgctctagaagctctgacagtagtcatgttataccaagaaggtcatgctccttaatctcacttgatcctctccagacattacctagaaactttctgtaatcattagagctaattttatatctccaccaatcaattccttcccttgagaacagatgtggactgaagcagaaccaatttgtaatcatttctaatatgtcatctagttagataatgagctctcacctccatctaacaaagcattttcacaaattgacttaaactataagcctgttaggattgcctgaatccagtcattttgaatttttctgaaattcctgtagtttactctgtttgccagctttatatatgggttggtggcctaaaacttcagttctgggccccatatccatgcatgactttcttgaaagaaagagaatactctgctgcaatccaagctggagcccttcaattgagcttgatttgattgcttaggggagtggaccatgctggttagctcaaactaaccatagtccactcctggatgtgggggtagattcatcttcttccaaagtatatggactgtggggagttgggagggcaccagaacaaaaggctgccatcaggaaataggaggaggtaagttggagaggatgttaaggtaaatggttagtattcatacctcttaagcatttttactgtaactcttcatcagatctcaactacaaagaaaacacatgaatttcattaattaattcatgtatttaatattttttagagagagcctgccatgtgtcaggtactgttgaggatatagcagtaaataacagagaaataatctctgctctgtgggcagtggggagggaccatcccattttgccaagaggatgtgcgatagtattgttggatctcatatgatgtttatatgtgaacatttacttgatacagcttgtaaatgatgtgttgaaggcccttgtgtatacaaaggtgataagaaggaaatagatggcatagaaatgaaaacaagtcattggcttgatcattctgactgatgtttataaatctaaaaatgaaagtatattgcaattagggagcaaagaatatggctgtcctctttaaattaagagccatcagtgttttcaaaaacattgcatttctacagtgcaagtccaagaagaaccagaagtagtgatagtaatgatgatctgctagagatgtatttgaaacctagattcagcttttataaacctgtgcaatccaggttcatttcttttttctttctttttttttttttctttttctggagaccgagtctgtgtgatggaggttcatttcttttttttttttggagaccgagtcttgctctgtcacccaggctggagtgcagtacagtggtgcaatcacggctcactgcaacctccrcatcccaggttcaagtgattctcgtgcctcagcctcctgagtagctaggtttacaggtgtgcaccatcacgcccagcttatttttgtgtttttagtagagacagggttttgccatgttagccagactggtctcaaactcgtggcctcaagtgattcacccgccttggcctcccaaagtgttgggagtaggcatgagccaccatgcctggccaatccaggtttatttctgtctgttaacaatttcgttcaaatgatgtagcctttttcagatgtgtttgtgtatgtatgtgagtatatatttgtatatttataatatgtatgtgtttgtatgtatgtgtgtgtatatacatatatatgcatatgccaggaaaatataaaatagcaacgtgggttttttatgtttaaatttttactaaaatttctaataaagttgttttttcactattatttttctttaaattgtttgtaaattgacctaaatatgaaataaagatctaaggagtccattggccccagctgatagagtgttggttacttttcctggtctactgagggttaatgtaatatacctttgtggacattcatccacagtggttgatggctaggcattcgtttcaggcacacatggactatttatgaaaattagccatctgctaggccataaaacctccacagatttcagaggacagctatcatcagaccacattctgtcaccacaggcagttgttagaagtcattaacaaaaaacgtaattagaaaaagtcccctacattgggaaatttaagataacttctaaataacttacagctcagcaaatgaatcttaatggaaattagaaagcattcagaactaaatgctaacaaaaaatactttaaaaattgtataagatagctaaggttggacttcaggaaagaaaaaaggctgaaaatgaataaactaagcatgtaccttaagtgaaaaaataactgcagaataacccaaatagggtagatgaaaggaaatgaagtgagcataaactaatgacatggaaaacacattaagtagtaaggataatagagcctagagctgcttctttgaaaagccaaatagtcagacttttggcaagattaattgtgagtgagggaaaaaatacacaatattcagattggaaaagggagccatagatataaattccacagagattaaactggtaagataatgttaagaatgtgcaataaagtcaagattttaggtggaatagataaattactagaaaataaaaattaaccaaaactgacttaagaaatagaaaactagtaataccagagcaatgtggaaattgaagcatcagttaaagatctttccacacagaaagcaccgggccacaatgacttcagaagaatgttacatttacacctaagcattcatggagcagataattccagtctttatatactctttgagaaaatagaaaaagagagtcttttccagctcattttatgaagctagggtacccctgacaaccaccacgtaagagcagcgggaaagaaaaacagactagtttcctggtcctagttggagatattccaggactcaggagaatccccgctttatccagatttgcttgcaggttaagatgtggatttagccacatggaaatcattggttatcttgacctgattatttggctttattggagagaataaaagcctgtttggagtgggatcaagagaccagggtgttcgaattggcaccacatgtacaaaaattggaacgattgaaatcatgactttaatcactgcgtaataaccccctacaattttgtgaagcatttcatcttttacttctgagaaaaatgcaacttaaaattaccatttctcattcactagattgccacaatttaataagtgtattagggttctccagataaatagtatcaatagaaatataaaagatttattgtgaggaattggctcacgggattatggaactgaaatgtcccacagtctacatctgcaagctggagacccaggaaagctggtggtgtaattcagtctgcgtccaaaggcctgagattcatgggagccagtgtaaatctagtccaagggcaggggaagatgagatgagatgtcccaactctagcagtggggcggaaaatagaggccagttccttcctccttcaccttttgttctattgaggccctcagggaattggatgatggctacccacatgggaagggctgcttctttgcagttcacgaattcaaatgctagtcatccagaaggacccttactgacgtaccaagaaactgtattttatctgggcaccctgtggcccagacaagtagacacataaagtgagtcatcacagcaagtatgacaatgccgtgtactggaggcagtgtgtggatgtgcagccactttgcattccatatgacctggcaactgacttctgactgatgtgacttaaaaacagagatcccctggctggggctgggatgtttctaggcctcaggaggtgcacacatctgtctaatacataaagggtctgtctaatacataacgtgtaccctgtcataaaactcttcaggctgaactggaggttccagttctctttctcttcatagttgcctcttccacaatggaaagttattcctgatctttgctttgttgctacagggaggggaaaaaagcctatgaattgccaaaaaagaggcctttaaaatattaatgttgagaatttcagctgagattcttattctggcagtttctggttctttgctttcaacatagtttgaagacagtttactagaattgttgggaacttgttagatgtttcttgattacgatgtgattttttcaccagagtgctaaaggaatgacattgctgtagtaaacatcttccttgtttatgtgaaaaggttttctcagcatgagtaaaattgatggtaaatcctgcctcactctagcagtaaataatactcattcatgaatatatgaaataatgagaggagggaaggtagtcccatctatctcattgtgatgcatgtctaataaaagtttatatttagtatttaatagttatcaaatttgaaatatatttttgcttttgtcagttctgtgctaataatacttgtaatgaaaattcaatccagaagaaaacttttaaacttggcactttatagggaatttaataaaaattaatttaatttgcatacacattttgttgcaaagaaatgtgacagaatgacaaataaaatattttaaagcacaaataccagttatatcaggaaaaaaaaaattgaaagcagagcaaaaataccagttaatgaagaaaggagataatgtaacattttttatattgagaaataaaaatgaaatgctaagccaactgacttggacaactgtgacctccttttggccgaggaaaatctcagccatgacaggatgggaggtcggacatctcttgtaataccccctccctggagaactgccattaggctttctttcctgaaggttaaacaaaccagccctttggaaagacttgctccactgctgatatctactgcctggtgctgcccctgccttttgtagttttaactgcttaccagcgttctttcctgataagagagcgagaaccgcagagtggttctgggaggtctacgaaggatgcacagtgagggtttttgtgtcctctgcttcacctttgacagcagagggctgaaaactctgccctcgggccatgctcacgcccccattttttgtacatgacccatgaaagtgcatgaagctcaattgtgcgcacgcatttctccttttataatattcatgactcttagaacttgttaaatatgtatattcagccacctcgttcatcataaattccacttccctttgcctttcccttgaagtgtctgtttctggcttctggccaraagctgtgctccccagcctgtcagtatggcacaagccgcaaccatttatgagaaataaaactctcctttccaagtttatgaacctcctcattcttcagtttacactttttaaggataggtttgtttgtatgttttatttatttttttgagacagtcttgctctgttgcccaggctggagtgcagtggtgcgattttggctcactgcaacttccacctcctggattcaagtgattttcctgcctcagcctcccaagtagccgagattacaggcacccgccaccactcctggctaatttttgtgtttttagtagagtcggggtgtcgccattttggccaggctggtcttgaattcctgacctcaagtgatctgcctgcctcagcctcctacagtgctgtgattccaggcgtgagccaccgcgcccagcttgttttaaatgcggtatgttttaatgcggatgattttgagaaccaaatcactgatagtgtaggttccactggattcattgaaaatggcatatgagttttgtttaaaaatgtgagtgttcatagtacattgaaatctttcaaactacttaaacttagatgaaaaatttcaaatgtcagcataaaaatgttcaaaggagcacatacttcaaaattcttttagcaataataggaacaaaaaggttgaagatcactggcttaaagcattagatctcaaggggacgttaacacccactgtggagccttttggaatttgagggacgtttttggctgttgaagagctttattgacatatggttagtgggggccaaggaagctagacatcatgcagtgcataacaragaatagtgtgttttcccataacttctctaaagttcattggagtagtttactgcaaatataagtatagaaatttaatacatactaatcctaaagaatatttaaaagaaggaatttattaaaacactgaaattttaggagagggccattatagtgggtggtgtttaaaatatatgttttctcaaaattgttaaataatgtatcaattccatgcgttgtctacttagtgtattatacatttccaactatatatttaaatgaaaagagtttgcagtagataatgcaaaagcaatacaagttattactggcaagttacatacaaatatgtaacaggagatataaagttcatttaaaatgtctgagaaccaggtattaaattattagatacacttgaaatacaaggaacatatgaaatcttattgaatcttattatactttctcttagaataatctctcctcagataaacctcattggctatgatactgccattcacaaagcttattatacattctcaaatagaatggtatttatgacatcgaatattgtgacatggtcaccacctttaatacccgtctgtactttcttcacctttttctccaaaacatttatccccttctatgtagattactaatttgttatgtttattttttactctttttgtctcccttgcttggagacagtataggaggagagcatgggaggcaggtcttctgaagagtttggcgtaaaaaggaggaaaaaattggcagctggagggggtagggcgtatggaatcaggaaacttaaaaaaaattttaactgaagtataatgtggacatacagaaaattgcacaaattaaaagcacataattctgtaaatttctacaaaatgaagtcccagcacaccacagtcgtcccacatgtcccttccttatcattacccatctcccacccaaaagacataggcaattattatgacttttatcgccaaatactaatattgcctattttcaaactttatgtagttggaattttgcaggctgatctcttccattgaacatatttgcaggattcagcctgtaccattcgtctaggagtagtgcagtcctgttccttgtagaaatatttcataatttgtgtcttctactgtttgcttgttgtttgaggtgttcccagcttttagctgtttctaatagtgctgccctgactatgcttgtacatgtcttttagtacacatcatgcattttttgttgagtgtgtatatttggagtggaattgctttccaaaatgattgtactggttttactcctagcagtcttaagtcagaggtctcattgctttacaccttcaccaatactttatgcggtatcttgactgttgttggcactttgcattttcatcttattaattttcagaaaaattgggatttttattggaacaacatttaatctattaatttggagagaatttacatcttttagtatgaactattctaacacatgaatgtaatgtgttcttttatttggggcttctttatttcagtaagatttttcagtttttgtgtcaaggtcttatgttccttttgttagatttattctttcactccttgatttttggatgttttgaaagtgatatcttttcgagatttcacattcaaatttcttttgctagtatatagaaatacagttgatttttgtatattgagcttatatccagcaaccttactaaatttacttattttcatggtttgaaaattctttaggctattcttcatatacagttatctgctaataatgactgttttattatacctttcaatccttgtaagttttattttggtcttatcacactcgctagtacatctgttacagtgtttaaaagtgttagggaacacccttgtctcttttcttggtccctgggaggaagcttttagtaattgactgttaaagattatgttagctataggtactttacagttactttttattataaagattcccttttcttcctaatttgctaagataatttaatcaggaatgagtgttgatttttagatattaccagaaaagcacaactgataaaaatttataattttgattaattttaatcaaaattaaaatttgtgcttcaaaaatcaccaagaaagtgaaaggcaagacacaaaaatgaagaaaatatttgtaaatcatatattttagaaagggcttgtatctaagttataacttacaactcaataaggagaaaacaaattacctgattttaaaaaaatgagcaagatttgaatggacatttcactagagcagctgtttgaatggccagtaagcacatgaaaagtgtttaacctcattagtcattagggaaatgcaaattaaaatccttataggtaccacttcacactcactagaatgggtataataaaaaagacagacaattgttggtgactaggaaaacagagaccctcatgcattgctggtaggaatgtgaaatggtgcagccaacctaggcaaacagcttggcagggtttttgttttttttttttcttttctccaagttaaacaaaaatttacagtatgacctagcaattctactttgtctttatccaagacaaatgaaaacatttgtccaccaaaaacttgtaagtgaatgtccatatcagcattagtcatagtagccaaaaagtaggaatgatatgaatatctgtcatccgatgaagggataagcaaaacgtttatatgttcatacagtggaatacttcatgcttataacatgcatgaacctgaaaagcaagccatatgaaagaaaacagacaaaaaaagaccacatattgtatgaatttatttataggaaatgtccagaaaagaccaattcttaggaacatagattagtgattacatggtgctgggatggaaacagggagcaactgcatatgggcatgagagatctttttgtgataatggaggtgttctaagatcagattgaggtgatggttgtacaactctgtaaatttagtaaaaatccttgaattctatacttaaagtggctgaactctattttatgtaaattattcttcagtgaagatgttaaggaatgaatattgaattttatcaaatactttttctgtaactaatgaaaatgtatacgattttcacctttatttcattaatttggtgagtccctttagtgggctctcttgttggtagttcctttttctccgagatcttggcctcaaagttctggctgagcctgtagtcttcactgccagtgtttgtctccccacttccaggagattacagagatttctgagctgctgcttcgtgctacggcttttataccctctttacccgaccagtttataactcagtgtatgttttgggaggaaagcagaggcttaccatagtttcccttctctggctttccagcctcttacatcctggctgccttagttgctcaagcagctgtcttacatattttctgcagtatttcatggaggaattggtctgatgatgacctattccatcatagctaacagtggaagtctatgtgagttttttttaagatgtcagtattacagcattgctatatgctgatgggaacgaacctctaaggaggggtagtattgatgccagccaaggagagcgcktaagtgctggagtgagtgatgtccccaaggagattagaaggggttgaatccagtgcacaaggggatggattggcctccctcatgatgttacaggattccttcagtgccactttgccagccagaaatctttgctgcccctgccacctctgtctgggccttgcttgggccccctggccttactccaccctcttggcctggcaggttgtgcttggttcgcgcccacttgaatcccgtgcctgctgcacctccacactcagcttgaggctggactgggcatgccatgaatgacttccatgtcaggcaccggtgtctagacaaggggaatgtggtgtcacccaaaaactcagagataaaaccagcattcatggagccccaagcagtgttacaactcttgctcggggagtcctgaggtctgggaccccagaaatgttgcagctcttcactcccatagcttggctagcgggagcatgttacagctcttttattcccgttgcacgcagcttggcgagccggccaggggcatcacagccctttcattcctgtcgcctgcagctcagcgagttccaggtccttgtcccgcgaccaagaggaatgaggtgcgtggacaccagagagtgagtaaggcagagaagaattttattgagtgacataaggaaagctctcagctgtgagaggggacccaaagtgggtagccacctgagagggtgagtctggggtttttatgggttagaatggaggtgtgtgtgctgattcatccctgggtgggcttggaaaaatcactgtttgattggttaaaaggcatcatccagaaggaaccaatcaagagagtgagggtaatatggggatagaagttctctctctgtttrtggactctctcaaaccagcagctcggtttttagactttaaactgtcagtggcttgaaggttgggtttcactggggacacatccctgtctgctggggaatttgtctgtcttctgtcactctcaatgagttagttcattcatggtaacaggaggcagggcggagtatataggttcaagtcctggatggatagctttggtggtaagtactggtagaatgtcttttctggcttttcgtaggattgataggaggttttaagattcgtggagagggaagttgtgaagtggtctatatgtgagtaggagagtgaatgaactcaggaaatacagtaggattgctgggcagcagaatggcccacttgagatgagtggtcataaatgtaaaatatttaaatttatgaagtaatggaactgagaaatactgggcctcaaagaacagtttggcaccaagttaagccagttatttgtttttggttctgccaacatttttctttgttacatattaattcttcatggaaaaattaattacaaagacatgtatcaggcattccaaaacatttaaagacttgcatatttagcacccaccacccaacctaagcaatacaatattacaaataaaattgaagtcctctgtgtacccattgccagtcatactccagcccccataaccaccaattgaatttatcatttctgtgtgttttatatccctgaatagcattattgtttttaaaatttgtgttcattatcctgtgtatctttctgtaattaatactttttcaataatattattcattggatttatctgtatttactcttaattctttcaccttcatgcttatacaggtaacattctrtttataattatgtccttgttttattaattctcctatggatggatatttaggttatatccatttttttgctagtctttgtatgctcccttgaattttattgtacatattttcttgggtatttgagagattttctagggtatacatatctaagatctgatggatgctgggatatgtgctttgtcaactgaggttctcactcccctggaagtgtgtgagatcagaatgcccctgccctagcccttacttatattatgtatcagcatgattgatttgtaatagactaataagggtaaatagctgagtgtatgccttctatactgtaattttactttgttgttcgtctgtttgtttaattggggacccatcttttttcagattgttaattttgctaaagatcttctttgttctcagagttaattatcccttaaggaattccatgtgtttatttttctctgttccaaagttacgattctgtgctaaagtcataattatgaaatcatcagtttgttcatactttaaatctatgcttctcccttgtggttgacagtccccaaggcaggcatccatgaagtcaaaaggactgaccaaagtgtaatctgccctttttactgggttggcatttgtgctaatacactgcaaaagcagtggtggataaactgacagcaccttgcaaagcagcaaggtggtgtcaccaatttgtcattatttatgttaacattaatgggttcatttgtatttttaaatgaataaacatttaaacaatttcttagttttgatttctaatagagtaactatagatcagtagatgccaactatagtgtcttcctttaagagcgtgaaggggcctgagactggaaagctggagaagcaccgctttaagcacatggtagacgtatgaatagacaaatactttattcttgttgaacatggtcattgggaaggaaaactgaggtaatgtcattctattaaaagatgarttaggctgatcttgaagttgtatactaatcttaagtaaattttcaattctttgccttaaaattttgtttacaactagattatatttgtaaataaaatactttgcaggtgctgaccttaaggaaagagccaaaatgagttccagtgaagttggtccttttgtctccaaaataagagcagtgattaacgatattggtaagcactattaagttcttctttcagcatgccgaaggggttcttaaatgtcacatttaaaaagttacrcattatatataagcattggttaaatatttatataattagataatcatgacctatagctgtttaacgtgacacttaatatatttaatttgaaaaattatgtaaaatatttaataattacagatgtcttaygtatgataaaatatgaaggtatttatttattagacaacaataataatttgccataagcctttgacttacaatatctatatttaactatatacatgcaaacatacgtttgggattcctttgttttttaaatatacaggatcatacttttttaagacttacagtaactatcaatttattttatttttaatttactgctgtatattaatccagtcttatccaaaattttatattatttcttcattaatgaacatttttttcctctgtttatgttatttataataaggtagtgaatacccttgtacataagcatagattcttaaacagggaatcgctgttccagttatcatttgttcattttatattttagtattaataaattctacaaaattatattcccatcggttaaagacagtatatgtttcctcacattcctgccagcatataatgttgctatttttgaagtttgcctaggttaaaaaaaaaaaaactcaacattttaatttgtattgccccaaatgcttatgtgatgttttatcttttcaaatgagatttggctttctttttttttttttatttggttttagttyttttttttttttaatttttgattttttctagagacagggtctcactttatcacccaggctggaatgcagtggcatgataatagctcactgtaacctccaactcctgggctcaagagatcctcctgcctcagcctcctaagtggttaggactacaggtgtgaaccatcaggcctggctgatttttaattttcttgtagagatgggggtctcactgtgatgccctggctgatcttgaactcctgcctcaagcgatcctcctccctcgtcttcccacagtgttgggattacatgcatgagccacattactcagccttttcttcatttgtaaattgcctttcacatcttcatcctccttttataggattatttaataactacttgtttatttaaaaggcatttttatattctttgtgtttaaatgtgttatagatattgtcctctaatgtgcttaatttgattccagtatctttaaatttaaaacttttaatatctagakgatgctaggttctctttattattctttttccttgaaggttttctctgttgattctcgcacatcagtttttccaaatgaatttagaattatttttttaaggcaaagaggaaaaatttctgtattgcaactgtgattggaattttataaattttgttaagaaaattttgacatttttatgatagtaaatctttctatccatagtgtgcatggctcgtattttctggggtcattcatttttttaatgtctttcaaggaagttttatacttttcttggtcttatatctttttttccccctcaaatatattcctagctattttatagcatttattcctttgaatgagaccctccccttgttttcgttgtagtcttgttattatagtctgtaggaaagttattaagtttttttttttttttgagccggagtctcgctctatcaccaggctggagtgcagtggcacgatctcagctcactgcaacctccgcatcccaggttcaagcaattctcctgcctcagcctctcaagtagctgagactacaggcacgtatgaccatgcccagctaatttttgtatttttagtagagatggggtttcaccatgttggccaggatggtcttgatctcttgacctcgtgatccacctgccttagcctcccaaagtgctgggattacaggtgggagccaccacacctggccaaaagttaataacttttatgtgcttattttatatcatgtcagctggataattacttgtgttaattcttctttaattttcttgtgttttcagttgaaaagtacaatataggtaattacctataagtaatgcagtttttatctcctcccccaacattttaaccttacatattcatattttttcatattggttcaggccctcatagagtattcatttgttaaggtgagcgtgatcatccttatctttctttgactttggtgggtgcctttaatattttgccagtaattatgatattcaggcagttctcttctatttcaacttgttaggagattatttctgtttttaatcaagaataagtattaaagtttgtcaaatgcttttaaaatatgcatcgggattataattgatgtatgttagcgtttgccttatttagcctttattatactgagttgtgttaatagatttactaatgctgcggtggccatacattactagaataagctctgtctggtcattgtggttaggggtggtgttggtttttaaaatatattgctggattcaataaaatgcttttggtagaatcataaaggagattgagcttttaattttgttttgtgttattcttttttggtttggtgtgaaggttatttgtcttcatagaatgaggtgaaaagctttccatgtttttctatgctatatacagaacaaatcattttacttgaaagaattgtagaatttgaccatttgacacctttttgcatcttctgtggttttgttactgttttctcactttcttagaattaaaatttaaaaaatacgtgttttgatttctataatgtctttggcttagctgtctattctgcctcttctcattctgtgctggtattgttttaggccctgcttctctccccagcttcagcctcatgtttatgtaccttctgacacagagcatgaactttgtttagaagttggtcagagagcttgattttagaagtaaaagttgatgctacctgtaagtttatatatatgcaagggggtggctaagattggtttcattgttcaaattaccttgatgtttgttccagagtgtctttctgttctgtggattctgaaattgggatttttctggaactctttctgtctttgcaatgtcattttcttttttgtgattgtagctatagcttttcttttctgggctagttcttatctccattttttcttgggagttcctccatatttattaatgatactttttattataacattacagtagacttactgtgatgattccagacattttgaaggacatatggaaactaagtatcttaatagtatcttaatagaatccactcatttaatatgttaaaaatcacaggcaggcaggctttatcttgaagggtcatatagtaaatattgtaggttttatggtgccatatggtctctgttgcagctatacaactctgactttatagtatgaaagcaaccatagatgatgtatcaacaaatgtgtgtggctctgttccaatacagctttatttatgcatacccaaatttgaatttcatttgatttttatgcattttgaaacaattttttattttgatttttttccccaggcatttaaaaatgtaaaaaccattcttagctcacaggtttgtactaaaacaggcagtgggtctgatttttctttgaatgtcatttgtctcctatcttcatttttcctgttgtttggagttaattcctctatatttattcaagaaatctcacttcagttctaatttgaacaacttgatgcatgcttggcttatacctttgtcattgggttttgctttttggagwcataaagcttttaattttaaggtcttcgctttgatagggagtttaaaatattgcatctgggggttttgtattcttgataaaattcaaagaaaacaaaacaaaacagttcaagaaaaaacaaaacaaaaaccaaagataagttcatccaatcttaaaaaaatgtaaagagaaaaaatagcataaacttagaacatcttgaatagtaagatgttgaaataagtcaagtactcactattaatgttagttgattaaacttgcggtttaaagacatagatgttcagatttgactaaataattgacatcagctgaatattgttaaaaatagccacatctgggatacctctttttgtacctgaagattactagccaaaaaaagatatatcagtattgatattggtcaaaatacatttcaaaataaaaagcattactagagagagagttgctgcatgtgataaaagattcaatttttcaagaaacatacccttaaacttgtatgcacttaaaaacaaaagtctcaagatacacacataaaatgatatggataaattggtaatttgtcatcactgacaaaattatcaacccatctccctcaatttaccatgaggtcaaaaagacaaaagttaataaaaattttttagtgatttgaacaacataattatcaagtttggtttaatagactcaaccccaacttatgtattctcatgaacacaagaaatgtttaaagatatgggtcacgtgcaggaccctaaggtctctgttaaatttcagaaaattggtgtatagagaccatattttctgtccacggtggaattaagttatgttaaaagaaaaacttcagccaaattaagtttaaaggagtttaatagaccagtgaacgatttatgaatcgggcagtccccagaatcacagtacattcagagagactccagggatgccttgtggtcagaacaaatttatagacaaaaaagaaggaagtgacatacagaaatcagaagcgaggtgcagaaacagctggattggttacagctcagcgtttgtcttattttaacacagtttgaacactgggcagtgtatgagtggttgaagtatggctgctgggattggccaagcctcaggtactgtcacagggcatactcctaagttaggttttctgtcttttctacctattaagttaggttgcagttcatccacaagtatagaagtacagagtctttctaaggccgtatttagtttgctttaacagttagaaacaagatatgcatacgtacagattctaaaaccgtatatttgtaaactgagaatactgaacagctcatgggtcaaagaagaaactataatggaaaagaatactaaaactgaatgattatacaattaccatatgtccaaatatatgagatttgattaaagtggtactgttagctgtgatgtatccatgtcatgcagcacaagtatgttagcatcagtgaatctgtacaggtctgtagcaatctcagttcttgcctcctcagaagaaagaattcgacccaggggcataaggctggaggagacactggggcaagttttagagcaggagtgaaagtttgttaaagagctctagagcaggaaggagaggaacttgcacaaggatcaagtagacgacttgagagatcaggcgcaccgtttgaccttttgaattggggttttatatgttggcattcttctggggtcttctgttgcttctcctgtgattcttcccttggggtgggctgtctgcatgcgcagtggcctgccagcccttgggaggggctgcacgtgcagtgtgtttactaagttgcaggcctgcctacttgaggcaccttcccactttgcagccccgtgttcctagagggacgtcatccgccattttgcctcagtgctcatgctcaactgcacttgcccagctcctgagatcttatcaggaagctgctgatcaccagtttcaggtatttctatctggaaatacctgatatttcgaggagactgcctttctctggtgttggctgtgaccaattattattttagagagacagttaacagccgcctgacaattacatggtcacctgacattcctggtgtgtgtattttgtggggagccctytccaactctgctcgtgtctgattagctacctactgtaacagtacttgaggggaatttacaacattaaatccataagttagcaaggagatgtcattgatgataaatagctaagcattaccttaaaaagatttttaaaagttttaagttcaaagaatgttgaactaaagcaacaatacaaggaacagaaatgagtaaaatggaagacagagatgcagtgcctagggtcaacacaaggccgtgctctttacagtggagtaaaaagtgttttaacaatacgtattacaaatgaaaaaaaggtgtgattatagatacaggagagattataaagataataagaaaatactgggaaaaaactttatgccaataaatatgaaacttctgtctcaagaagaaatcatgggctggaatagtcatgtaaccaaaagagggtccaacttctcgccgcttgtagaaagaagccaaaataacaagagtgaggtatgataaagagtgtgaattttattaattgttgccagcaagggggaaagtggacagaatcctttcccaaaactgccactttccaatttctggagagtgcaggggtttaagaagagggatttggaatgcaggagaggcaagggggctgggaggtgcccaatggcatgacttgctcctatggcttatcctgaattattgttccatctggtgaaggggccagcaccatcttgggcccaaccatgccaaatcagtcgcagtcagtcttgctgtcagtctctagccgggagtaactctggccttgaagtaatatcctgctcgggagagaattctggaggtgcctggtttgcatcaggatttggcccctgaagcttctaaggaaacataggaccagataagtgagcatggtgtgagcttaacaaacatccaggtaaatacatgtgcatcaggcatgaaagcataaggtgggaaagggaggggagtggagttttaaagcacattccaaggctgtatttagagacaaaagaaaacacatctgtagtttgtctcaaagctgtgtcttgagactgggatgaaaagaggaaaggaaaaaaaatttctaaaagcagtttgaagctaagctgcttggttacagtcatataatcactgaagtgatcaaccaattcttatagtaaactttttcacagagaaagcaccagacccagttttttgatgatagagatttacttttaagatgttttacccaatgcataaggaacagattcttacaatcttatacagacagttccacaggatagtaaagtgagagtttactcctaactcattatttcagactagtgtaatctttatacctaaatccgagagaaacaatggaagaaaggaataggaggagacagcctcacttgtgagcatacatgaaatccagcagattgtaacaaaagaccaaattgggctttcccaggaaggcaatggtggtttccactggaaaatattaaattttaactcatgatgttagccaatgaaaataaagtcatatgtgtatctcagtagattgaggaaaaagcatttgagaaatatcaacatgtattcatggaaaatgttctcagcaaactaggaatagaaggaaacttccttagcctgacgaaaggtatctctttcttaacaataaaatattagaagtcatctcctaaaatcaggaacaaggcaagaggacccactgtcaccacctctgttctatattattctgtaaatcctggtttctgtagtaggcaggaaacaacaataaataaggaccgaaaaagaaataacagagtccttctcatgtggtatggctgtctccatcaaaaagctaaaagaaacaataaattattagaaataagagtgttgcaagatggctggaaatgagatccatattcagaataatcaattgcctttctttataccaacaacagacaaaagatgtcaagtaaggataccctggaaagtaggaacaaaaatgagtctaggactacatgtagcatatttggagaaattataaaactttattgtaacatgtttaaaaaaataaatggagacaaattatcctcttraataggaagattgagtattaaaaagatgattctcacaaatggtgtaattcagtgtaattacacctagactctcagtattgattttgtgagggacttgatgagcaaaaagagacccccaaatagccaaacactcataaagaagaaaatgaagcgtcttgccatttcagcactcaagatttattataatgacatagaaatgaagacggtgtattattcgctttcggatagataagtataccattgggttgaaatatagaacccccaaaagaccacccaagtggggaagttgatatgtgacagaggtggcattgcagatcgctggggaatggcaaagacttaatatgtttagaagtggaaactaaaacttcaatgatcttaacagagagaagagtttcttaaaacataaaatatgacacataaaagaaaacagtgatcaattttaccaaattaaacttaagaacatcaattcatgaaaacatactataaataaagtagaaagaaaagacacagactgggagacaatatttgaaacacatagtggccaaagattcttgtatgcattgataagtacatacaggaatcaatacatgcatacatatgtacagccttgaagtcagcaagaggacatgacagaaaaacatttcacacagaggtagaggagtgagggtagacataggaaaagatggtcagccacagtagtagtcatagacctgcaattaagaccacagtgggatgccattttacatccaccagattagccaaaaattcttaagccaggtcttactaagagttagtgagttaagtggattaccaggcaggaagatttatacttctaatgggagctgaactggtgtaactgcttaggaaaagtatttgatattgtctttcaaatttgaatatccacattccataagactcggtagttcactttttaaggggtatttacatagagggataacttaaagactgtttttattggacctgtagtaagaaatatatctacactctggcccagtaaacacataggggtgggagagtatcaaaggttatggttcttctgtctgtacactctagtttgatactaccctgtgtcattaaaaaaaattcctcatcttgactagctcatgaatgggttgctacttggatttgaaaccacattgttctgcagacattttgcacatgtgtcctagggacacttaacattgttaatagcaaaaagctgaaaaacaaccaaatttctatgacaggagaatggaaaaatattttggtatatttatacaattggatagtagagagcagtgtacataaatgaataatacacacatgtaccaatatggataaatctttgaaacacaatgttgatttgaaagtatgacttattttttataaaactaatagcattcaaagctaaacagtttgtgtttagggatgtgtaagtgtgtaataaaatcaacatatacacacacacacagactttacaaggatggttatctttggtttggaattcaggtggaaggatagttgaagagctcggtggcagacaggtgttagttctgacctagatctagctttgagtggtgattgtgttggagtttattatgattatgctttattacatgtatatgaatatattctttatatgtgccaaataagaccaatttttagaagattcatctatcttgaaacttgtggacatttcttatttactgtatttttttttctttcttactgtcaactgaagaatgacaaggttcataactttagaaaggagagctttatgtctcataaagggttacagcctgcaaggtggctattcccacactctgggaagcacagcctctggccagaatccagaaactgccacttggaaggtggggtaaagggaacaggaatgtatgctgagcagggtggccaggtatacatagtcaataagctgcaggaggagtcatgaatatttatgaaaggagaaacaggcacatgcgcatttgagcttcaggcctttccgtgggacccatgtgtaacaaatggcagccagagcaggatctgagggtggagtcttgggacctctgctgtcaaaagatgaaacagagggctgggcgcggtggctcatgcctgtaatcccaccacttttcgaggccaaggcgggcagatcacctgaggtcaggagttcgagaccagcctggccaacgtggtgaaaccctgtctctactaaaaaaatacaaaaattagctggacgtggtggcgcacgcctgtaatcctagcctgtagtgccagctattagggaggctgaggcacgagaatcgtttgaacctgggaggcggaagttgcagtgagccgagatcatgccactgcactccagtctgggtgacagagtgagactccgtctcaaaaaagaagaagcagatgacacgaaaaactctcattgcgcctcctctgtagatgggccagaaccaccctgtggttggtagtctctttatcaggaagaaatgctggttggttgttttgacagaacggcagaagggcggggcagcattcaggctgttggttgaaatcagcagtggcatctttcaagggctggtttctctttagcccgttagaagaaagcctaatggcggctattgagggagatggtctgacctcccatcacatcatagctacgaattcagcctctgaggtttctctgtggtccccttggccaaaagaaggtcagttcagttggttgaggggcttagaatttttttttttatttctcattattttcaagggaagccaagattttacatgtctagaaaaatagctcttgggcttttggttttaaggtgttttttttttttttttccttctttgagagagggtctccctgtgtcgcccaggctggagtgcagtggtgcgatctcagctgtctgtagcctcgacctccggggctcaagtgatcctcccacctcagcctcccgagtagcagggatgggctctaccatgcccrgctaagttttgtgttgtttcgtcatgtttcccagactggtttcgaactccttgactcaagtgatcctcccgccttggcctcctgaagtgctgggattacaggcatgagccactgttcctggccccctacttttaaggtttttgacattaaaacttttcttgaaactttttctctttgatgggagagaaaaatccttttgcatgtctaacaaaatgcgtttatgggcaggcacagtggctcatgcctgcagtcctaacactttgggagcctgaggcgggcagatcacctgaggtcagaagtttgagaccagccttgccaacatggtgaacccccatctctactcgaagtacagaaattagccaggcgtggtggcacgtgcctgtaatcccagctactcaggaggctgaggcacgagcatcacttgaacttaggaggcggaggttgcaatgagccgagatcgtgccatttgcactccagcctgggcgacaagagtgaaactcggtctcaaaaaaaaaaaaaaaagagcgtttatggaccagatactgcacagaggcctccatctttctttctggctctcttttcactagttcttctcataaagtttgttcattttcttttttttttttttttttttgagacggagtctcgctttgtcgcccaggccggactgcggactgcagtggcgcaatctcggctcactgcaasstccgcctcccgggttcacgccattctcctgcctcagcctcccaagtagctgggactacaggcgcccgccaccgcgcccggctaattttttgtatttttagtagagacggggtttcaccttgttagccaggatggtctcgatctcctgacctcatgatccacccgcctcggcctcccaaagtgctgggattacaggcgtgagccaccgcgcccggccaagtttgttcattttctgagagaagagcttctaggcttatttttgtcttgggaggaagtgacttggccagtggatgttcatggatactgatggtggaggatcctgcattgtactgttaaaattatgggaggccattgttttggactgagctcctgctcaaatccccagcagaccagattaaattgatatagtcactcctgcaaaatgccacataatcaaattgaaactttattaaggaagcagacggattccaaaacagaccggtttttcctgaaagcaggagattccagtctacctgaatcagctcagtaagtctactctgctttaacccttgccaaaaaaacaaccccccccgcaaagcctgatgtaacctgttaaccaattagttttttttcctcttgtcctgttttcttgtttctaccttactttaaaacccactgttctgccattgcctcatgggaacttttattctattttgtagaatggaggctgccctgcctcatgaatcacaaataaaaggcaattggatctataactcaatttgttagatttttgtctttgacagtacttacgggcctgcttcctatacagaccctccagtaattaaatgccttggcagtggtgtactggggcctgctcacactgactccaggtgattgttaaattttcaggaatttttttttgtttgttttaaaaaaaagatagggtcccactctgttgctcaggctggagtgcagtggcacgatctcggctcactgcagcctccacctcttgcgttcaagtaattcttccaccacagcctcttgagtagttagaactacaagcgtgagccaccacgccggctattttgtattttttggtagagacagggtttcgccatgttggccaggctggtcttgaactcctggcctcaagtgatacccccaccttggcctcctaaagtgctgggattacaggcatgagccatgactcccagcctaatgttcagaaattttgtgagctggctgttgaaccataggcatctttaaattgtggcagtattagtactgatacaaatcagggttcacccttgtctgttgggtaccattttcccctcttgcctcctgttatattcacattttctacaactggagaattgatgggatctgaaaggcaaatgtattttctctttggcmaccgtgatttcctgtactctgtgtgtttttaatgaaagagagtttataagcaacttacagacatgacttatttgaaagctcttctgttttattaaaatagagatcagaaagcagttctgtatttcattcagagtcactaaatttactttattgttcctagtatcttagaaagtctgttcttaaacagtaaaatcctagaataaaattgagttcttttgttctttaaaaaaaaaaaaaagtcatgtgactatttttgagatgtttcattcaaaggaaatggtgaatttttagatttctaaaatgttaatcattgttacaagtccccttccctcttgaagtttaggttgcctggattagaagcagtaaactgattattttgaaatattaggcatcagcaaggctacacagcaatgaaattatcaggatctattaacagctgttgtttcttaccattccttctagggcttcctggtgtgcaccttccttccagtagttcgtggtggcagtgttgacatcactattgggacccatattgtgcacattagcagtatagaatatggggagtggacatgttaattacctcactgagggccattcttgcccttagtaacatttaaattagatgatatttcaagatgagatagaaaacatttttagaattctctaagtggaaactctaaagggatagacctagttctctcaagttgagacatcaaagaattgttacctaatgataaagaaatatttaaaataggttttcattagaattttagattacagaatttagtgtgaggcaatcatgtttttgtaaatgatcttccacagtaatcctttaaaatgccagcattcataacttctttttctttctctgatgaaataaaattgcaaaagctttaatttagcagtgtaaatgcaaagctgaattgaaatacaggtaattatgttaaaagggacagctgacaaaattcatgtatttaacaatttttttcttaacatttataaggttttatagaaagaaataatttaattttggaaattttcagtctctggatctgttcttcatgtgattgaaaatctactgtccatattcatttttctatgaaaaaagctctctctttgaaatacaaagaatatctttgtataactgaatgaaaaaattctgtgtgaaaaatctgatgtaagttttatggtataaacctcttttcaagcagtgcttctcattttatttttgttagcatgtctttcagtttgagaattgggatacatttgaattttattattgaaaggctcaaagtaatgcaaaacaagtcactaataattaacagacccactacagtataatagatgcacatacatatcaaactttcatcttggcctctcttctgcagaggtttgatattggaatcaaactcttctgtcctagcctaactatctttgtataaatgagtgttctttaatgttttggtaaccacatgatctatctttctgtcatctttatcctaagcttgaagttccattatatttcagcatgtaatgatactcttaggaggtcacaagatctgctcagtttaacattttctcaaagataatgccataggatggtttattttgttatagacagtttagattttatacattgttaaaatgtgatgaactcttgaattattttggtgtaagtttattgatcttgatctcttgatgtggaatcagaaaatgtggattctctctaccatctggtactttccatatctccccattgcaagaaccatgagttggctttttcttcacttatacctagtgtctagtaatgagcacatggtaggtacctgattgagagggcaaattggcttatatcttattggtgtaaacatgttagccatactgtaattatttcatcttatcttcaggctgaaccttctcttgcaatccytttcctgtctgcctctacctaaaattccaagaatgctgctcaacttgcctgagtttgatcctctgtcttttctacccaagctcctgctgctcttaggacatgactgagaatgatagaatgaacatgagtggagcagttgttggaatgtctattgtggtaaattaggactgatcctttgctagattgggatggaaggtctcgctcaggagtcccaagtttgatatgtgaaggtagtgatgcttagtggacatccaagtgcagatgaattcggagttgaggcaggttgacccaggtgaacttgggagtcatcagaatgttaatgctatgtgaagccatgaccactggatgagacacctagggggttactgtagagataaaaaaaagtctgaggactgtgaggcattatgatatttagaggctggaatgaaagcggtagattgagaaaggccacccagggtaggaaggtgggaagaaaacaatattcttarttgtttgtgcttattttatgttagatccggggatacatgtgcaggtttgttacatgcatgtattgtgtaatggtgagtttgggctcctagtgaacccatcacccaaatagtgaatgttgtatgcaatcagtaatttttcacctctcaccctcttcaccactgtcctcccctgtggagtccccagtgtctgttatttccatctttatgttcatgtatacccattgttttgcttccacttataagtgagaacatggcagtatttgattttctatttccgagttatttcactaaggataatgacctccagctccatggggcagcaaaagacgtggtttcattcttttattatggctgcatagtattccatggtgtatatataccacattaggaagaaaacagtattccaaaagccaagtgaagaaaatgtttcaagaaggagagtgtgattaaatgctgttgacaggccaagtaagatgaacagtaagaactgactactgggtctttgagacagtttgtgtatttggcaccacccaaatctcatgttgaattgtaatccccagtgttggaggtggggcctggtgggaggtgttggagtcatgggagtggatccctcatgggttggtgctcctgacctcaggtgatccacccacctctgcctcccaaagtgctgggattacaggcatgagccaccacgcctggccagcaattcttaacataatacatttaagataaaagttaagaccaggcgccgtggctcacgcctgtaatcccagcactttgggaggtcgaggctggtggatcacctgaggtcaggagttcgagaccagcctggccaacagggtgaaaccccatcgctgctaaaagtacaaaaaattagccgggcatgatggtaggcacctgtaatgccagctatttggaaggctgaggcaggagaatcgcttgaacctgggaggcggaggttgcagtgagccaagattgtggcattgcacttcagcctgggtaacaatagcgaaactgcgtctcaaaaaaaaaaaaaaaagaattgcttaataaggaacattttcaaagtttgcagaatttttttgtcaatccaccaagttgacctgaattgtttatttatgttcactgtgtcttttttgtttgcttgagggtcaaagagatttctaaaaatatgtaatgtagcttattagattgaatccagcatatattttactttttattttcctaatttgatgtaattattagaaatttgaagtgccgaattatggtgtgtgaaagattaattggtagaacactttactgtctttgttttctgcatggtgacttacagatcttagttttagttttctttatcctctcatcaagaatggtggagaatgaaaacaaacatctgggagtcagttcttttatgagttattaacatccctctccttttgaatcatagttcagtatgtagttttcttgtttttagagacagtgtctcgctctcttgcccaggctgaagtgcagtggcacagtcatagctcactgtagccttgaactcctgggctcaaatgatcctcctgccccagtctcctgagtagctaggactactcagtccaccatgcctggctaatctttttcttagtggatggatacagcttctttaaatatattgatgtgtttggtattaggcctgtcgttatgcttttctttgtcttctgattttggcaattttacattttaaaaataatcttaactatgttaggtgcttctctggtttgttctgtgtgtgggtttattctaataatgttaagcgttgtattttggtactaccttatcatcattattacacttacgtagtgtatttgatccactgtttctttagaaagttctattgaacaatgacagaatttgtgtatttcctgttttaaattattccttcccacctttctcttctcccacccttttttcttagtgttttctttatgcaatagttgaccccttattattaggggatgcactccaagacccctagtggatgtctgaaaccacagatgataccaaaccctgtatatactgttttttcctgtacatacacacctatgatgaagtttaatttgtaaattaggcatagtaagatattagcaacaataactaggaataaaacggaacaatttgcaacaatattctgtaataaaagtcatatgaatatagtctgttctcaaaatattttactgcattatactcacccttattgtgttgaagaagggatggagcaggatggtgcgagattttgtcatgctactcagaatggtgtgtcatttaaaacttatatgttgtttatttttggacttttccgtgtaatattttttaactgcggttgaccatgggtaactgaaacctcaaaaagtgaaaccgcacgtaaggggagactactataattttagatttacttacacctctgttacttggtgtacaaattttaaattatatctctgcatcagcccttgttcatgaaagctcaagaaaccagtgtactttcttttgttgactttatgattttcagatcaattagatcatataattctttaaaatagctttattgaggtgtaatgacataaaataaattgcccatattaaagtgtacaatttggtaacttttgacttgtgaaaacagcaccacaatcaagataatgaatatgtccatcacctccagaaatttcctcatggccgtttgctgtctctttcttttgcccctccctgctaccctcaacttatcctcaggcaattactgaacttgtatcactataatttccatatttttgaatttcatgaaaatgcaacagtatgtattaatttttgtatgtattcgcttttttttgatcaatagttcttttttattgatgagtagtattccattgcccagatgtactacgtgaaagacatttgggttgtgttcagttttgggctgttacacataaagctgctacagacatttgtgtgtaaagccttcactacccttacgtttatggatcaagttatggccgttgcttcctcagtagcattttcaatgtagtggatcagcatattatcctatggatggtgagactgtcaagttccctgtggattagcttaagtatccagagctcctcaaactgtattgtgtgtataaatcacctgggttaaaaatgtgcattgtgaaaaatgtagatcctgcttcagatgggtctgcgataggacctgggagtctacatttataaaaagcttacaggtgatgctaatcctgctgttctacaaaccatactctaaataacaaggttacagagcctgagagtttatgaagcaaggcaataatggtgaggttttttcctgccaagtgaaagtaaactacttatggtatgttatctttttatcagaaatagaagtgactgcatttaccatgttaagcagcattttaaatgccaagagttttgttaaatgtggaacagcaatcaacagaagtcatcactcagttctactagtaagtgtaaccttccagataagattgctgaatgggcatggacttccctgccagcctgtcatctgtgcatttcccttagggagggttttttgatttggaattttggtaggaaggaaatattctggggttggccctttttattttaatagcctatagagtcgtgtactggggggcactgccacactgtgggttttgggggtttccagagaaaactcaagtcagaactcgattacagtcagctgactggtgctttgcatccagttcccaaggtttccccagttgaacccagtgaactgtggtgttgccgtaggtctcaaggaattagtggcgcacagagccagtgtgctgtcgggcttcctattgagtttcagcatttcccttttctcgggtacgtggtcacaagtccttaggggaaggatggaaggatggcttacggtgttggggatctggggtgtgagaactagtgataggcagtaatggttaagagcaaaaccctgaaaccagacagcctgtgctcagactgtaccaggcaagtaacagcaactcctttgtgcctcagtgtgtcatctrtaaattgaaagtcatgagttcttacagcataaggctgatagaagtttaagtaatctttgtaaggttcttaggacagtggccacacatagtaaaaactttttaagtatttgctagatacataagcgtatatatagaaaggtaggaaggcaggtggggaaatgataggcttagaaaaattaagcaacttttctcagggctcacagtggtaacagtggtggcattgagccaggatttgacatttgaactccccacagttgcattctgtagcttcacttaaatcattcaacatggtatgtggcatatatttgatggaagcagtgactgaatttaggacttcaccagtttactaatttgttgagacgtgaagtgtcagcataagcatagtataccaatttaacatccctgaactcagactagactatgtctgtgatgttctggcttgggtcgtgttagtaataaagtagagaataagctcatgtgtagttatattgttgacccttagttatattaaagaatacgtcctttctaataactgaatttttttttaacttttcctggacataggtatatatgaattgctttttaaagaaattataggtgttctcttctaattgactaaggaagtcatctgatttatatcagatcagattgttttataaacattctatcatgttgttttaaagatgctaaaggaaataatatcctagtatggtattaaaataatatattgctgagtttttccaaatgaataatgtattgctgaaattttccaaatttttccatgtaatattttcaaactgcagttgaccatgggtaactgaaacctcaaaaagtgaaactgcacgtaagtggagactactataattttagatttactcacacctctgttacttggtgcacaagttttaaattatatctctccaccagtacttgcttatgaaagctcaagaaaccagtgtactttgtttttttggcttttttacttcattaagctgttttacttaattctttagttagaaacattttgtagacggctttctacaatgctaatttgttaattaataatttaaagtaccagtgcttaacctatttaatgatttgagaatattagtatcccatttttcttgttctttttgtatgtggaacccaaatttcttgtcattttgtgttatatatttcctataagctttaggtacaaggtgctgttaagagttaaggaaggtactttctgccttcatcattgagtataaaatctgcagcactgcagtgaggctgtcctcatgctgttgccactcatggtcttactctgcatcactcgcagtattagggaggagttggaccctattccatgttgcccacatgcctttggttttagctaaatcgaggattgattacttattttatgctgtttctaggcagtttttctctttttttcctagtaaaaaagtaaatttagtcctcttttctgtgtgaatccatacagcctgaaattactatgacaggcttgtataaaaaagcatgtgagagggaatgctagcttccagcaatttgttcttggtataatgaccctttctgtaaggaatgttgctgctcttcatctgttagtttttcttcacaacaacttgtagaatttttccatttcatttagattttaacctagtgctagaatcgaagtgtcatatttaaatactgttacttttggcttttggatatgtgttccttttaaggtctgtggtgcctgagacttctcactttgaactcccatctctcacctgtggtattatgtttgcagcaatgaccctggtgtgggcctccagggagcaacagcccagccagcctgcaggcctcactcagggcttgttttgttattgtgattttttttaaacctcagtgatgggaatgggagaatatacattaggatgaaggtaaagttttagccaaaatgaaagataattaggtatttattgtaattttcagttaacttagattttatttctattcttcttgaaagattttagtattcagacttccagcataatgctacatagggcctttcccttgaaatgcttgatttcactgctttctgtaggaacactattcttcaagcaaaaccaaatttaaaaatcctgtggggctgggcgcagtggcttacgcctgtaatcccagcactttgggaggccgaggcgggtggatcacgaggtcagattgagaccatcctggctaacacggtgaaaccctgtctctactaaaaacacaaaaaattagctgggcgtagtggcgggcaccagtagtcccagctactcgggagactgaggcaggagaatggtgtgaacccgggaggaggagcttgcagtgagccgagattgcgccactgcactctagcctgggcracagagcaagagactccgtttcaaaaaaaaaaatcatgcgtctgacactaacattttcctttaataatcaaattgttcatatttttctagaagcatcaaataacctacattatgtgttgtatttatctgagaatcgaaagtagatactttaattttccccactttcatagtcccttgagtctaattatcgtaggctgcaggtcctacagactactgaagtgaaccaggggcctgccttacagttgcttttttccctcttaaaatagcaaactgtttaattgtttgctttaattatatttttaggagcatttcaaaggattattatcttctttgtcatacctggctcatttcctggtacgaaactgaaaatagtatctgatcctattggttgcataacatactgagtcataatttcttcctcttgctgttgggaatagccattgctcgttggattcgcagttcctgtttcatttatttgtgcttatatacaactgtcattttgctattcctttagatctttgaaattcataatctacctttctaaaggtgtattttattgagttcctgctatgattattaacattttttttccttttttttgagacagagtctcactttgttgcccaggctggaatgcagtggcacgatctcagctcactgcaacctctgcctccagggttcaagcaattcccctgcctcaccttcccagtagctgggattacaggcacgcaccaccatgtctggctaatttttttgtttgtttgttcgtttgtttttttgagatggagtttcactcttgttgcccaggctggagtgcaatggcgcgatctcagctcactgcaacttccacttcctgggttcaagcgattctcctgcctcagcctcttgagtagctgggattacagtcatgtaccaccacgcccagctaattttgtatttttagtagagatggggtttctctatgttggtcaggctggtctcaaactcctggcctcaggtgatctgtctgcctcagcctcccaaagtgctgggattacaggcgtgagccaatttttgtatttttagtagagatggggtttcaccatgttggccaggctggtcgccaactcctgaccttaaatgatccacctgccttggactcccaaagtgctgggattacaggcatgagccacactgcacccggccccctctttgattattaagtgctcccaagtagaagaaatactagatgtaaagaaaccacatatatcagactggcatgtgctttgagatgatgcatactttcctggataaaatttactacgacagacatcttttagggaataattaggatgatgtatagccttagaatttataatattgtaaaatgactaatatttaattacccattgaatacgaattaagctgttttacttaattctttagttagaaacattttatagacagctttctacaaggctaatttatgttaattaataatttaaagttccagtgcttaacctatttaataatatgagaattagtatcccatttttcttgttctttttgtatgtggaacccaaatttctcatcattttgtgttacgtatttcttacaaattgtaaggcatatggtgcctgagacttgctcttggagctcctgtcttccatctgcaggccctggtcctcacctctggtatgtctcttggcacctaggctggctctttttgcagtgaccctggtgtgggcctgcacaaaaggaaacaagccctggaattgttaagcttctcaagggcacacaattttcatcctctttagaaacataatttctcaaattctttcttaaaaaatcaagacgaggtctcaccatgtttcccaggctggtcttgaattcctgggcacaggcaatcgttcgtccttggcctcccagaatgctgggattacaggcatgagtcactgtacctggctcaaattcctattagacttaaaaatagtttttattaattccaaaaagtataaacwtattggagaaataagaaagatgcatttatcactccagagattccaagggttttaagagctgtgtgtctggaaacagggatgaagaccaaatatgtatttcataatatcacggcctccagcagctacttgctgagtgacttcagcacttacgtagcagggagggagcacccactctttctctgcttctgctctctccatcttagaactcttggcaatttttcttttctttagctccataggactgcatatgtttatttctttattaaacaaaagaagttaataaaaaaaagaaaagtaggcaaaataccaggattaatataataaaggaggaagaggcagtgaaaaaccgtgaggtttgtcccagattagtaagaacgttattgagtagcattgatgtgatgttaatttttgtttcatatgggctgtatggtaatgaatgttctgatagaaaaggttatgcacagagtgccatgtaagcatagaggaagggacatttgagcctcgacagacaagtaggggctagctaggcattctaggcagagctgcaccttgtatacagatattgagtcttgaatggagacttttggagctgttttaagtagtttggggctggaacagaatatctgaggttttggaagagattaggcaggtgtgcagaacttagttccaggtrccttcctgtgccatgctaaatgtttacaccatttctatcctgaaggtagaataaatcattgaacagttttaaataggggaatagcatgactgtgtttacattttagaaagattaccctacaggaaaggtagaagatgcatagaagggtggcagattgcaggtgaaggagattaattaggtacttcctgctggtgagaaatgatgggacccagaacttgggtggtagaaaagggcattggcaaggaggacatctgggatgacttctgagtgtcttgagtaacttgatgaatggaggtgctactaactgaaatacagcctagaagaaggattgagaagaaatggtttggacacatgaagtatttaagtgggtatgtccaacaggcagggggctgtttgggtttgaggtagagatctggaaatcattggtggtagtataggtggtaaaagttgtggatgagaatgagatctcctgggaagagcttttattgagaggggaagaaggctgagaaattaccagaggtagatggaaaggcaggaaaaatgagggacccagcaggcagtgaagggaggaatacaaggagggagtgtccaggatggatgtctctgatcttttgaggcagtacatttaataggtactgaatattgtccactggctataggacaatcttataatgtcattggtaactggaacaagaatggtcttgcttgtttggaggtgaatgggtatggtggcatgggtttactctactcctcttagaagctggtctgtaaaggaggtgagctggagggccttagcaaggcctaaggaaggcttctgacgggtgagacttgaggttggagagatagtaggttgaggaggtctagaaataaatgatctctagacaggtttttaggaaggaagaggagttgagagtcggtaaccaaagtcattacattctacttgtagtagctcaggatgaccttgggaaggactcagtttaacttgctgttttatatttttattgatttttcttttcttttttccagataaaattcactagatattgtttgcacattaaactcatttccagactgcaaaccctgacatagctgttatttttttcactaagtgttctggaaagcacattttgaatttgtcctgtcctttcaagtccctccccacccccaacccctaaatgttcagacaggtacagatagtgaaatactgcctgtgcaaaagccccttccacgcctgctcttctgggagtgcttcaggcggcagctgtgtatatgtgctccttcctggccttttcagacttgatcttcaataagtgatgaattcctttatttatgaataaaactcagtgtacttcagcaaatttgtatattttaaaaggagtcaaggagtgagcctctgggggattttacatatcagaatggaagagagagattttgggggatagtacctttttattgtttttgtttgtttgtttgttttttgagacagtctcactctgtcacccaggctggagtgcaatggcacgatcttggctcactgcaatctctgcctcctgggtttacgcgattctcctgcctcagcctctttgagtagcttggattacaggcacccgccatcatgcctggctaatttttgtatttttgtagagatgaggtttcaccatgttggccaggctggtcttgaactcctgacctcaggtgatcctcccacctcggcctcccaaagtgctgggattacaggcgtgagccacagcgcccggccgatattacctttttaaaatccactttctgttatatattaacattggccagccttgcttcacattcccatagtcagaaataaaattaatagagttctgcttttcagaataactaataaaaccagtcactttttgaactggttatgaaaatgaaatctgtatgtcataatttacaaaagttgtattaaaataatactcaatttctggattcaagcaagttgagcttttagttctgtgactggctgacccctttccaggcatgcttgtgagcaggttctcagggcatcttgcctctgaagtggaagagcctgattgttttccagctcccattcataatgttagggctcctcactaaatgacagctcacgggccaatgccacagcaactacttggacagtttctttcttgtttgagcagatgtctttctttgaatgagactctgtcattccaagcactgaagtagcccataaaggatcataaatttcacaattatgtataagtcatttcaatttgaactttgtatgaaccaaacatcttgtgaaagacttctggctctaagattaagaaatcgtagaactgtgattctgttaattcaacaaaaaatgtttatgaaagtaattcaataatatgggaagatttaaagatattgcacatacatgtgatggaacactatacagtaattatataatgttttgaagaataatgatggaaatgcttatattttgttaaaggtaaaagggatacaaaagtctgtatatgatctcccatttaaagcataaattcacagaaaaaaattaaaaatgaattacacagtgagataataatcttattaaggaagcataaaattttctttccatttcagctaatcttccagtaccaacaattgcagcaatagatggactcgctttaggtggtggtcttgaactggctttagcctgtgatataygagtagcaggtaagaattaatcctgttaaaaacataatttaaaaaagtgaaggttgtgtttactcttcaggtaattttaaatattttattctgcttcctgttgttgagtagaatattttcaaaaagtcacttgttggtcctaatggtgttttcgaaattcccacctgaaaaaagtcttgtgttgtttcttgccaggatttgggtcaggtagaactgagtttgaatcttaggtcctggaccaggcgcgtggcttgcacctctaatcccagcactttgggaggctgaggtgggaggatcacttgagcctgggagtttgaggctgcagtgagccatgatcgtgccattacactccagctcaggtgacagagggagaccctgtttaaaaaaaaaaaaattaaaaaggaaagaaaaaaaggaaaagaatctgaggtcctcccttttttaggccaatatcttcctctttagaggaaatgggggaaatgactgttgctgttgtgaagattaagcaattaatctgtggatgttaatctaagtactaaatcaccatttgctacagtaatgataactgaatctccttgaagtccactttcttcctgaatggttttctgaggatcttatgaggtgaatagaaaaagagtgaaaagaattagtgcccactgcttactgtgtgcagtccaggcacccagtgttattctagcacttgacatgtattcactcactccatctgcataacaaccctcagagcaggtactttggggcactggaggaaactggagaagggagagaagccccaaagaagtgactgaactgagatttgaacccagactgtttggccacagcccacacacctgttacctcatgagagcaacgtagactgatctcccatattcatcgttgtggacactatatccatagagactcagctctgcctgtgtcctcgggctctgagactgagaactgggcacagcagacggcacagagttgtcactgttcttctcttgctttccattatcgtttctgatgtggctgcatgttaaaagcagagctgccaaggcagaaggattgattgaggccaggagttcaagactagcctgggcagcataaggagacctcatctttataaaagattttttaaatttttagaacaatgtagcgtcaacatgattcagtttcttgggatttctggttgctagtccatgtgtcctttttcctccttttcacttcattttaggaacctattttcttgtaatgaaatcattggattttaaattgaaaagctaaggtacatgtaatccatttctgaaagaatacaggttttggaaattagaatatgggaagtagtctaagtatatttggatatgcaaataaagaagttattaagatgttttaaagtagccatgaaaacagacatgaaaagaggaaccctgtccacctgtcagaatagtaaaactatttgtcagaaggtaactaaagacttggtcttgaaaagttgccatatctgatatgacctattaagctctttggtctgggggactatattcaggcaactgaagaatttgggcttgtcagatactgacaagtctgctgatcctgaataattaatagatctatgcctccaaatatgtcttggcaatattgggtctaataatggagttacagtcctggtcttgtgaatcaaaaattaattcactgccaagcagtttttaacagaaaatgttgtgggactctcctaatacatgtcatttagagtgcttacttatttccataacaatgccttttaagtgattttttttaagaatttgtgatatcaatttaattagtaaacaatattttagtatatctcataactttttcaagttgtcatatttgaatgtgatgatatggatgatacttaattttctttctttcgttttagcttcctctgcaaaaatgggcctggttgaaacaaaattggcgattattcctggtggaggtatgagtagttcacgcccattcctcaaatccttgatttggtcctagaaacagggcataaggcaaaatcatgttaattggaaaggcaacattttgcgtaaagagacaatggcatattgtttgcatccctagcaaagtccccattcaagttacaggcatacctaacagattttccccaccgcaatgaaacaaatactgcgatagagcaagccacacaaattttttggtttcccagtgcatataaaagttatgtttacactatctgcagtctgttaagcatgcagtaccattatgtctaaaaacacaatgtacatatyttaatttaaaaatactttattgctaaattttctaatggtcacctgagccttcaaagaatcataatctttttgctggtagagggttttgccttgatgttgaggctgctgactgattagagtggcggttgctggagtgtggaggtgctgtgccaatttccaaggacagcagtgcagtttgccacatcagttgactcttcctttcacaagagatttctctgtagcatgcgctgctgtttgatagcattttactcataattctttcaaaattggaatcaatcctcaaaccctgccactgctttatcaactaagtttatgtaatactctaaatcctttgttgtcatttctgcagtgttcacagcatctttatcaggagtagattccatctcaagaaactgttttctttatttgtccatgtattagtctgttctcatgcagctaataaagacatatgcgagactgggtaatttataaaggaaagaggtttaatggactcacagttctacatggctggggagtcctcacagtcatgacagaaggcaaaggaagagcaaaggcatgtcttacgtagaggcagtccagagagaatgaaagccaagggaaaagggaaaccccttattaaaaaaagcatgagatttcctgagacttattcaccacgacgagaatagtatgggggaaacccgcctccatggttcagtgatctctcaccatatccctcccacaacatgtgggaattatgggagctacaattcaggatgagatttgggtggggacacagccaaaccagatcaatccacaagaagcaactccccatccattccagttttataatgagacttcagaaattcagtcacgtcttcaggttactcttctaattctatttctcttgctctttccaccacatctgtagtgacttcctccactgaagtcttgaatccctccaagtcatccatgaagattggaatcatcatcttccaaactcctgttaatattgatattctggcctcttcccatgaatcatgaatgttcttaaagggatctagaatggcagatcctttccagaaggttttcaatttaatttgcccagatccataagaggaatcactgtctatggcagctatagccttatgaaatgtggtttttgttttgttttgtttttttgagacggagtctcgctctgttgccaggttggagtgcagtggtgtgatctcggctcactgcaacccctgcctccccggttcaagggattctcctgcctcagcctcctgagtagctgggactacaggtgcacaccaccgtgcccagctaatttttgtattttttgtagagacggagtttcaccatgttggccaggatggtcttgatctcttgacctcatgatctgcctgcctcaagctcccaaartgctgggattacaggcgtgagccaccacgcccagcctgaaatgtgtgtcttaaataataagacttgaaagtagactgatccatgggctgtggaatggctgttatgttatcaggcatgaaaacaacattcatctccttgtctgtctctgtcagagctcttgggtaaccaggacattgtcactgaacagtaatattttgaaagaactcttttttttgagcagtaggtctcagcagtgggctttagtattcagtaaactatgctggaaaccagatgcactgtcatccaggttttatttgttccatttataaagcataagcagagttaacttagcatagttcttaagggctctagaagtttgggaatgataagtgagcagtggctttaactaaaagccaccagctgcattagtccctaacaagggagtcagtctgtcctttgaagctttgaagccaggcattgacttctcttctgtagctatgaaagtcctggataacatcttcttctaatagtaggctgttttgtctacactgaagatgtgttattcagtgtaggcaccttcatcagtgatcttagctagatcttctggataatttgctgcagcttctacatcagcacgtgctgcttcaccttgtacttctgtgttacggtagatggcttctttccttaaccatgaagtagcctctgctagcttccaacttttcttctgcagcttcttcacttgtctcagacttaactctagaattaaagagagttaagagttatagttaaagagagttagggctttgctctggattaggctttggcttaggggaatgttgtggctagtttgatcttctttacggaccactaaaactttctgcatatcagcaataaggctattctgctttcttcttattcctgtgttcactggagtagcacttctaattaccttcaagaaacgttgctttgcattggcaactaagcctaagtggtgcaagaggcctagcttttggctgatctcagcttttgacatgccttcctcactaagcttaatcatttctagtttttgatttccagtgagagacgtgtggatctttgctctacttgaacactgcagaagtcactggaaggttattcattggcctaatttcaatactgttttgtctcagggaatagagagacccaaggaaagggagagagatgggggaacagcccgttggttgagccgtcagaatacatgcatttattggttaagtttgccatcctatgtgggcgtggttcatggtgccccaaaataattacagtagtaacaacaaagattaatgatcacaggttaccataagagatacaataatgaaaaggtttgaaatattgtgaaaattaccaaaatatggcacagagacatgaagtaagcacatactgttggaaaaatggtgccaatagacttgcttgatgcagggttaccattaatttgtaaaaatgtagtatctgtgaagtacaataaagggaagcacgacaaaatgaggtatgcctgtatgccctatttttagcttacgtagacagtgaagatggtagttcttaagttttaagttactgtgctaattacatttttgtcactgtttggatctattttcctaaaggattacacaaatattttaaagcttttatgcgtgcatttaaatgtgtgtgtcctcaccaacagcttcatgcagacagtgaaaccccaagtggaagaagaagagaggtgcctgggtgcggtgtcttatgcctgtaatcctagcactttgggaggccgaggcgggtggatcacttgaggtcaggagtttgagaccagcctggccaacctggtgaaaccccgtctctactaaaaatagaagaattagccagtcatggtggtgcgtgcttgtaatcacagctacctgggaggctgaggcaggagaattgcttgaacccagatggtggaaattgcagtgagccgagatcacaccaccgcactccagcagcctgggtgacagagcgagactccgtctcaaaaaaaaaaaaaaaaaaaagagggttcccaggctttgtaccacctttcttgtgtttctctgcagtgggacaaaagttgcggttagtgggtagcctgaacttagagctgaagaggtgttgtttcttctattcctatgaaaaaaatagatgagcttctgttcttgaaagagccgtttaagaaaacatctttccaaaattgataatgaaatcttgcatcacccaataaatctgaaatttttggtcttttgattcagagaatttggaggcattcccattttgtgaagtcattctttcaaaaagtagacttcatttaaggatatgcatgttatagtaaccttccttggaacttttttttttttttttttttttgacacggagtctcactctgtcgccagactggagtgcaatggcacaatcttggctcatggtaccttttatgtatgctaaatgatgcttagagtatgaatgaaacaacagtaacaatgtaaatattaaactcagtgttgaacatggaagacatacttgcatatgaattggttaaaattgtgtggttaaccttatcattaaaagagtatttattctgataggtagaaatttaaaacataggttacagtgaaattgaagactgcccagatgaatgtgtaagactccccatgttttctactttggtaattgatgaaaatgttattcttgtaggccaaaacatttaatatatacttactctattatgcctgcctttttcactgtgactaataaaaaacaccagaaggatttataagacagtggatcaatttaaaaagaattcccagataactaatatgtgaaataaagcaaaatttagcaaaagggtgatgtgacatatttctgaaattcttttgagaagtaagcatttgttggtaatgaggatgtgattaatcctagaagatagaaagatagtggctgtagtgggttggatggcatgccgcctccacccccacccccccaacagacaccaagagatgtcagcctggaaggaaaagcatcttgcacgtgtaattaaggatctcaagatgagatcatcctgaattatctgagagaggcttaaatccaaagacaaggggtccttataagaaagaggaaggcacagaagaagagaaggtgatgcgaagacagaaacagagtgcagtaatacatctacatgccaaggaatgccaagggttgtcggcagccacgggaagccatgggtgagaggcatggaacagattttctcacagagcctctcgaaggaaccacactacaaacaccttgattttggatttctggcctccaaaactgagagagaataaatttcagttgttcagaggtaccaggtttatggcaatttgttatagcaatgaatacagcgactttttggtgatgtttacatgatttttggggacagatgggggttagtaggtggcagaaatttggggagggagcaagatgaacttggtaatttggatatttactgtgacttgattatgaaaagttttgtgttacaactaccagaaratagagagcagtgtttggtttgattagatgagaaaagatagattatgctataacaacctcttctgtcttgtcttgtgaactcactgtgccataccatatgaggtctagaaactagaattttttcccaatatacttaagttctttagagtcctctgcaatagtggctgcattaattagaacctactttttgtaggtttgattgaatttggactacatattctgacaaatagaattatttttctagtttctattaaataaatttgtcataaaagtcagaatgctttgacatattcccatgtacttacaaaggatggttgtctttttcttttctttcttttttttgtttggagacagggtcttgcttggtcacccaggctaaaggacagcgatgtaatgatagctcactgcagcctcaaactcttgggttcgagatcttcccacctcggcctctggagtagctgggactataggcacacagcactgcactcggctaattttcttctctttttgtagaggcagggtctcactatgttgcccaagctggtcttgaacttctggcctcaagcaatcctcctgccttggcttcccaaagtgctgggattacaggcatgagccactgcctctgacctcttttgtcctaagtgagtttgaggaatgtattttagttcctcttttaataccatgaagctttcaagttcatagctcataaaatgttatgtagctttgaattttttaatgtaaatgaaaatcagattcattttcgttattaataaaaatttcaatagtattcacatttagataagagatgcacagaatttttggtctacttttaaattaatattacagttcttaaagtaccctaggtgatgcctgttcttttgaaacagcagagattttattttaaaaatacgtttttgtgtttattacctaaaggagctattctgaaatttttatgtagaaaaatcttcttctgctccatccacagaagattttttatccatagatatttttgccatctcctttctcctctttcctttgttgtagatgatatgaaaagactgcttttttcaaaaattgtgtttttaaattggtgaattttgccatgcctaaagtgatctctgagatatcctccttttgggtataaacatttctgttaaatgttgtaaagagctttctataatagacacagtagactgtatttaatttttttctcccttcttggtagatctcttttggttaaaagaaaatgcgtcacttgcctcctattatagaagcttgtatgagcagccaggggtgcactctgcagggaaggcttggccattgccagtgagccttgctccactgtagctgccttagctcttcctcttttccagatgagcaggtgctgacagccaaaaaaatagaaaataagtggggagaattcaaatatggggaaaatattgtggaaaaaatagatgcttaatttttcttcttaatattatgtagaaagtaaatatctttgggtaaaatacatgaattgtagccactctagaaaacagatgtttaaaatctggcaaataatcttctgctaagttattacaggtccatgatttcatactggccagcatttgtaagttaatccaaatgaaattgtatctccttatttgaatttactgtacatttgataaagacaagagaattaatgtgatgctattgattgtcatatcatcacttctggccttttctgatagcagttcacagcaaaacaatttgtcaaaaaatagtgttttgttttgttttgttttctttacctgagctttgacctgcgtagcaatatgttgatttttaaggtatgttttgtaaattaaaaaaatgctattataaaataatgactttgaagagatggtaatatttctattgaacatattaatggaccactgctatcatgtagtttttaatttagaaggctcaattttagtttttattagaaagaatattgtttagtatcaaatgactattaaaagtatatagtgcaataaaaagaaagacgtgaaggaatgtggaaacattaaaacawaatcgaacctccttaagtagtagttatatcagatgtaattaaaagatgggatgtaatttgactatcaaatacttgaaccaatgcttttatttgtaatatatatatgtgtatatatgtttttgattaccaatattaaacacaaagtgaaacactattgatttgaagcactggcccatttaaaaataatttaaatggttaccccagaaccttgtcgtaattttattggggatttttgtacaatatatagccctagtttcgtctccaacgttctcacctttaagaaagcatttacatttcctatcctctcccaactgggagaatatgcaaatattataaaataaaattctcttttagaaatagttcctaaaacagtactttcctttaatacatttgcaaggatgaaatacaagttcagaggattaagatccttttatttgacagtatctctttaaatttacagagaaaatagtggcagattttctaattcccgctctttgttcttacctcttctactggaggttttggggtctgtgtcaggaaaccttattattactaaggtaatttgttaaggctttttgcttgggtgtacaccactgggattgagatgctttgtatttccactgctctgtgaattccttttttattccccccagcttctggggggaggcatattcaaactaggaagtttgaatagcagtaaaacacacatttttataccctttacaaagatctattccttccattttctttctccttccattccccaaatccttctttctcatagaaacatttcaaaatatagatgagtctttcaatatttcagcatacgttttctaagaatcaagaatggtctcttacataatcaacactattatcacacccaagaatattaacaggaatttagtaatattatttaatatatgattcataattggatttctccagttgtctgtagccgtctttttgtattttgtttttccagttcaggattaatttttcatttggttaaatctgtagttttttcaaatttgaaagagtacctcattcatgttttttgttttctataacactaatttaacttttcatgttgcagtaatttcagatttacrgaatagttacaaagatagtataaatcactcttatgtacgctttacccagcttcctcaaatattaacatgttatagaactgtaccacagttaacaaaagtagacagttaatactggtatgttattactaactaatctgtagaccttactcaaatgctgtcacttttctcacaagtgtcctttttctggttcaagacagttgaggcctccacgttgcatttagttggtgtgtctcctttgtctcttgtatttaatcagtgtataaatttgtatttaatcatcttgacaatttagaagagtgccagtctgtaattatgtggaatgtcttttatttttgagtttgcctaatgtttcctcatgaataaattaagattattcatttttggcaagaatttgtgttcttctcagggcatcctattggggttgcatgatgtccctgtgtctcatgtttggtgatggtaacttttcttttaacctgaaacatgatacttacccattttttttaaaggattaagtattttatttttctaattgacaagtaaaaattctatgtagagtgtttttatatatatctacacacacacattgtgaagtgattaaattaagctaattagcatgtattgcctcatatactcattagtgtgtgtgtatatatggggtgagaacatataagatctactcttagcaattttcaggtatataatatgttatcattacctgtggtcaccatgacatacagtagatcttttgaacttattcctcatgtctaaagtttgtgtactttggctaacatctcctcagtgtccccatacaaacacgataggtagttaggtaggtaggtagataggtagatagatagattttttttttttttttttagagaattcaggcgattgtctgagtcttgctcattctagatttaacttaatatttcctcatggttaggtttagggtaagacattttgccaacaacattaaaatgtcaatgctgcatgtttcattttgtgtttattatgtgattcctaatgttaggtcatcccactttgggtgataatatctttgatcatttggttggggtagtgacaaatgtgggcatatttttaggattatcttagaaacttttcaggaaaagaagctatagtaattaccattggctgactatttccaaatttaaaaagaaaggaagaaggaaaattagagcacagaggtttcatggaaccagaaaaagagaccaactccagttttgtctttttttcccctccctgggtgagggatctgggggcattactgtacatcattgttggctgtgttcagcagtagggcagtcttttggcatgttttcctggaactcgattttaaatcctgtgagtgtgtgtagtcctgaacacagtagtcattttgaaaggctttgtttataacctttgttgagatccttttagaagttccgtcagaatctgagcttattcttttaaatatcctcagcagtgactcatttttatcctgtgagggtaaatttgattttcataaatatcaaaagatcattctgtgccaaatatgattaataaggtcatactattccaggaagaaaaaaaagcataacaaaacgattttttttaaaaaagaggcttacataatgttgacattttaccgatgtgaagaaagaacagagtagttgggtttagtgtagcacttccccaggtgacttccttaaagctggcactgattcagccttctgaagtccagtgtatttattaacatattaacattattaacataccttgcgtatacacgagcacacactatgaagtctcatctttttatacattaaagtgtaattcagtgactagttctttttgtgtaattagggtggtttgggagttatttgctgactttgtactgtgtacagaccattttgttagtagctgtggaataaacaggtttatgtaggacttagtaatgctcccttggaattgatcacctaaaatctgttaggagagatgaaacgtgagcaaacatcataactgccctttataatactgttgttgtagtcaaacagggataaggcaatataaagctgggagtcaatgagttcagaaaaacagtgtggcttctgtcagccatcaccaagattttttttttttaatactttaagttctagggtacatgtgcacaatgtgcagatttgttacatatgtatacatgtgccatgttggtgtgctgcacccattaacttgtcatttacattaggtgtgtctcctaatgctatccctccccccttcccccaccccatgacaggccccagtgtgtgatgttccccttcctatgtccaagtgttctcattgttcagttcccacctatgagtgagaacatgtggtgtttggttttttgtccttgcaatagtttgctgagaatgatgatttccagcttcatccatgtccctacaaaggacatgaactcatcatttcttatggctgcatagtattccatggtgtgtatatgccacattttcttaatccagtctatcattgatggacatttgggttggttccaagtctttgctattgtgaatagtgccgcaataaacatacgtgtgcatgtgtcttcatagcagcatgatttataatcctttgggtgtatacccagtaacgggatggctgggtcaaatggtgtttctagttctagatccctgaggaattgccacactgtcttccacagtggttgaactagtttagagtcccaccaacagtgtaaaagtgttcctrtttctccacatcctctccagcacctgttgtttcccgactttttaataatcaccatgttaactggtgtgagatggtatctcattgtggttttgatttgcatttctctgatagccagtgatacagcattttttcatgtgtctgttggctgcatgaatgtcttttgagaagtgtctgttcatatccttcgcctactttgtgatgaggttgtttgttttttttctcgtaagtttatttgagttcattgtagattctggatattagccctttgtcagatgagtagattgcaaaaattttctcccattctgtaggttgcctgttcacgctgatggcagtttcttttgctgtgcagaagctctttagtttaattagatcccatttgtctattttggcttttgtcgccattgcttttggtgttttagacatgacatcctttcccatgcctgtatcctgaatggtattgcctaggttttcttctagggtttttatggttttgggtctaacatttaagtctttaatccgtcttgaattaatttttgtataagttataaggaagggatccagtttcagccttctacatatggctagccagttttcccagcaccatttattaaatagggaattctttccctatttcttgtttttgtcaggtttgtcaaagatcagatggttgtagatgtgtggtattatttctgagggctctgttcgattccattggtctgtatctctgttttggtaccagtaccatgctgttttggttactgtggcctcatagtatagtttgaagtcaggtagcatgatgcctccagctttgttcttttggcttaggattgtcttggcaatgcgggccctttttttttttccatatgaactttaaagtagttttttctaattctgtggagaaagtcattggtagcttgatggggatggcattgaatctataaattaccttgggcagtatggccattttcacaatattgattcttcctatctatgagcatggaatgttcttccatttgtttgtgtcctcttttattcattgagcagtggtttgtagttctccttgaagaggtcgttcacatcccttgtaagttggattcctaggtattttattctctttgaaggaattgtgaatgggagttcactcatgatttggctctctgtttgtctgttattggtgtataggaatgcttgtgatttttgcacattgattttgtatcctgagactttgctgaagttgcttatcagcttaaggagattttgggctgagacaatggggttttctaaatatgcaatcatatcatctgcaaacagggacaatttgacttcctcttttcctaattgaataccgtttatttctttctcctgcctgattgccctggccagaacttccaacactatgttgaataggagtggtgagagagggcatccctgtcttgtgccagttttcaaagggaatgcttccagtttttgcctattcagtatgatattggctgtgggtttgtcataaatagctcttattattttgagatacgtcccatcaatacctaatttattgagagtttttagcatgaaggttgttgaatttagtcaaaggccttttctgcatctattgagataatcatgtggtttttgtctttggttctgtttatatgctggattacgtttattgatttgcatatgttgaaccagccttgcatcccagggatgaagcccacttgatcatggtggataagctttttgatgtgctgctggattcgttttgccagtattttattgaggatttttgcaccgatgttcatcagggatattggtgtaaaattctctttctttgtggtgtctctgccaggctttggtatcaggatgatgctggcctcataaaatgagttagggaagattccctctttttctgttgattggaatagtttcagaaggaatggtacccgctcctccttgtacctttggtagaatttggctgtgaatccgtctggtcctggactttttttggttggtaggctattaattattgcctcaatttcagagcctgttattggtctattcagggattcagcttcttcctggtttcgtcttgggagggtgtatgtgtccaggaatttatccatttcttctagattttctagtttatttgcatagaggtgtttatagtattctctgatggtagtttgtatttccgtgggatcggagccatcaccaagatttaatagatgacatgtcctgcaaggtgggtccctggctacttctctgacctcagctcctaccactgctcctcctgctcacatactgttttccaggcatgtttactcacttgccttagcagacatttgttgagtcatgtgctgatgtggacactggggatacagccgtgaacaagcagaggaagatcctgccaccaagcagttaccttctagcacaggaacagtagacctagcacatgataaattgtgtattatggcagaagtggaaggtgctatagaaaaaaaaaataggggaaggggtccaaggagagtgtgggtttgtagtttaaaaccaagaggtcagagcaaaccccatttaaaaggtaacattgaaataaagacttaagggagttgaggaaattaatcatacagatctgaggaaaagcatgtcagtcaaaagtatcaactagtaaagaggccttagatgggagtgtgcttggaacattcaccacatcaccacaaccagagcagagaggaggaggaggagagcaataggagatactgtcagagaagcaataggggagtcagatctagaggtcttatagccactgtcaggacttttaacttttaccctgagtgagaagggggctcaccgtaggtttttcagcagaggtgtgacgtgctgtgacatgctcttagatatttgaaggttcattgtcatcactgtgttaggagcagacaatagtagggccaggttagaaggaagaagcctattcctgccacgagcctgttgctgtagttgaagtggaatgtgataggggcctctactgggatgggaatggtgaaagtagtggggtatggtttagattctcggtatcttttgaagatggagccaaaagaatctcttgatagactagatgggtaacataaaagaaaccgatgtaaagaatgactccaaggattctggctgcagtaactgaaaagagaggttgccttgtactgagatgtggaaagctattcaaaaagcaagttgggaagtgacaatcaagaatattgttttggacgtgttggcttcaaaatggtcattaaatatcaagtacacttttaagtagactgttacacagatgtggagttttcgagagcagcctgggtggaaaataaaaaaccgtgggattcatttttttcctgccttccagaggcctgttctaaaggcatcctgaaacacagaaatggacattggtacagacagagagaactccaggagagtaactccaacaaataaaaatcttaggattaaaaaataaaattgccaaaataaaaaacaaactggatggactgaattgcagaatgaagatgaacaaaagagagagtgagtgaatctgaagatagagcaatagaaattattattcagtctgaacaacagagaaaaaatcattgtgtaaaataaatgaactgaaccgtaggaacctgtgggataatactgaaaggttaaacatttgtgtctcaagtgttccagaaggagaggagaaagtgtatttcaggggggaaaaaatcaaagaaataatggttgaaaactttcctaatttggtgaaagatataaggatttaagaagctgagtaaacctaaacaagcccagagaaatccgcgatcagacacatcataaataaactccctaaaattcaagacttttaaaaaaatcctgaaagaggaaaatgcacaggcaattcaatggagaaagtgtgttgtaggaaaaattggacttccatgtgcagaaaataataaaaaagaaccttgatgtaaacctcataatttgtgccaaaattagctcaaaatagatcataaatgtaaaactaagtttttgaagctcatctcttgttctctcgagtgtaagaccaaggggcctagcccactggtaagtcctcagtgtgtatatttgaatgcgtaaattactgctcctggagaaaagagaatgagattaacttcaaaggatagttatacagaaaagattggagaattaataatatgagtatgttatttactttaactgcccttttttcattaaaattagctttatttatgtgttcaaattatgtaagtaatggaatctaattaattggtgattttggttatgagtattttaatttcctccttataacctcaaatttatgtcagtgtttattgctctcatttttaaaaattgctagtaacttgctctcttaraaaaaacaggttattcattttatgagtggcaggttactttcttattatccagcagtaatcaaggtggtcttatttacattttaatattctatagtgtttatttttgtatcaagttaaataaatggtctcaagaatcactttaagcagtctagaaagcagatgttgaaagacctacctttttctcagagtcattaaatagaatatgtagaaagttaatcaaggaagttaaattagttctgcctataaattaagaagagcggcagttcatttcccttatcttttaaaaataaaactgaattcactttttacaaaccttccagtttggtgactgcttttttgaacctctagtgcctgtaatgtgaaaaacagggtgtgaattgtttggacttaccatcagagagatatttcagtgtgtacctgtcagcatgccatccgacagacgtaaatgtcaagtctaatgataacaagaactctgatttggaataatagagttaagcttacattcctttaagaaaactgaacacactagctcagcagtaacatttatggttaaacatctgatgactagccatgtctacctgtggagtcgaataagtagctcatggcatgtgctttggagtgaggtccctcttggcttgtgatagagtttagatatttgtttccaccaaatgtcatgttaattgtgacccgcagtgttggaggaggggcctggtgggaagtgactggatcgttggggcagatttcccatgaacagctttgcaccgtccccttggtgatgagcgagttcacaggtgatctggttgtttaaaactgtgtggcacttccccctccttgctctcttgctcctgctctcaccatatgagatgtctgctccccctttgccttctgccatgattgtaagcttcttgaggccctcaccagaagcagatgctgatacagcacttcctgtacagcctgcagaactgggaggcaattaaacctcttttctttataaattactctcaggtatctctttatagcaacacaaatagcctaatactgttggaaatcccatctctatcactgaactgtatttctttagacaagttatttctctgtattatttatctcagtttcttttgtacaataaagataataataatgcctatatcataggttgttgtgagaattgactaggataatacatgtaaagtgcctatgtcattacctggcacgttgtaaggactaacactttatttttgttgttacttaatggttgtttgcgataatttttcttcatttttaatatctttaacagctttattaagttataattgatgtacaataaactacacatattttagcatataatttgataagttttggcatatatacacccatgaaatcataaccaagataatgaagaagagaaaaaactcttaaaagttttttcatgccaccactgaactgctttctgtcactgaagattagcttttgtttccagaatttgacataaatgttattatcccttacggaatcttttctttgcctgggttcttttcctgagcataattattttgatattcatccaagttaggttgggcagtctaagggctcatgtcgcttgtttcaacagttactgtcctttgttgccttatccagtgtcttgaaaactgttttttgagtttttcaggtaggaaggtaaatccagtctttgctaccctatcttggctggaagaggaagggctatgattcattaaattaataaatgcactattcttcagttgcattatttttgtgaaatgaccaaccacttaatcagaaaagttatcttactgtatatccagactttctatttttccattcgttgaaatcgcgccaaacyacttccaagatttgttacccacaaaggtgaaatcagacttaacagtgacgatcttaaaaggcatttggtatgagtagtttaaaggaccacttttcctttgaaatagacttactggtttttatagttacttgtcactcagagtgagcaccatctgtcaagattgtggaagagatggaaaaaaaatcctcagtgttcaggtttcttttctttactacgtatgtaaaattgacttttataaaataatctttttgctacgcgtaagattacactgtgaaactagaatgtttttatatttgtgtgtcttgctttccccgttattttttcattttaaagtaggactttgtgactatattgctggatcctgtggtcgctaggcatggcacccttgtgtggcagtgctattgtgtgatcttacttcatgcagcatgttgccagccctccgttgttttcttttcctacaatttcttccccttggtcttctaccttctgctgtttctttcctgacacctcatcattaaaactcacctgctgcctctacgatgcctcctccagtggggaaaccttgagcaccctaccctcagagcctgtgtccccttggtggggaatcttgcataccaaactgttttaatctcagttaataagaaaggaatagcattacttccaaatttaactcccagagcattcaaagacaaaagtaatattgctaccttttttaaaaaaaggaaaatatataaacactaataatgtctgattaggaaatcagaatcatagttggaaataattttgaggaatttcaaaatttcatcttttagtaattgaggatttcttaaaagtagttgtctcatgtcacttgattttgattcaaacaatagggaaaacagccccaataagtaattattgttaatgatttgatgcctgccatttagaaatttttaaatgcatacactgatatattcatacatacatacatacatagattttttccctaaaattattatattatacattctcttctgcagcttgctattttgatttaatgttaggttttagatacctttccttttcacttacaactcttacaaaaaacttctgttttaccataaaaccttctcctggcttttagtttgagatatacttccttaatcatgttaaggaactctcttgaaatgttgataatactacattttttgatactggaattatttagatagattttccattgttgacagagtctagcttttctggaatgaactgtacatggtagtggtatattattctttcatgctaaattgtaattctggattctgtatatgcttaaattggaatggtattttatgcatccatttttatagatgagattattagcccttaacattttaaaaggtatgtggaaatcttagtattaatttttagagatagggtcttaccctgtaacctggaactcctgggctcaactgatcttcccatctcggcattccaagtagctgggattacaggtatgccctaccacacctggctggttttttaaaaaaatttttgtggagatgagtgtcttgctatattgcccaggctggtcttgagctcctgggctcaaacgattttcccacctcagcttcccaaagtgctggcattacaggtgttgtataatacatttcttttaagaggtgattttatcccattttcacattctttacttggggaagaaaaccacatggcaaacatattttataaacccaytgtcttccagacttgtttcttgtcctctatgttctataagctattgttcttgagtcttgccagtgtataaggtgacaggttttgtttccatggtgctatgttgtaagttcagtgtttatgtttttctgtgcatatcacataaagatccttttttaaaaaaagtttagtgtttcattacttgcatttttctttagatgtggcgctgcaaagtgagtcagtaacctttgttgagtttcgaaaaaataatgacctgttacagtgttttgttctcgtttgttattgtttggaaaaagagtccaaaataattttattaaagtcacattactctgtagatagacataggccatatttttgagaattcacattaataacaattttgtatatgcaatactcttttttttttttttttgggagacagggtcttactctgtcatctgcagtctcagctcactgcaacctctgcctctggggttcagtggatkcttgtgcttcgctttctcaagtagctgggattacaggcgtccgccaccacacccggctaatgtttttgcaattttagtagagatagggtttcaccatgttggccaggctggtttcaaactcctggtctcaagtgatccgcctgccttgsccttccaaaatgctgagattataggcatgagccaccgcgctcgacctgttcctaatttttttttcaaattttgaaatgcagataatattatgtaccccattagcttatggggtacgtaaaggaaatttgtatttgatattggctctggttattacttttgtccttccatggacaatcacttaaaacctttaatgcatgaagctgtattttagaaagctattttggtactagtctcaaaggatagattgctctatctttcccaccctaatgaaactaggtcactggcatttggcacatctccatgatgtgagatttgatgttcagatgtgctgtctagaaatgataatgcattgtcagcaagaccacttttcatttcatcaacataatttccactgccctggaatcaatttattccttgacctgttaataattacacttgatcactagcatttcagtggcagagaaagcctctggaaatggccatagtcatccttttgggtgataagttatgggatttctgttcggcttggagatttggcctgttgaagtggttgacattttatgaaaacaaaggagcaaacttttacctgatgccgtgttargattcrctctgtcaagtggttgagaacactyatttaattatctaactgtacttttgcattacctttttttatggccaactttaaacatgcctagggaagttcccgttctattcccagccagaagcaagtgtttgaaaaatgagaaatcaccatagagctcctctaagattaatttttcacaggtccaagaatgcctaatatttaaaatgagctactttgaaatcagtcatgtatcacatcagtgtttcaaaaagagattgagaaaatatgggctgttacaaaaccactaacctcacctgttgctccgtggtgatttggagccctggagcagggctgcctggatctgaaactttgctctgtggccttttgggaaagtgacttgcctctctgtgtttctgtcctaatccttaagtgcaagagtggtcatgcatattttatagtggcattgggaggatgacaggaatgaatacatgtagaaggctttgaaagggttctggtagatcaccacccagtgtgtgttgtactagtcatcattgttactgtaacttaatgtgttttagtgttaatggatgtccttttttctcttttgctatcccagccccttccttgcctaattgttactctcttctgtgtggttaggagcaactagttcagtttaatttcccttagagagcaagtttcagatatagcatcattttgaactactaaggaagtttaattctcctaggattggtcatatagccttctttagcaaaattgaacaggaaccttaggtgaagcttggttagccaggtttatggatctggggccttttctatgctttaattttatatatttgactgtttagtagatgtttatcttccttatctgaagttcactttcatcttgttgttgttaacctacataaagatttatttaatgtggattaagtcctctgttatttagaaatataaattgagttgccaatctgatatttactttctcaatttttatacacttgactttgcagttatacattttttgctaattattcataaggcttacaactactactagtaattcaacagaaaataagtactgtattgtaaaatcctaaaggatttgagtttttaattcaagtatattaagaacacatccttaggtattgaaataagaaccttataacatcctgtcatcttccagtttgcagtttcacctctttgctagtgctgatgaggtcattgatgtgtcatcataacactctgagtgccagtagggaaggaactgtttcatttgattgactactgtattaacagtatctagcccattgctcattacatgataggtgcttagtaaatatttgttaaatgaaataaaatgattttctctatattttgtattttctaggatttttaggaggcatacccagaaaataggcttatatattttttttggatttgtttctgctaataatcagtatgctttgcacgtttgtattctgtttccatttcttttgttgctgtagtttgcttttcaataggcacagtttcagtacctgtttccctgccctacataacaccttgagagagaccttctcttgtgtgcccgttatttttaatccttagactcaaaagaacagattgtctttcttaaattcaaatatacctggtcagcccttttccacctctgagaagagagaaaagaaagtatattaagattctggaattatttgtgttttatggctgtgcagaattaaagtggcaaaaattgttcgtcaaagagctcagatccttttaagatgcaaaccactgaatttgtttgtcagtgattgctctggaactggaggtatccccctgccaatgcctggtttgggggccactgtgtaattattttttactgatttgcctcatgaatgtacacatatgcatgttatttttgatgccttaaaaacatctgttataaagacagagggttttaaatacttcaatttggtacctttattttgagcgaccttaaataaatgtaacattttcaatgccagttgatattgcagaaatctaaattgctgttcaaatatgtgaaatttatcatagtttttcaactattttcacttacagtgctaattaatagccactgaaccttaacactttcatactagtcagttatagtggaatcctgtcatcaccaatagctcctatagcagctattaggagataactgtgttacaaggaatacctggaagagttttctctttgatgtttatactaagtactcaagtgaagggtgttgtacaccatgactatagtgaacctttttgtgtgcatgtgtgtgtttttaaccttgccggcatcttaatccccctttccaaatctctgggtccctgctgagtttcagcagctttgtctctgcccagggcagcagggtccttatcagaagtgggcctctcgggtgtggcttggggcttcagtcctgcttcatggtgtcttactggtttttgccctttttgaacataattcttcagcattcctggtagtttcgggggccacccaaaaacctttcagcaaattcttcttcagctaaagttggtatccattgctagctgccaagaaacttgactgatacagctgtgtattgttctgttctcctaaatcccagtcagtgatgtatattgatgctaaagtacaaatgttatgtagtcagtattttgctctcctatttctttagagtatgttctatgcctactaggtcttacttkattttacagtgaagttttttttggtttgtaagtttgtgaaatatattcagctataattattttattgagtactgcttatgcaccagatacttgttagtaatggctggaaatacagtagtaaacagagacaaacccccagccttcatagagcttacattcgaggaggcagacggatacataaaatatatactatgttagaccatagtaaatgtggtgatggaaaaattaagcagaagatgggagaaagaatgtgaatgagaaggttattagaatgggtatcgggtgttttcagatgaatcctgatggtcttaagacagaggtgggagggtgctgggcactgctcccatttctgctgggccgaatggaggcccagggaggagcaaggcagacgcacagtgctctcggcttcaggatttcccttgactcctaagatgtgctgattggcccaggacactgacgggatgtgtagaaagcaacattttaaaagagtagcaagctgggggagcatgagagcaccttaagtgtacttcagcaggcacaggtgtagtgggattaaataggcaattattgtgggatgaagtttaaaagtacatttggatacaagaattgacattttaaatactttactataaaaattgaagcacatggcctattaaatctggaccatatgttcgttatcctaatgtctattttagttgtgacaccacataaagaatgtgtaggagcaccagcttttagaataacacaatttccagggggagctgctgttgtgtttccttatttaacatacaaaagcatttgatgcctgatactcacatgcttgtgcaatatatatagaaaagtcttggaattatagaaaattagaagcatatttaggccgggtacggtagctcatgcctgtaatcccagcactttgggaggccgaggcgggtggatcacctgaggtcaagagttccagaccagtctggccaacatgttgaaactccgtctatactaaaaatacaaagaattagccgggcgtggtggcgggcgcctgtaataccagctgctcaggaggctgaggcaggagaatcgcttgaacctgggaggcggaggctgcagtgagctgagattgcgccattgcactccagcctgggcaacaaaagcgaaacttctcaaaaacaacaacaacaaagcatattgaagattttgtattgcattatagaaggactaatataatatcttattatgcagaaaggctacatatatttgaagtaattgtcataggacaagccctactaaacgtaktcttctttcctcacttacattttttactaaatgccttagactgaatatttatttttgtcactgtgaatattaaagaaaactaagcagaagcagtcttaatatcttgttgattacatttcagaaaaaaaagaaatggcagaacattaagcctgaatgccatttgctataattactctgtgtgaaatataactggtagctgtcaagctttgattgaaatttacggaaggttgacaccagctgcatgtattaattgtctctgcaagcaaatgcacataccaccattaccatttggaagcatgctcttttctattgaatttgttgtaaagcattttttgattgtgttttgatgaatgctgctctaagttcagatttatcttttgcttcgtttctagcaaacaaacaaatgtccttttagctaactcctgagtacatctatatgagggatatttccaaatttgtaacactgaccatttggagaagggaaacttaaaaattattattttaaagaagtgttttgaaacatgtttctaataaaaatttatatatcttccctatttggactattaatatttgactcattctacatgaaattcaattcatgcattagtatttttataaggtagtttgatcatattaggacagttattttttcatcctttttaattgggcagtagcaacctccaactgaaatttttcwatgcatactattcataaaatatatttttaaaarcattgaaacaaacttattctttatatcaaagtgataaatacaggtgtgcaaacttatttggattgtgtacargtgtattttggtgggtgcattgctaccttgtttggtttgataggtaccacatatggcaccgggtaggtcaaatactgattctttattcattttgatcacagtcagaattgaacaaagattctaggtgcagcacaagcagaaggtgtttattccctttttgctctacaaggggtgtctactttgagtcttacagaagccaaaacagtgtgaatataacctaaattcatctgaagacttatactgagaagtatattggtatcattggcttattgagaatctacagtagacgtttgttgctttttagctgtccaggatctattctccttcctgagaacaccccagtttctatgaggaaagcacagggctgttcccactagggaagcgaaccagggccccctccacctcctttctctttgggtgtggaactttgagtttctgcagcctggggctcttccacagggctttacagtgggaggtggagcccagcagccctggaagtctccatggagatgtgctgaccctttccctgcatgttgccagttggtctctctggtctctgtatgttatcttttggagcctccctttgatggtctctgagagtcttccaaaaatcccctttccttatgctaaccagagtcaattttagttgcttacaaccttcacaggaactttaattggcttaagaagcatatccttttaaaatctaaaatggaattttaattttagtaaaagtgttcttctggctcacttgatagagtttgatgccagtttaaactccattgctgggagacagttcttacactagctctgtagacccagccaggtaaacactttgtttctctttgtagttaggttttgaagataaggtttgtacagatctgggtatcatgtcataaagggatttggcaatgtttttttgttttgtggaatagtatttaaaattttaggaacgtttcccagagcacgagtgtttaaagccatcattggtgactggatgctgtgtgtcataaaggggtagctgaactcaaacatttcttcaactgcattttgtatcatgtagttttattaaaatgaacaaaatatatccctcttttccttctcgtaattttaaagtgacacggttagaagtataacatgactaaacttgaaacattacatttggaaattcattaatacagaataaaatgtacttttctcattaaaggcacttggtttctattgaaattagaatattactagcagaatcatatattgaaaataatttaaatgtttatctttcaatctaagtatgaactaatgaaatggaaaatttaaacgtttatatttagatctgtcactacatagtttttgtattagactactgtctgtctctatcatattttcactgtaggccttccagacacgtaagtgtttctgtgaattaatctatgttttatgagggagttcatgaagactggtttcttagatgcttagaaaatattaattatctggcttggcgtggtggctcacgcctataatgccagcactttgggaggctgaggcaggcggatcacgaggtcaggagttcgagaccagcctggccaatatggtgaaaccccatctctactaaaaatacaaaaattagctgggcatggtggcgcacgcctgtagtccgagctcctcaggaggctgaggcagaagaatcgtttgaacccaggaggtgaaggttgcagttagccaagatcgcaccactgtgctccagcctgggtgacagagcgagactccatctcaaaaaaaaaaagaaagtgttaattatctgaatcataccacctcagtaggataaaccttgatataatagtagtcatgccagcatcttgttttatattcttgtctattaaatacatgcwtagatattgtattatgcatatccttgaatatatttagaagcatcacaattgaatatgtatggatttacctcaaagaagactgggaaatagttacaactggcatattgtcataaaaactagaagtattatgggttttaaaaaataggtctatgggccgggcgtggtggctcacgcctgtaatcttagcactttcggaggctgagggaggtagattgcctgagctcaggagtttgagaccagcctgggcaacacggtgaaaccccatctgtactaaaatacaaaaattagctggatgtggcagcgtgcgcctgtagtcccagctactcaggaggctgaggcaggagaatcgcttgaacctggaaggccgaggttgcagtgagccgagatggcgccactgcacttcagcctgggcagcagagtgagactccgtctcttaaaaaaaaaaaaatgtctaggaagtgttatgtttttctcagtgtgtgtgtggtccttgcactttcatatggctgcaaacactttaaattttgtgccctcccaacatagatatgagttatgttggartgagtttattttaaaccagagtatgttctcattatagaaatgttacataggatgagaagacctatggaatactgctgaagcctaatttaacccaaagtttaggyggagcactttgtgctttcatgtataaaagaaaactgtttctgcgtgaataaagttttaatggtaaaaagctactgaatttggaatgatgatgtttattacgattgttggtccttgagtggaggttgactctgtggggttttagtctggtcttcattttttctgcttgagaacatcctcctggtcatctggagttaatgtatgaagaccagagcagccygtagctgaaactggaagttaggaggatagatctgtgagtccagaattaggggctctgggcaaragtgcaatatctgtgggtggaggggctggaacyagcaaatccgcgttgtcatcttccaacaactcatatggaaaaggtggtagtagtgttaggtgaaggaatgcatttacagagtagagaaaaggggctaggaaaggggaaatgagctccctacatcacctttctgccctgcctgcctggagtactcagtacctgagagaagaagcaaccaaatgtttctgaatcatagaccgaggctcccttaaaccactaacagcaaggatgcagcatttcagtggaatgcttttacctcttcagttgcaaccactaccaagggagaatgctgtgtactccctgtggtagcttcatacttgctttccacttgcggaagactctgaggggcaagcagatgcggcccaaaggaataaaagtgcaggcaactgaagacatacattggaaaaccttgagttaacctactcggctgttagagccattaaacaagagcaagacaccgtaagaagggagcaggtgaatggtgaaaatgaaaaacatgggcctcatcctacattgtaaaggtttagagttaaggagacagggtttaaaccattaactaattgtgtgacaggctgctaattatggcaaggtacttgggtctctgatcttttctttctctgtaaaatgaaggtgatgatagtatctgtattgcaaagtttttttttaaagacattatatttgttaccttttaaagactgctttgtaaactggaaagtgccatacacatgttagttatcccatggctttttacattagtagctggggcacctttctagggcatgcattgctagttctaagtttcaatgatgcatctgtaggctaagctgacacttccctttctgccatctggactgataatcaagagacctggattatagtactggagatctggttttgctcctgagtagctttgtgcttctcagacttcycaccaaaatataacatacacacacggagtgcactagcagtctgtcacatgggcatactttgtctaaaatgtcagtttaataattttttataaagtttgctatctaacccttaaaatatatgtttatgttcaactatacatacctctaagttacctgtgattaagattgcctgagcctgttcctttatgtgccccagtcataggggcatacacacccaactcttgaatttttattacttgttaaagaagagtactggactctgtgaggcctggtgtacctttctggaccattattctgtgaacctgtgtagcagatattgcaaagaactcttgacctggttacaaaatcaaattatatgacactcatttttatcaactggtttctagatattgtgtaatccttacccatatgagccagttatagagggctttgctcagggtttattattgtagaggccacaaattaaccaatgttattggcttacagatatttttgaaggttggccatcaagtacatgacctttcattgtggtctttaccctacttttgtgtgtgattgtaactttcctttattttttatttttatttatttatttatttatttatttattttgagatggagtctcacactgttacccaggctggagtgcagtggcgtgatcttggctcactgcaacctctgcctcccaggttcaagcgattctcctgcctcagcctcccaagtagctgggattacaggcgtctgccaccacgcccagctaattttttgtatttttagtagaggcggcttttcaccatgttggccaggctggtctcaaacttctgaccttgtgattcacccgcctcagcctcccaaagtgctgggattacacgcatgagccaccgtscccggccgtaactttcctttataagcttaaaaatcattaaggctctgggtcaagaaagcagactagttactgagcattgtcatctgccttctcattttaaggcttcaccaaaatgaaaacataaactataaaagagaaaaaaaaaggtataattacaaacatgaataccaaagaaaacgggaaaggaggcatcaacaaatgagatatataactctttaggaagaggggattgattttacagatgagacgggttgaaaagccctagcctaaatgtactgcaaagaggtttctgaagatatgcaagttttcagaaaaactgacttctttagacatgagacgaaattcagaaaactaagactcctgatgatatggattttgatgttgcacaataaaatccttctcattctgtggagtctactgctcgatagtcagactgttttctgttcatatcaagtaaagcctgcctattggggcaaatagagttcagaattcccccttaagggaggaggccctcccccaaaatatgccaactgacacgagtggaggagaacagttcccactctcctggtgttactatcttaaagaacacataaccaagaggtcatggagtacatgaggagaattgacagtgtgaaagaaaaacaactgagccttaaggaaacagctaatacagaaacaatgatattacaaaaaagagctattaggttttttttaaaggattgctgaaatgaaaatttaagtagaaatgtgagaaaatgaagttgaagtaaccttctaaaatgtagagcaaagaccaaaaaaaaaaaaaaatgcaagagcaaatatgtggggaattaacctctgaggtttgacatttgacttaatgaagctagagaaaaggaaagagaggagaggaaattatcaaaatagtggaggaagataattcccagagatggaaaagacacacatctttatattaaaaagacccactgaaagccagaacagttaatgaaaaagagtcactgtgggtgtgtatttgtgaaatttcagtgctcggaggattaagagaagatcataaaagatttcagagaggaagaaaaacaagttgcctgtgtgtgaagaagtattaagctggcatcagttgtttcatcagcaacatggatgctataagcattgcctacaaaacccaaaggtaaatacacttttaaacctagaattctgtacctgaggtgtatatagatatatatgagatagcaaagatatgtctagatataagatagcaaagttaagacattttcagatgtgcaaggcctagaaaagttagcttcccaaatacctctttttgctttttagagataggatcccactattttgtccaagctgttctcagtctcaaactcctgggctcaagcagtcttcctgccgtgggctcccaaagtgctgggattatagttgtgagccaccatgcccagcctcccaaatacatttatcagaaagatagttgagtatgtactccaggaaaacaaagtaataaccaagaaagagagacttggccttcaggaattagaggaaccaacctaattgcacagtcaaagcaggtctttgaggtaataatggctatacaatagtccagaaaacagccattccaaattggaacaggagtacaaaagactcttgaagcaaaacaatggttgacaacttggggataacatctatctccacttcaaccttatgctcccagaaaaaaagcaattagaaatcctaggagaacctccactcatgcctcagtttgtaggggaaggtcaggcttttaagcaatcagcaagaaaagtgggtccatttaatcttaaaactagatttttaaaatttattgtagtggtcagattatgacattagatttgtaaagaatgaaatgtaattttagtatacctcttggcctggtattaaattgtgtatatacacacacacatataacacatatatgtgtgtgtatatataatattgcagatactgattactgattttcaacacagctagtctgtgataaagtcttgatagtggttataatcttgatgttataggaaaagtgaagcttacctaaggtgggttgtggaagctcagaggaaaagtgtgttgtggctccagtatcagtgagaaattgatatacatggtggacttggtgaaacagagaatgtaatcatattctgtatacttacaatcacaactagtagaagagctaaaaattgggagaggcagttgaagattagtgtagatgagctaaattctaatttttaaatttaggagaatcagtagacattatgtaaaattattaaatccagaaacctagatacaagtttactatttagggatatagagatgactaccagaagaatgaaatacaagaatagtcagaaaatttattctgaggaatgggtcatggtatagggagggaatgtggaaacagaaattctctagtgttattggatttattctacatttacatattttgagaaaacaaaacacttaaaatatttcctaatttggcgtttcactaatctagacctataatgaagttttgttaaagagttagtttaaataattgtctgaactctttgatactagccttaaataaaataatatgaaaactttttcttcacacttggcttttaaaactgagttattttggataacgacaacaaaaagtcacatgaacaattatttttcccattattaaacctaacactttttcctgaaaacatttgtgcttttttactattagttgtatagatatagaaacaagtgaatacagctcacttttaataagtgtgaaattcagccctgaatctggtagactaagtcattgatgacacaaatcatatcctgtggtaaaccatggtatagaagtgaggatggggcttcagaatcctttccaacagtgtattccaagcatcaaatagacatttggtcatttgcagttgactcaaaagcaaagacctagtttgcgttcttggcactgttctgcttctactctaaagataacccatagtagagtgacctggggagaacatgtggagtaccatcttaaaacacagcaacactgcagtaactgcagcagaacaaaagtgcctgcaacactcaagaaacatacctgttgccatggccacttgcaacttttgtggcctgtaagtgagatcgataattcctatttatccctccccaagcaaatttctactatatgactatatctgaaagttctgtgattttttcatcctggcagaaacaacttattcacaaaacaggcagctggttcactgaccatagtttgccagcccttgatggagtagttacggagttttgaactagatcacctaggcatgaatgttgtccccaccccacgcccccaccccactccaattgtgggacttcgttttctaatctttagtgttaccgtaatggatgtgtcagtgccatagagttttgtgaggattaaatggagtgtataaagtgcttgagaatggtgcctggctcatagcaactgctttttaagttttataatagctgttattgaaatagggtacaagtggctaagtttactctcatatgctggctcagcctggtcacagtgtttggggccatgttcatgttcagtggaaataatgctgtctgattagctgtgttggaggggcgagggaagaccgtaatagctggtctaggtctttggtacctcttgcagatgatcctgtcatcctcagataacctcttcatgattaggaatgcaatactacattaaaatatttctattagaaagcagatttaattcaaaattatctcaggtacactgggttttacagaaacataactgatgtaaatttaaggttggcgagtaatggatgtataaactactctttaatgatgttagttaactcgaatttatcttgatgacattttgcaaaaataatatttaaagaacaaagcagtttgttgaacagtatgaactaagtggagtataaacatgaaatgcttttatttttctctagttattgccttcaactgaacttttaaaaatctttttttcccattggtttatgtgttgttgactgactcagtaactttctagtcatttttggttattcaagagaaaggtgcctgcttaatttggctcagttcaaaacttcattctcaagtctaattcaaaagtaccctttttctatttccagagaaatagaaagtaacagagtaacagagaccaaatgtgtctttctactttaaattactagagaattgggcaaatatatggaacagctgttttcatacactggattacaggtagcacagttctgtgatcctgagagaaaataatctactaagggaagtcctaaaatcactgctgctttctgcctagaggcattttccagactacagtgaaagaaagaggaacctaggaattctgaggaggctgaagtggattaatatgtgagatacaacacaggataggaagtagctacacagaagaacagaaatttgcacgagggtgaccttgagttggttggwgattgccaagatgtgctttcatttgataaaactcaacaaagccacaaaggaactaccagagaaagagaactgtaagcagactaattcccagagttcacacagaagtgaactgggaacatttaaaattctgaatagcagattaaagaggctttgtaggacaccctgaagaaagtagaaacccagaaggattatgctttggtagggccatactatccttaaaataaagaattctctaggcctgtcttaacaaagcttagaaacaagtcccaaaaggatccacctgcttggcaaagaatttaactgcctttggtacatcattcaatatgctttgaagaaatacagcataatccagcacagaacaaaattacataatatctagcaaccaataaaaaagtagtagagatgatgaagcaggaaaatacgacccaggagcagaagcagtcagtagaaacagagatgatggaattggcagaaaaggatctcaaagccacgactacrtttatactcaaggatttaaargaaaaaaactaataagagaaatggaagatataaaacaactatttgagatgtctaggggtaaaatgtacaatctctgaagtgaaaattttgctgcatttatttacttcagaaattgtaaattttggaagtaacagcagattaggtactgtagaagaaaagtttagtgaatctgaagacacagaaatagacaccgtggaaaccagagtacacaaagaaaaaagacctaaaaactataacgaacagagcctcagtgacctgggtctattgtatatacatattatcaagtggtccagtggatataacagtagaagtggggaaagaaagaatattttaaaaagtaatggccaaaacttccccaaattgagtgaaaattaatttttacttctgcaagacttctattgtacataatgaattaacttctgtcctgtgcatctaagaggtatatgtaccatcattgggatattttaaagtattcatattatttcctgttagctgtattctctcataaagccctagctgagaaaggccactgttgatcaaccactaaaaatggagagaaatacagctagtaagccagtagtgaggatagaatggaatactaaaaacactcattccaaagaagacaggaaaagaaagaagagcaagtaacaacaggtgataaaaatggaaaacaacaagatggtaagtttaaactcatgtggatagttacattaaatgtaaattttgtatacaatacagttagaaggaagagattgtcagattaaaccagtagattcaatggcatgctgtttataaaagacacactttaaccataaacatacagtataggtttaaaactaaaaggatagaaggagatatgccatgctaacaatagaaaagaaagctggagcagctatgttaacaccagacaaactaggcttcaagacaagaaatattacctaagataaagaagggatgtttcataacaatagaacttcaatatacatagaatgaaaatttccagaaataaaaggaaaaataaataaatcaactgttttggttggagattacataattgatagagcaagtaaaaagaaaatcagtgagaatatagaaaactttaggtgtattaggaaacaatttgacctaacattttcggagaactcaacagaagaacagaattcacgttcaaaatgcacgtggaatatttatcagaataaaatgatggaccatgaaacctcaaatttaaaaaactgacataagaatatattctctgacaccagtggaattaaattagaaataaaaaaccgaaagacatatttaaaatctccagataattggaaaataaaagaatatacttctaagtagtctgtgggtcaagtaagaaatcacaagagcaatttgaatgtatttttgaatttagtgaaaatgaaaacattaaattttgtgggatgtagataaaacaatgcttgaaggaaattataactttaaaatcttaggaaaaaaggtctagaatcagtgatctaaacttttaccttaaaagaggaaactagtgaaataggttatgcacaaatagagaacaatcagtaaaaccaaagctgattctttgaaaatgtttaaaaaaaaaaagccaacctgatcaaggaaatgaaaggtggtaggtcagaggtgaggtcagagggagacaggacacaaatgaccaaaatcaggattgaaagatcattcaccactacaaatcctacgacatttaaacagtagaaagagaatattatgagaaacattataggagcaaattcaccaacttgcaagacacaattaccaaaacatgacatgagaatagggaatctgaatacttctgtacttttttaagaaattgaatttgtaattaagaatttttccacaaagaaagctctgagcagatagcttcactagtgagttcagtcagccatttaaggaagaaatattatcatttctactccaactgtttcagaaaatagagagcatacttccagactcatggtttgaggccaggccagcattaccttcctaccaaatacaaaaatagttaatgaaagatatatacagacaagcatccctcatgaaaacaggtgtaaaagtcctaacaaaattttagcatatcaaatccaataattcataaaaagataatacatcataaccaagcaggatttatctcatttataaatcaatacaattcacaattttaacagaaacaagaattgtgtggtcatctcaatgttcacagaaaaagcattggacagaatttaatattgactcatgatttcttaaaaatttcataaaatagaaacaaaaggatacttcctcaaactgacagaaggcctttacaaaacatttacagttagcatatttagtgatgaaaaactatatgcttttctgctaaaaggggaagtaaacaagcctgtccactctcgtcactcttatccaacattgtcccataggtttttgccagtgcaataagtgagcaaaagaaataaaagacatacagaggctgggcacggtggcccacacctgtaatctcagcactttgggaggccatggcgggtggatcacctgaagtcaggagtttgagaccagcctgaccaacatggtgaaaccccatctctaacaaaatacaaaaattagccaggtgtggtggtgcatgcctgtagtcccagctacttgggaggttggggcaggagaatcccttaacccaggaggtggaggtttgcagtgagccgagatcacacgattgcactccatcctgggctacaagagtataagagtgaaactccatctcaaaaagaaaaaagaaaaatacagaatggaaagaagaatttaaacactgtcttcacacatgtcatgatatgttcagataaaattttaaagagtctaccaaaacacttttggaactaataagtgaattaagcagggtcattggatacaagttcaaaatataaaatgaattgtggttctatgtactagcaatgaccattgcaaagtaaatttttaaaaatcactaaaatttacaatagcattaaaaaccatgaaatactttaaatttaacacaatatttgcaagatctgtagactcaaaactaccaaacatgactgagcaaaaatgaaagaagacttaaatggagacataatgtgttcgtggatcagaagatgaagtattttgaagatgtcctttctctttgaactaatctgtagatgcagtgcaatcctggataatatacttacagcgatttttgtgtacaatggcaaggtggttctaaaattttgatggaaatgcaaagagcaaagttggtagattaaacactacctgatttcaagacttactataaaggtacagaaatcaagacaccaggatactagtgtgagaacagacataacagagccatggaacaaaatagaaattccagaaatagacctgcacatacatatatgatgagggacccattggtggcaaggggctgtgatctgtttgttattctcctccactttcaagggagtggcagtcctctccaggacccccttcaccccattctagatcttgattccttctctctgttggggtgggaggaggctggatcaagaggctcctcgcactgctgctgctcctgttctctgggtggcatgtgtccattgctggctctcctatggtttctgttggtgccaccgctccctgaggtaggaggtctgactacagatccccatcttgcactgccactcgtctctggcagtgcccagtagtctctgtggcagagtctctagtagtctctgtggcagagactactagctgtttccaaataatggctggatctttcttccttttagtaataatactgctaccctggttcagatccagctagatcaacgtaaccattttagctctacataaccattttagcctcccatatagcttggagatggccttatggcaaagtttctgcccacatagatggctgcaatgtgaactggagaacattctcatcaacctcagagacaagagcaacacccagcgggtggcagaacaacacgagagataacccaagaatacctacaagtttgggatattttaaaaggagagagaagctttgatgttttttaagcctatgttatttttgtccgctgaataatcgtaactcatgtctttgcctcataggctgtctctctgtgtaagggtctggcaaggtagctgcagcccaggtaccttccatgatgttgaggagagactctcctatcctcaccacaccagagagtaggtatgcaggttgccaccagtgttctcctccctacccactccctcacttttcttttcattggttcagtagaaggaggggctgtgcagtaagtctgccgcttgagcacagggacagctgtcactgcagtgctggtctcctgttcttggaggcacctcagtctccttgacctcttagacaccctcctacccccaaggtggggaaggagcaagcagaggcaaaatcccagccctccttgttaagactacagtgactttcctcctctcccttctccgtgtccgtaatgcatagctggaaggaagtgtctgggtggtgatgccagtagctgtgctggtgccatgccaggtgctcttcatgagcaccaaaggagggcaggctcaggtttgttgctgtctttagaatctggggttctcgatagtctttgccctcaggttggatctcagtctccagattgtgggtagcaggtcagtcccacttcctgtctcattacaagatgtcatatttcagaataatcttgttaatggttttattaacaaatgttattttaggacagatttcatgaagtgttattttatgccactaaataaatcataagcttaattgctacagtctgggtagaagcatatttgttttacagtataagcctcactaactgatttaatggagtagccaaaagcaatttcaagtacttccatatattacaaatgatcaatctttgttgtttctaagataagatataactgaaataaaatgtttacatgacattatttaaatttaattatatttaattcctataaaatggaagataaaatgccagaacttagagcttatgtatttttaaaatagagctgcgtaacttatagagcctcaattcatgagcaactagcttgctttttgaaaatgaaaaagagaaaaaagatgacagtttccaagttaattcacattatacttttgattataaataataaatgtcatttctaaatgatcactttgctgtgtaccaagttagcacttgatagttgaaaataaaaattattttatgactactaacttgtaaggaggcagtataaatagcttttatatgaaaaaatagatatatatgcccaggcatatttaatcactaaaaattgcttatcaggacagtcatggaaatatccttctgtaacagtttctctcagatctatttcagacttatgcatctgttactatatttatctttatcttaatcagcccttgctgtgaggtttggttattttattacaagcagctgggcaaagctttttcttttaaaaactacattcttttgtagtgctgccatcactcacattacacacttggacagcaaaagcacgtaaacagtagaactagatgaaatacttgatgtcactatatttcatgatactgtaacagaaaccactccttcgggacgatataacatgaaagcattacaatttttaaaaatcttaacaaaagatacagtcagtgtatggatgatcgctcttagagtttttgaacatgaaacttcttttcttatgctgggtttaactgtgactatatttactcatctgagggttaatatcatgccaacatttaactagtttgctctgatactaatatatacatactagtgtttagtgactttataagattattagaagtctacaattccaaacctctggccgagatgagaactttttaaatatataaacccttttataaatctaaccttacactttattccaactttggtatgacagtttgaaatgttttcaattccaggctataaattccagattcagttttcctttgagtttatgctgtataccaggtcctggggtaggaattattccattgtctcttagttttatgtcaagtctaaaaggtaggttactcccatatcaaaaatatggaaactgagtcttagaaccttttccaaggtcacataggtaattaaggatatattgattgtcccattctgccatttaggatttttgttagttaagagatgtgctgtgatattaggaaaatgatgttcagtgtaaacatattgttgcattgatgtcatacgaatggttgccaatataggcagttcttgacatgttttattaactgaagagatatggacagcttgctattttagattacccatctcttatgtttagaattcgtttttgtttctactatcacacttttaatttagtcttctgttacctgccctcagagctaatccagcatcttacagttaaactctggaattctatcctccatacatttatatccatgattgctaaatgaactttacatcaaaaccagtggttcacattgcttactaaagaaagcataagctcatcctggcattgaacactttattttcattgctcagttttgcccttcccatcctgtctgcaccccgtctcagccatttgaggcccctgctgttgttgggagaggccttcttgttcccagtgcccctgctcagggaagactttccgcagcttcctcccatagtgctttgtttaatcctcttacattacctttattttagccccaagttataaaatctgggaaattcaagtcaaccagtaagtttgtgcacaccatccagagatattcttcacagatgtgcagtcttcctgtgtctgctttccgggagaggcctgtgcactgaagacaattcagatttactttattaacgttctttctgtgaatttgtttatggatcaatctttaagtatgccagaaaggacattagttttatttccatcgtaattagttggaaatgtaattagttggaaatgtaattattttcactctgtacttagcttatttatttgacttaacgttaattttttcacaacatatttatagcttgtctccttaaattgtgctttatttcataccattaaaatacaattttgtatgcagaagaattacttgtattaacactttaaagtatacaaagattatccaccacatagtgatatatttagataaccttgatagactaatctgaaaggaggtgctgagtgttaattcacatggagccccacaagggggtacagaaactgcttcagtgagcagcttgcaaggctcctgatgactgcagtccttagctctctagataccaagataagggatcagagaagagccacaaacccgtgaaagtcagctcctcattacacttgacaaaaaatttggttcaatgtaaatagaaaggtgtttgttctgggctaggaggtttactgtgatgagcatgcagtacatacagccttaggcccatgaaataatactgtaggtttacctcttcttgggtgttttattataccccataatttattttctgctttcacagagtttggtgggatgtgtttataaatttaacatcataacaaaaatattatttacaagtttagtttttaggctgtaagtcatgattttctgataaatatgaatctctcaaatcagagtatctgataaatttccagagttctagttagttgctcactttacattataccatgtagaaagccctaatctgtgcatctattaaacattagaatggtaactagtaaattaattttttcaaatttcccttgagaaagaagtaatttgtcatgtagtccgaggttgcaatgtttattaggtacgagcttacttttcattctgtatttatgaaagattattgtagaatcttggtaaacttaatcatttcaaatagtgaaagggctttgtttaagaaattgtatgatgaattattctctgaagagtaatggaccctagcatactttcaaaaattttaaaccatatgttggatgtatagaaaaagacaaccaaaaaaatcactggtattaacaactactacagaagcaaaaagtttgcgtattctcattacatatacagctatatcatatgtgattatggtccagtagtaaaaatgtaaaaattaaaagattgttttggtacctccatgtcaaaaggtcaatgctactggctttgtttctttgccttaaggcttttatgatagcttttattctaatgtagtcaaaatatgtattatatccacatccactgataccttagtagtgttgcacttcaagtattcttttgctgtctatttctaatatcttgcctctttggtaatccaggtgccatcctgccctttatgctactctagctgggtggggttgggagtcagtgaagatggccacacacagtctttgttgtcatgagagagaggtagcgtagtgatggatgtggtcacactgccaatgacagcctcttgggggttctgcaaaatgagggtgatggcaccacctcagagaatttatgtgaaaattaaaagttgataaagttcttaggacagggcctggcacataataagaactagatatgtgtcacctgctgctgttttatgctttttttccaaggcatcatactaacgtgtagctcttccttgaccatatgtacaagttttgtttttaaatgcctactacttttttcctaaaaaaaaaaattcggccggctgcggtggctcaagtccgtattcccagcactttgggaggccgaggcrggcagatcacgaggtcaggagatctagaccatcctggccaagatggtgaaaccctgtctctacaaaaaatacgaaaattagctgggcatggtggcgggctcctgtagtcccagctactgaggaggcggaggcagaagaatcacttgaaccggggaggtggaggttgcagtgagccgagatcgtgccactgcactccagcctgggcaacagagcaagactccgtctcaaaaaaaagaaaatcctgaaaagtaaaaagagattaaaaaaaataaaaaggttgaccgaagattgatagattttgtcaacagcatctggagctcagttagacttgaaccgtttaacagtaaggaggcctttgaaggtactggaatgcaggaaatatttatcaaccccttaccacattataattacataatcacagcacttaaaggggcagcgtgaattattctttgcttgatcagtataagaatttatcygaagagttgctagaatagatgagggctgttgggttatgagggaatgaaagagaatgctcaggagcagcaggagtaaatggaaagtttactctatcctggcattcactcgacatttggctccctttccctttttcttttacaggctctttgggagcttatatcaatggaaaccacagcttctggcttttataatgaatacatgatcagccagtgattgacttgtatttaccattctccagtgactcctctcagaaatccagctactttgtaaatagtaaagacccatcatgagtaaatctcctatgagtattcacactctgaaaacacacagcaaaggcataaatttcaccttggcagcctctgcattatagaaagacctgtgagaggaggtgaaacttctttactggagaaagattagtttcagcttaggagagaagagctcattttcatgtcttgataagagctcagcacctcaaccatgtcattgcactccaaatgttggagcactgctgctgcacctagaggggactggcaaggagaggacatggcgacctcccggaatgttcataatggcaagcccatcctgtctaccttacctaggaggtgatagaaataagattcccaaaggtaaaatgcatctttgtggtacgtcggtaacccctggtctggaccctaggctggtgccctatctcttctgctgcagccgtgtgtggtgggctcacagctcacccatgtgctgaaggaagctgccactccacccacgagtggtttcttctctttatcaaatacttacttgcctttacaacacccaggggatgtgctgatgtgtaatattagaagtcctctagagcagaaatctgtatccctctctaagttgaaggaaacagggagctcacacttggtcatccgcagtctgacagaggcttgtcttgagggcgactctctgccgtcaaaagacggaggacatcagtgattcattaaatattggaaactagaagtttctgtttactgagctttaaatgatgggtgctgtactccagagagaagaaaacataatgagtatgtcctcaacattttcttagggttttagttgcctgagcaataaaatacgggtatgcagattacatagttgctgcaaatatgtagcagtggcaaaaaatactctgtagtgatttagaatcacatactagcaaaaatactgcttaagctaataggtcacacatctggcagctccctgggaatataagagactcacctgtctccgtgtgtggaaaaggcaaggggcaagttctcctgctgtaactgatcctcagtcaggacatgcagtgaacaagaaaatgtaataaatagacactgtgtttgctgagtgatacagtggcctttagggccctttacagaatgctttggtatgagtgtggtatcaagagaatttttcagaggagtgagaaaaacttgcacaccatggcaagctgggatgggtgagtcgtgaggagtgggtgaggtgggtgtgcactgggagggctgccatgtgctgggcagcaggtgcggtctcagacctccgggactccaggctcgccctggcaggtggaggccaggttcttgacagctcctctgtccttctgcctggagacaattttttaagtttttcattttttttccttctttctaaaagaagaatttagtggagaatacaactggaacccctgattttttttttttttcttgagacggagtctcactctgtctccaggctggagtgcaggggcactatctcagctcactgcagcctccacctcccaggttcaagcaattctcctgcctcagcctcctgaatagctgggactacaggcacgcaccaccgtgcccagctaatttttttgtatttgtagtagagatggggtttcaccatgttggcaaggatggtcttgatctcttgaccttgtgatctgcctgcctcagcttctgcaagtactgggattataggtgtgagccactgcacccggccagaacccctgatttaaaaacaattgcaaagcctttttgtttaaaatgaacacaaacagtagttgatgaatacctttttgaacatggtctttaagtgtacttttacctgctgtattcatartcatgagcaaaggtacagaagatatttgagtattaagtatgctttgaaagtatctcttatattgctgatcttatgtcggtgttaccaaaaaaaaactaccgaacaaacaacttttgtgtaattagctcaaagaatagccacaagggtgaggttacaggaaaagagggctttataagatgatgtgtgagatattgtttctttggtatgtcacagagccatgtgggtccagtgttccccaaaccccctcttacagaactccaggtcagtgttcagaaatattgtgtwctttttttttttttttttttttttttttttttgagacaggttctctgtcgcccaggcaagagtgcagtggtgcaatcatggctcactgcagcctcratctcccaggctcaggtgatccccccaccttagccccccaagtagctgggactacaagtgtgcatcaccaggcctggctaatttttgtattttttgtggagacagggttgtgccatgtttcctaggcttgtctcgaactcctgggctcaagtgatctgcccaccttggcctcccagagtgctggcattacaggtgtaagccaccgtgcctggcccagaaatgttgtattctttactcatttctgtttttcataatttacatggaggtatccactgcaaacatagaagcctagtcacagtatcacagtgttgaccgtgagccaaaaatgccattgtgctagcctgctaataataacagtaagtcctcgcttaacatcatcattggttcttggaaactgcaactttaaacaaaatgatgtacagcggctcctgaaatcacatccttttgttcatccttgttcctttataatgttgttgtgaggggaaatggttttgttacatgttgtttcgcttgaagtcccagtttccaggaaccaacaatgttatgtgaggacttactgtacatatataagtgcattttgatatgaaacagtgaggacaaaaactggtattataagcttaagatttacgtactagttatttaaatttccgtgtcccaccccagagctcatatatgtaatctagaccatattcccactacccctgggggcactcccgcttcccacaggcttcctttgtatcactccttttaggttgtgctttctttgtctaaaatccaatattgttaggaacttatgcccatatttttcttccttatatttctaatagttgtaggcatttttaggaaaaagttatgtcctttatcttgagatgtttttggtagactccttagagacaaaaataacacataatacagagttgaacattgaaaaataaagcctcatgcaaaggcagttaatcaaggaaagaacaggcttttcaactattggttgtccgtatgcaaaagaatgaacttcaatccatagttctcacaatatgtaaaaattgataaaaatggatcacagacttaaaatgtaaaacctaaaaacagaagtgcttagaacaaagttcagggaaaaatatctttctcattttgggttagaaatctaaggtttcttagatgagacaccaagaacatgatccacatgagaaaaaaatagaaatactggacttactgaagttaagaatgtcttttgtcaggacactgttaagagaatggaagtacgagctccagaatagaagaagatatgtgtaaatcatatttttgataaaggacttgtatccaaaatttgtagagaattctctaaactcaatagtaagaaaacaaagcaacttagttaaaacatggtcaagatatttaagcagacacttcactaaagaaaatgtaagtatggcaaatatgcacataaaaagatgctctacatcagtagtctttagggaaatacaaattaaaaccacgatgagacaatactgaacacctatagaatgactaaaattaaagactagtaaatgttggcaaggatgtagaacactgggaactttcaccaatgctagcattattggtcactaattcagagagaatactaacagtttggtggctgaaggattttggccctggaggacacaatgggatttgttttaaattggagaatagattccttgtgccagagccccatgtgtcagggaggagggagggggcaggacaagatgtgatccaaggagatggagaggctgggaattgaggtactgtaggcgtgcagctgtgagagtgagaaaaatggaccagtgggagtgggagagacaggagagatgatctgcataagagtgtgactgactgaggggcgaggcagggaaggggaatggtgctgtggcaaccacctttatggggagtgagagttagctgccccccttaccctcttgcagagtagcactatcggttgaagttgatgggtctctgcagcagtgtttctctgtccggatgtagactcagaaaaggttaaaagggtgatgcagtgtacggaggagagtttgccagccatgtgcagtgagagaggaaagaaggcttcactgcaaagaatgtggctgagctgttgcagcagtgggaggaggctgtatggaagggaattgagtgtgagtaggctgaaggattgtcggggaaaggaggcaggtaacagaagactcagctgactgtggcttaacaaggccttgggtatctttttataagaagtctgggaaggcattgctggcatggctccgctgctggcatggctccgctgcttaggcatgatggggactaccagactttccagcctgctgttttgccatcctcatcatgtggcttttcagccatagacttgtcttctattcctaactcttggattttgtgctttagaaacagcagttttccttgttaaatagtcatttatcctttatgcctattctcttaacgtttatttgcttagcttctaacttcattgtgtgcatataccacctttaaacaagtgttttgcctttggcgtgatttctgactttagccttattccttctagcatgctatttctaattcatttattagttctgtatttatgttattttggtcctcagtgtttcagttgctctgcaatcttgtttttcatttcagcgtgttcatttgccatcgcctctttgagtctcatatattgattttatgtcatctctaaattatttcatagtaagcacttctgggaacttttcttcagttattagttaggctttcttaaataaaagacggtgtctttaggatgccatgtgtgtgcctttgctgtcctcagtagggggcttgtttggtttggtttgctttgaggagtggggaggctggcctgtcttgtccagtaactatgccatgtcttttgttaatcttccacgtggttttttgtttgtttgtttttttagcatgaacctctgtcagtattcttcttcttttacacagcgagtgagctttgggttgattctggttgagggctcagaattgttgtggtgtttcttttgcttttcctctttgtctgagagaatgggaggagaggaggcaggaatcacccagcagggcgggaggccatgattcagctttgtaaatatcttttcccaggctgcctccaccgaatctgctcatatctgtttcctgtgagacacaccctttgcttaatatggtttcccagctcaggacaggggtctggcattttaggacagtaggtctctggtgtttatgggccctgctcctgtccccatccccgtcacatcttgccagctttagacaagaaggatgggcacagtccatgagtgtttttagggacagcgcaggggtcaaaggtgcactccctctagaacacaggggaggagagggccagagcaggctccccaggcttgcatcctggctccaggccctaccttaggcctccgttttctcatctgtgtggaggaagatgatagtccctacatcctggggtaggtggaaggattgaatgagataatgcccataagtcacttggcacccgtttgcttctatcagcagatgtcagctccagtcattgatgcttcatagacttctcactcaggcacttcctactcagtcatcttggtcccactgatcttgtttcatttattttcacttttgctttactttttactcaacccttgcttaattgttgggggtgattagtgattaggtgattttgatatttttcttctttctccagctttcctcttatcagataaaaaccaaaatggctgtcttctgtgggactccctgctgagaagtggggccttgtttctcaaaaagcgttctgattttaaaacttttcattggctgccattgcacccctttgtcttctcatgggaagagggtgtaatagtctcatacttttcacagttctgcccatttgccaactctgtgcctggggtaggccatgcttccccacggggctcctggggtgggccgtggttccagttcccacctgctgggcccacacttgaaatctcttgtgtgtgctcccagccctgctcttcatgcttgtgccatgcaactgtgtcacttcctctctcgttgcttttttcctccccacctctcatcccttccctctctggttattcaactaattgttgttgctctgattgagttcaaagagggtgtctaggaattagttgtgagctagctaaatagagaaatctgcaatatacattttaaatttgtaatcaatgcatattttgttttcagtgtttaaagaatttttcatttaaaatactgacagtatggcttacttttaacctttaacctctgcatctcaaataatttttcagaggtgcaccttggtaaatccattgttgccataaaccatattttgtacagtgacaatactttgatggttcttgctaggagagcagtaattaatactcgtcatgtctagaacttcccttcacacattctcctggaacaggatacaggacagggattgccccctctggaacctgccattgtgggtttagaaccctcaggacactggtaagcggagtgaaaggaagtcactgaccttccttaccaacatacttaacagtgcctgtaggaagctagttgggagatgtggatgggaaggaaaaagtgtcaacatttatatgaatttcaaatgtatcttacctctagctgtgccttaaaatgttttgaaatatgaaaactaaaaaatttgttaaaacatgtttattaaacttgcagcttaagtttatattcagtttaatataactgactacattaagtttatgtgcaaattcagtaactaggaagtctacaggtggccaattttgtgaagttatcccccaacattttattatgacagctttggccaatgttattttaactgatattctattaatactatacagtgaaccttttacaaatattggatgatttttataaattacccaactgaacctaaagaagcaatagttgttggtgaatacattcattttatatgttgtgggtagtttttcttgctggtttagatagagattttagttgttttatggtatgccttgattttacttttgtttgggatgggagggaaagatcgtttggttttgttttgtttttcttgagatatgtcttagagttttgaaaaactgactggatgttggatatgttttataatataatttgtttccagtaagttagagtttctttgctatgctaagaagaatggctcattccactttcttaatatgaaacagttgttgactagttcgttaaataacaaaatcttctaatgctgtccttttacagagtgtttgatgattttcccgatgaagagtaaagctatctagttcacctttatagctttagttatagtcaaatatcctgcttgttttaatttgctcattttgctgctcgttttctgttaaaggttacaaagaaaaaaaaaagtgggctgctccacccgggctgatctccagcaggagaccccagaaggtgcagggtgggacacatgacacatcggctcaggcccctctgcacaggttctgtgctttgtggtcagttccacatctttcacgtctcaggccttttcttgtagcactagccctaaaaactgcaagataagattgaggtgggccagcacagagaatagaaagcgaggaggaagatctgcagcgaagtgaggaggcagagtgttgtgcacccttccatcacacgggccttgccgtgtaattcatttctctccagcaacacctgcccaaccggagctgactgctgtgtgattttgttttgaagctttctgccattgtcactgcctctgataacagatgagataggtaataattcatttttccttttgttctgattacccagttatattcgtatgcttattaagtctcgctgaggcttagccctggcaaagatagctaaggagctatgggtctcaggtttctggtctctgttagtggtaggtagctgactgttaggaaaagcaggtgacttgcagaatgagacatagctaatccaccactgatttactagtgcatatggatctggtggccaccttactgctctgagccttcagttttcagatttgtcaaatgaagataattatgatagtgacctcataggattctttgaaacattataagagtaatgtattccattacatagtacctagtaagttctcaatacgtggtagttatttacctgttaataatggtgttgctatgcccagaatctttaaattttcatcatgtgccctacttttgataaagaatatcagaaacattcttgtcttcatgtccactccattctttggtcatttctaggtaacatgaaatattttcacatattatttcttttattcctgatattttactatctgataacacctggtaaacttagccagatgttttgtgtttctaacatgcagttagtaaggatttctcacttacatcttaagtcttttattagaaccctcatttaatgaaaacatgaaagttcagtttttatgaaatggagtgttcactctttattgttacagttattacagttaattcagaaacacaagaaaaacggttgatgtgagggtgtcacttccttcacttctgactgtggttggcaagtacggtgtgtttttcatgtgttgagctttccaaaaggattgttttccatagtattctctccacacttttcctcctctattattttttcaagataagtggttcacatattcttttttacttcctccttgatttggaaagaatgagggatgattttgaactttgggaaatactctctgaatgttgtcttgaaaaatactggggttttttggtaaaagaaagatgagtggaagaaaagatgctccttacagtgtgtgctgcttgatcaatctttgtcctcatggtaggcagcctctaacctgactgcctggtgttcacacagtgtaatgctgcctgtggagtgaggctggccatgttgacttagaagcaatgggacgtcacctctcagataggttgtaaaaagactatggcttccttgactcactcgccctggcaatgccttgtcaagaggcagccctgcaatgtagcttatgtgtgcaggaccgagaaggcctgccagccgtggggaagggagcctggaagcaggagagccagccaagctcttcctggattcctgaccccttagaatctatcaaagagtaagtgtttgttttaaaccactgagttttagagtaacttgtagtgcacaataaataactattatttaaatcattagacatgatgacatagtttctttcttaaacagactacatggtttatgctttaccatattcagtgtccagttgggctaggaaatattacatagttgatttgttttcaccatttaagagagtttgatttttttttaaagtataaaatgttaaatacaactcttaaggggtggaatctgtagatatcaaggtattaagtttgacattttgctttagtagttacatgatttgtctagtaaggtaaacatgaaacattatatctctggcaaatgttactgcattaaaataatgtaatcaagacttttctttagggctggcttatgtattcatgttcatttgacacaagtatatatgtattacacatacataatacatattatgtacttaccacaaaacctaataaaggaaaacctaacacaaaatctcaaaaaggaaaaaatatccagcctagccataatccttataatacatttgtagatactaatatgactttaaatcaatcacatatacttatatataatatataacatattgtctatataaataactagggattagaatgaaaaagtgcaacacatgtaagacrtagttggttaggcatgttatggcatgatatttttactgtaggtaggtagatgtcttactgcagccctagtaattgatctgatacatgtatgctgctacagaagagtccattggatcccctctttctattagttttgtttctctggacagtttccatgtacctgggataggtgttatgttcagaagtctgttgggaagatctcagtttagatcaggctggccgataccacttctcttgtgtatgttgagcaactgtattgtaagattatcatttagattctgaatgtcttccttcttaggtcacttttgtgtgacccaggttgtctagaccacagaacgcacttatcgctaggcatcagctggctgttttcccactttgtgctgtgcagcatcctcctaccctggccatgaactgtagagatgttgtgtagaccttctccctcagctgcatcattgactaagacattgggcatgttgaaatgaactgtaggtcatgtcaagtttctttggttttgaacagaaaccagtgttaccaccaaaagggagctcatgggaggctaaagggcccccagagactctctcagtggcaggagactctagacctgtgccatctagtattgtagccactaaccacatgcaatgatttaaatttaaattgatcagaatgaactaaaaattaaaacttgagccatactagtcacatttcaagtgttcagtagccacatgtggctrgtgacttctgtattacatagtgcaaacacaaaccctttccaccatcacagaaacttctccctggaagtacagctccagatagccttacctggaggccttcactccaatttactagcccagccattccttccattgctctgttcaagatccacgctgaaggagagagagttgattggtctgacttragtcatgtgctcacgtcttggtcatatgggtgtgagtgagggttgggcaggagaagcctccagagacctctcagagccaccagggcaagcatctgagttcacagcctcaagacagcactcaaaggcggaggggtgcacagtgctattggtgggagctggccaagaatggacagatgcacaccatggcagtctttaaataaaagattttgaaaggaagattttgtgttcctctggtaggtaacaatacatcttcaaaatwttttttaaaaagatatcacaatgtatcagcaaatatttgtttttaaaggtgcatgtaaacattgaaaaataagcgtaattttgtttttaatgattaagacttgggtgtgtatgtttctctaacagtgtgtggcataatagttgaaaaagctttctataataaatattaatgaaagctgtatcacaaaagtgtttaattgtggccagtttgcttaatttgctctggaaaaacgtttttgctgtccagccttccttccccattccagtcctgattgctaaaggcttctctaccataatccacaaagagctcaaactaatatgcttcaggcaggttctgctggggttgagccagttaggtttttctccttacatagccctctgtcttgtgcgtgcgtgtgtgcatgtgtgtgtgtgcgtgtgtgttttcattgctttacaacaggcctcagtgaataggaagcattacaacactttaaacattggtcacaaatggaaggataaatatttttatggtttttgtatgattgtgacacaatttaagactagtaaacatgccatgtttgttcacatagctcactcctctttaaccctgatgctttcattgtaaagtgagaggaagttagttttgtaagcatcaagccctgatgcatgaagaaagctcttgcctaggccatctgacacagagtcccacaggaatcagcttgcagtgggctttataatccaaagttagcattatactgcagtgtttcctcccatggttcaaggaaaaaacaacctgaagtggggcttttctatttatgagagaagatttataagtaattcaaaagtggtatttactatcagaagtcagagatcacttctaagcatatcagtaaatgccctcaatttggtatccacatacttttaacttggaagatttgttatgagcatccccctttatcagtatgacttctttctttgtgctctcttgagaagggaaaagatgaaggataaaaaaaaaaaacagaacaaaaagcttgggttttccaccgttaaatgttactaaaacatactttataatccaaagtcataaggtatggtcagttctttacacattacattgtaattgaatgtgaaatgtcaaagcttgctttagattattttaatacatgtaaatataaaaagggggaagtaacatctatatttcacattattctgtactttgaatttaggtcttttggtcttggaggaaaggggagagtagtctcagattgctgccaacatctccccatggcattgaaggttctcatggctcccaagaggcagcagggaatacaggagataaccagatattttaaacattttacttcttgccttctctggcaaaagcttgctgtgctttaagcctctgctaagacaggttgctacctcaaagtaagttgtgttttaagtagtataatcgcaggagattattacctagggagaaaaattcttgatgtcttctcaaaaagattaaatgaaggaaaaataataaacagtaatattacatttcaagtatatctttattctatccaagtgatacatgaacatgaagacattttgttgcatgatgaaaacagttttgccacttgtggtagtgtctgctaattgcctacccattttcattttcccttagtgagagagtcccagttttattctctatgctatggcaaaacactcagcaaggaaactacatttcccagcctcctccagctacacatggccaagttctaggcagtgagatgcaaacagatactgttgtccagtacttagtcagtggctttgaaaatggagcactcccttcccattcccccttttcccttcctgctatttggtttgcagacctgattgcaaggcttcagcagcctttttggaccatgagataatctgaaaggacagaagatgcagcctgagaatgacaaatgagaaacattgagggaacctggtttctaacagtggtcatttgtgatatttatgcaaccctgaaaaaactggtcccaaaattttgtttctgacttttaagctttcaagaaagtggttaaatcaaagcaataaaattagtataaaacggacactgaaaatgttggcaatccagtagcccatgtagtgaagtactgactagcaaaaaactcattccccatactcccttggtaatgctcatcctcagtgctcgtcatttgttagaaaagagaagctttgaatctcaatgcaaaatctttaaaagaattcagaacataccatatgaaatcattgctattgtaaataaacttgatcatgatgtgagcaaaagcgttacatttaaaaatgtagctccactaaaaggaatcaaggtctgaggaggaaaggtacaagatgagcttggaacattttgtgataccaggtaacaggaagttattgatgactattttggtcatgtcaaaaggacttcacagccaatctaactaagtcctcactggtcaaagatggggtagtttgagcatcaataaagattttaactgcagtgggttgtcatacatcaaataggctaaaatctataagttaattatgatttccaaagattaaaaacttaactgttcagcgttagaggatactagggaaccaccttgtaattttgaaaactagtgaataaatgaaaagagtcaaccgcttataaactagaaactcattttaatattatttacagatcacaagcaaaagaaacaaagatatccattttgagtgtttttatcctcttactttgtctgtggcttcagacagtgagtcaaagccattcactcccaggatcttgagtaccaacgaaagaaattcatttgagtgtgaacagttctcactcctgccccggcacacagctttaccgcatcaccagggagcagcagtgactcttgcctctctctctccctcctgtaccaccagacttttcatttgataagtaaacagttttgaaattctttgttaattttgctaagcattattggcattcatcttttacctataacatagcttattgtttattttcatcacattatctgtttaatgccacataggaggaaacataatctgtagctgatagattcattttctgcacatacacgtatcccctaaataattcattaagaattcaataagtaggtaattggtgtttaaaatgctaaatattatgtagaaattgtggtagactgttacatagcagtttatggggttttttttcctgccattttatcgatttgtggggaaattgattggagcttttgggtgggctaagaataaattactatttttcctatttaaaaatgatgggttctcagtattcaaatatttgcttttcagtggcttttaaaacacagaaaatttattccagaaaccatgatgagcattatctatacattgtctcatactgtccatgagctgaattttagcagtctgtgactgcacctgcagggatctcttcctccttcccattcagcccagtcaccccacaacctccagttatgcacacctgctctgttctgaatctcgatttcctgcctctcactctgcagcatcctaaccttccagttctgttcagacctcactaagtcctcaggtctggggccactcactctcaatcatttccctcttttcctctcttctctcctcacacagcctagatttcatggttctttgtgataatcactttcttacaaatgaccttagctaccttcccactaacctcataggggaattgtaaggattaaatgagtgaatactcttggagtacttgggaggatttacgtagtgttatgtagtatctgctcagtaatgtcaacggttggtattactgagctctctcctctcttcttgtacttgtctggcaaagttccagacccccaccccgatccccccaacccctgccaccagttagctagaaattgctagggatggaaaaaataatcatgctaactcatctcctgatcacacatctcaagtgtgtagttaattttgcccagcaacactgccatacttccctagtatgtttgcttttccactttctgaaatgcatgttcaaatctctttcctccatccatctgtacttcctgatgttcttggtacaaattacaggaaaccctatttcagctggcttaaacaataagaaaatactctgtagcatcacaagcagtcacagagtaaggcgtcttcaggattgataaggtcagcagcctagtgctgtctttctgctgtgccatcttcagtttggagactttgcccttgccaccttccatcatggtcacaaggtggctgccatagctctaagtatcacatttagaggtgacagcatcctggaagaagacctgtgtattcctgaatgtctttatttcagtgaagaatatctttcctagaagacccctgcagacatagctttattgaaggaagggtagggtgaatagtggtagaacaggaacaggtgacttataaaatgtggttggctgcacctgagcagctgaacagcctcagtgagcacctgtccaggtcttgctgacatttgtctaaacagtctccctaagtgatcttattcaggaccttggttttgaatgctacctgtatgatactaatcattggtaaaccttattctctgtgtccagtctcacacatgactgctccactcttatgtgtaaaagatacmttatacttaccttggccagagcacagcttccccctcctccattcttgtcagtgttcataatatcggacactcacacactcaggctaaaaatctagccattagattgattttcctttctcccagcatccatttaactagcatttcagacaacacttattccaagtcctccacatctctctccctaccttgcgctgtctcggtccaagctgccatcctgttgtacttgggtgacagcagtagctgcctactgggcaccctgttctgattttgcccctatcatctcttctcccccaatcttacaaatgatctttttaaagtgcagatcaaattatgtcacttgctgctcaaaatcctccagtgcctttgtgtcactttgcctagggtaaaatgtaaacttctactccgcttacccaagctcctgtcctgctcctcctcacatcctttcctatgagccacagtggtctccttcaatgggccatactctgcctcatctttacatctttgtaccagctgagctcatcactgggtgttcttcctgatcttcatttggatgtctggttatatttcagacattggcctcacctttatcaagcaggccttctccaaccacccaatctaaattagtcatctagtgtgctgtctcagaactctcttccctgcctgaaattctctgtgtaacactcctcacagtctcttctctctggcccattgcttcttgccatttgtctttgctctccttctgcagaatggtaaggaatggtctatcttactcagcactgtgggttcagcacctaggacagtgcctggcacttgttaggttaatcaataaattatttattgaacttaaataagctttatttggaaaaagtaaaacggataaactcccattcagtttcatctgacttttttaaagagaaagaaaactaatagctctattattgtatgattcgtctttttggagagtaagcaatagaaattgactctggctaccctaaatgaaaaggaaatttattgtaagtctcctgaaatcaatagatggatagagattgaagcttagagcacaaactggaacccaggagccccagaactagacagtctataccatggcaggtcygcacgtcactgccctgtgctctttgtgagcttggcaaatctccatgccatgaggttgcccattcagactgtcagtcctggaagcagcatccagcaggccagacctgatgtagacgcctgtccagctgtgtcagggcagaggaggcagctctggctcttgggcttcagttgcagggatcctctactgtccaaggctgatacagtggagagaggggtggccaaaggggtctccaaaagcaagaccgggattttaatgggggcagtggatgttgagcagccaaaacatggccaacattcaaatcatttggggaacttgtttagaagtctctctctgagcttgttggagctccaccacaaatagtacaaacatctgcctacccccgtcttcttagttcatgaccataattctccctcaaatctctgaggaatcaaaatggaatcactggtgttaaaaataaccctgacaaatagaattgagaagcccatgaaaagagggttcttatgcttgtatgcctgataactaaaaccatcasaaaacactctgcaaaaaccacaaccttacatgaaggccattgtaaccttatacagaagacacttctgcaaggatgtctgttcaactgcctgtccagcctcargctggcgttacttgttattgatctttgtagccaaggataattattttgaaacagttacgtaatcttcattttttcctctaaaaacctttgtcttcctttatctccctgaatatacacattgtttatggcatacgcattcctgttgcaatgctttattcccagattccttttagaggccctctccctgttttttatttaggttgacaagctcaaatcttcattagagaatgacagtcccataccactgtttctcagaagatgctctcagatgttcagtggcttcttgtccccctcagagtaaaccccaggtccttttgggcccatgggacccacaggatctgcccctgctgtgcacttcagccacactggacctccttgtgctccacaagtgaatcagttgcaattcccacaaaacctgtgcccttcgtgttcctcctggagatgcattccccagacctgtgtgggaatccttgctacctcctgcctcagctccagtgtcacctgctcagagcccttccctggccatcctgtcttaactgtgcccatccccactccatctccccccgctttcttactctctgtgtgtatttctttctttattgcgaggcttcccatgacagtgttgaacgccaggggccaggggctttgttttgttcatggatgtatccatgtaccaaaacagggtccctccatagtgatgcttcaatgagtgaaaaaatgggttgtcatctgtgaaattagttttaaaggaggaattccaaaatggtcctaaacaacaagtagacagcatgtgaggtgatgattgcaattacttacttggttatgtaaattctgttgctttaatttaagagaattatctctccacctcctgttttagagcagtgggttagtagattctgctgcctcttcagctgaatgttggagcctattagaaatgcagaaccttaggttcacctcatactcactgaatcagaacctccaagttgacacagccaaggcaaaaagccttagaaatccccttgtatattctaagcattcacacattagaaagggaagggcagtggccaaggcgctttctttcttcatagcatagtaatgcagctttggaactcagtttctgcttgctgatctggacatagcgtcatgtaggtacacgaaacttcacatagtacctttggctggtggggtgttgaaatggcagaaatattatagttgcttttctgtggaaggaaaagtgctataaatttactacccctaggaaggtttgaggcacttgttttttaaaatttatttttaactgacaaataattgtatatttatggggcacaatgtgataattttgttttcatttttatatttttagagacagatctcgctctgtcacccaggctggactgcagtggcataatcatagctcactgtagcatccacttcctaggctcaaataatcctcctgcctcagcctccgtagtcagcatgcgatgcctggctgattttgtatctctatgtgtggtagagacagagtcttgttacgttggccaggctggtctcaaactcctgggctcaagctatccccctgccccagcctcctaaagtgctgggattacaggtgtgagccaccaccatgcctggccatagtgtattgatctatgtaaacattgtagaaagagtcaatcaagctaattaacatatccacgacttcaccaacttatctttttttgtgtggtaagaacattcaaaatcatataagtacatactattattaactgtggtcgctgtgagatctttgttttttagtggaagccttgtgagctatcctgtaattttcagcttatcttcacatttctcctcatactctgtagtactatggagtatctgcaggagtgtcctgggaatgtgttacttgctgatgtcgtaatccctgagtatatagctccagcccagggagcctcagagcagatcctgaccaggagtcaggctctgcattggaagctgttgggatggacagtgtgagtttgaatagttttgtagacctctgtcaccttgaatgcattagggctgcttgtgagactgaaacaattataatttcaccaaggacaatcctatttttttaattccactgcttaatgtcatcagtcaccaagactgtttagaagtggcactttagatgaccgaataggaacagctccggtctacagctcccagcctgagctacgcagaagacgggtgatttctgcatttccatctgtggtaccaggttcatctcactagggagtgccagacagtgggcgcaggtcagtgggtgcgcgcaccgtgtgtgagccgaagcagggcgaggcattgcctcacttgggaagtgcaagaggtcagggagttgcctttcctaatcaaagaaaggggtgaccgacggcacctggaaaatcgggtcactcccacccgacccgaatactgcgcttttccgacgggcttaaaaaacggcgcaccacgagattatatcccgcacctggctcggagggtcctaccccatggagtctcgctgattgctagcacagcagtctgagatcaaactgcaaggcagcaccgaggctgggggaggggcacccaccattgcccaggcttgcttaggtaaacaaagcagccgggaagcttgaactgggtagagcccaccacagctcaaggaggcctgcgtgcctctgtaggctccacctctgggggcagggcacagacaaaaagacagcagtaacctctgcagacttaaatgtccctgtctgacagctttgaagagagcagtggttctcccagtaggcagctggagatcggagaacgggcagactgcctcctcaagtgggtccgtgacccctgagccccgagcagcctaactgggaggcaccctccagcaggggcacactgatacctcacactgcagggttctccaacagacctgcagctgagggtcctgtctgttagaaggaaaactaacaaacagaaaggacatccacaccaaaaacccatctgtacatcaccatcatcaaagaccaaaagtagataaaaccacaaagatggggaaaaaactgaacagaaaaactggaaactctaaaaatcagagtgcctctcctcctccaaaggaacgcagctcctcaccagcaacggaacaaagctggacggagaatgactttgacgagctgagagaagaaggcttcagacgatcagattactctgagctatgggaggacattcaaaccaaaggcaaagaagttgaaaactttgaaaaaaatttagaagaatgtataactagaataaccaatacagagaagtgcttaaaggagctgatggagctgaaaaccaaggctcgagaactacgtgaagaatgcagaagcctcaggagccgctgcgatcaactggaagaaaaggtatcagcaatggaagatgaaatgaatgaaatgaagcgagaaggaaagtttagagaaaaaagaaaaagaaacgagcaaagcctccaagaaatatgggactatgtgaaaagaccaaatctacgtctgattggtgtacctgaaagtgatggggagaatggaaccaagttggaaaacactctgcaggatattatccaggagaatttccccaatctagcaaggcaggccaacattcagattcaggaaatacagagaacgccacaaagatactcctcgagaagagcaactccaagacacataattgtcagattcaccaaagttgaaatgaaggaaaaaatgttaagggcagccagagagaaaggtcgggttaccctcaaagggaagcccatcagacttaacagcgaatctcttggcagaaaccctacaagccagaagagagtgggggccaatattcaacattcttaaagaaaagaattttcaacccagaatttcatatccagccaaactaagcttcataagtgaaggagaaataaaatactttacagacaagcaaatgctgagagattttgtcaccaccaggcctgccctaaaagagctcctgaaggaagtgctaaacatggaaaggaacaactggtaccagccgcttgcaaaatcatgccaaaatgtaaagaccatcgagactaggaagaaactgcatcaaccaacgagcaaaataaccagctaacatcataatgacaggatcaaattcacacataacactattaactttaaatgtaaatggactaaatgctccaattaaaagacacagactggcaaattggataaagagtcaagacccatcagtgtgctgtattcaggaagcccatctcacgtgcagagacacacataggctcaaaataaaaggatggaggaagatctaccaagcaaatggaaaacaaaaaaaggcaggggttgcaatcctagtctctgataaaacagactttaaaccaacaaagatcaaaagagacaaagaaggccattacataatggtaaagggatcaattcaataagaagagctaactatcctaaatatatatgcacccaatacaggagcacccagattcataaagcaagtcctgagtgacctacaaagagacttagactcccacacattaataatgggagactttaacaccccactgtcaacattagacagatcaacgagacagaaagtcaacaaggatacccaggaattgaactcagctctgcaccaagaggacctaatagacatctacagaactctccaccccaaatcaacagaatatacatttttttcagcaccacaccacacctattccaaaattgaccacattcttggaagtaaagctctcctcagcaaatgtaaaataacagaaattaaaacaaactgtctctcagaccacagtgcaatcaaactagaactcaggattaagaatctcactcaaaactgctcaactacatggaaactgaacaacctgctcctaaatgactactgggtacataacgaaatgaaggcagatataaagatgttctttgaaaccaatgagaacaaagacacaacataccagaatctctgggacacattcaaagcagtgtgtagagggaaatttatagcactaaatgcccacaagagaaagcaggaaagatccaaaattgacaccctaacatcacaattaaaagaactagaaaagcaagagcaaacacattcaaaagctagcagaaggcaagaaataactaaaatcagagcagaactgaaggaaatagagacacaaaaaacccttgaaaaaattaatgaatccaggagctggttttttgaaaggatcaacaaaattgatagaccgctagcaagactaataaagaaaaaaagagagaagaatcaaatagacgcaataaaaaatgataaaggggatatcaccaccgatcccacagaaatacaaactaccatcagagaatactacaaacacctctatgcaaataaactagaaaatctagaagaaatggataaattccttgacacatacactcttccaagactaaaccacgaagaagttgaatctctgaatagaccaataacaggatgtgaaattgtggcaataatcaatagcttaccaaccaaaaagagtccaggaccagatggattcacagccgaattctaccagaggtacaaggaggaactggtaccattccttctgaaactatgccaatcaatagaaaaagagggaatcctccctaactcattttctgaggccagcatcattctgataccaaagccgggcagacacacaaccaaaaaagagaattttagaccaatatccttgatgaacatggatgcaaaaatcctcaataaaatactggcaaaccaaatccagcagcacatcaaaaagcttatccaccatgatcaagtgggcttcatccctgggatgcaaggctggttcaatatacgcaaatcaataaatgtaatccagcacataaacagagccaaagacaaaaaccacatgattatctcaatagatgcagaaaaggcctttgacaaaattcaacaatgcttcatgctaaaagctctcaataaattaggtattgatgggacatatttcaaaataataagagctatctatgacaaacccacagccaatatcatactgaatgggcaaaaactggaagcattccctttgaaaactggcacaagacagggatgccctctctcaccactcctattcaacatagtgttggaagttctggccagggcaattaggcaggagaaggaaataaagggtattcaattaggaaaagaggaagtcaaattgtccctgtttgcagatgacatgattgtatatctagaaaaccccatygtctcagcccaaaatctccttaagctgataagcaacttcagcaaagtctcaggatacaaaatcaatgtgcaaaaatcacaagcattcctatacaccaacaacagacaaacagagagccaaatcatgagtgaactcccattcacaattgcttcaaagagaataaaatacctaggaatccaacttacaagggatgtgaaggacctcttcaaggagaactacaaaccgctgctcaaggaaataaacgaggacacaaacaaatggaagaacattccatgctcatgggtaggaagaatcaatatcgtgaaaatggccatactgcccaaggtaatttacagattcaatgccatccccatcaagctaccaatgcctttctttacagaattgggaaaaactactttaaagttcatatggaaccaaaaaagagcccgcattgccaagtcattcctaagccaaaagaacaaagctggaggcatcacactacctgacttcaaactatactacaaggctacagtaaccaaaacagcatggtactggtaccaaaacagagatatagatcaatggaacagaacagagccctcagaaataacgccgcatatctacaactatctgatctttgacaaacctgagaaaaacaagcaatggggaaaggattccctatttaataaatggtgctgggaaaactggctagccatatgtagaaagctgaaactggatcccttccttacaccttatacaaaaatcaattcaagatggattaaagacttaaacgttagacctaaaaccataaaaaccctagaagaaaacctaggcattaccattcaggacataggcatgggcaaggacttcatgtctaaaacaccaaaagcaatggcaacaaaagccaaaattgacaaatgggatctaattaaactaaagagcttctgcacagcaaaagaaactaccatcagagtgaacaggcaacctacagaatgggagaaaatgtttgcaacctactcatctgacaaagggctaatatccagaatctacaatgaactcaaacaaatttacaagaaaaaaacaaacaaccccatcaaaaagtgggcaaaggacatgaacagacacttctcaaaagaagacatttatgcagccaaaaracacatgaaaaaatgctcaccatcactggccgtcagagaaatgcaaatcaraaccacaatgagataccatcttacaccagttagaatggcgatcattaaaaagtcaggaaacaacaggtgctggagaggatgtggagaaatgggaacacttttacactgttggtgggactgtaaactagttcaaccattgtggaagtcagtgtggtgattcctcagggatctagaactagaaataccatttgacccagccatcccattactgggtatatacccaaaggactataaatcatgctgctataaagacacatgcacacgtatgtttattgcggcattattcacaatagcaaagacttggaaccaacccaaatgtccaacaatgatagactggattaagaaaatgtggcacatatacaccatggaatactatgcagccataaaaaatgatgagttcatgtcctttagggacatggatgaaattggaaatcgtcattctcagtaaactatcccaagaacaaaaaaccaaacaccgcatrttctcactcataggtgggaattgaacaatgagaccacgtggacacaggaaggggaacaatcacactctggggactgtggtgtggtggggggaggggggagggatagcagtgggagatatacctaatgctagatgacgagttagtgggtgcagcacaccagcatggcacatgtatacatayatatgtaactaacctgcacaatgtgcacatgtaccctaaaacttaaagtataataataataataataawaaaaaagaactggcactttaggaatcctgaattcagatgcctaagggaactagcagattatatcatctaatctaatgaagcaagcctggtgtaaaatagtcaactgacagaaataggatacgctatcttcacttttacccctaactctaagttaatattggagtttgatattcagaattaagaaaaggtgaactgaagtaatttttttctagttctcctctttacatttggagcttacagtctgatgccaggcatggcatgctaactagggaggctgaggcagaaggatcatttgagcctaggaggtggatgctacagtgagctatgattgcaccaagattttggcacatctcatcttttggattgggatgtttttctgcactatttgacttccttaaccagcaagaatactgagtttcatttagtttaattatagaaaatgcgtgttcataaatttaagtactttcaagctggaaaagaatgttggcataaaaagttttgccatttggggtaactattccggagatatttgtaaaaatcttagattccatatcaatcatgtttagttgtccaatattgcattgtaacttccatttgtaaagttctttgctcatagtatcattagtaattgagaaaggcagactgaacagattatatcatttttataaaccttgaaatcatgaattttgtatgcctgaggggtggaggggacagtttactttcagtttcacacatgtaaaaatatatataattcaggccatcagtcttagatttctgcaaactgggataatttcttgccaaacaaatgttctaaaagttaaaatttcagtgggaatgagtgaatgaaatcatgtatttgtgtaatcatttaagaatgtccctttcaggaaatagtgttaggaatactttataccctatgcaaaaattaacacaaaactgatcaaagaccatagcataagaactaaaagtatacaactcttagaagaaagcataaagaaaaagctttataacattggatttggcaataatttcttggatatgacaccagtaacacaggcaacaagagaaaaaagaggtaaattggaccaaaattaaagacttttatgcatcaggcactatcaacagagtgaaaaggcaacccatgggatgggagaaaatatttgcaagtctatatctgataaaggattaatatccagaatatataaagaactcctgtaactcaacaaatgaaacaactcaagacgcaaattaaaaataggcaaataactttaaatagacatttctccaaagacaatatatggatggccaataagcacatgaaaacttaggcgctcagcatgactactcacaatgaaattgctaccaaaacaccaggggttttgtctaggtcctcctgttcactgcacagaaagcccatcactgtcacgacaagtattgccaaggaagaaggctttaatcggctgctgctgctgagatgggagctcagcctcaaattcatctccctaacccactaaaactaggggtttatatagcagggaagaaatgtaacaatgtgtaagaaaacaagaactagggaggggcaaggagtcatctggtctggtgatcagctgagttttggttctttgatactttttttgaaaggcctgaaggtccttttctggggaagaaactcaaaacagatgcaagtttcaaactttaacagcagargggtcaatttctttgtttatccaaaaagaactgtctatgggactattgggtgggtttcaaaatgctactgcacacccattaggatggctactataaaaaaaaatagtaagtgttggtgagggtgtagagaaattggaattcttgttctctgttggtaggaatgtaaaatggtttggtgactatggaaaacattatggtgatttctcaaaaaattaaactggaattactgtatgatccagcagtcccacgctgtatatattgaaagcagaattgaaagcagggtcttgaagagatayttgtatatccatgttcatagcagcattattcacaatagccaaaaggtagagcaacccaggtatccttccaggggtgaatggataagcaaaatgtggtatatacgtacaatggaatgttattcagccttaaaaaggaatggatttctgacacatgctacaacagaggtgaatcttgaggacattacgctaagtgaaacaggtgaatcacagaaagacaaatactgaacgattccatttatatgaggcaataaagtagatggcttgtgatgtcatccaaaaagatcaagtcctggatgcagtgttagtgggtgagccacgccaagggttttcccctggttcctgtgatgcattgttttcaatgggtcagaaagttagctctcttctgcaccatacctctagcctccaccgcaggcccgccagccatctgttgtgttatgcatccagcttaagaaacaaagcatccagctgtctacccctcagcttaagggactgggtctttttcctagtgttagttaccacctacatgaccattactttgttaagtttctgcaaaaatcctcatacctcaggatcatgctataagtggaacaatatgatgaacgagtttgagcttccgggacttggaaaatgttgtttctgttgaataaaaagtgtgacattaacaatgtgggtcacatttgttaattgtgaccagtctacattaaacttttcatagaacatgagaaagaaccatttcctaatatgcttatcatgaataatatatattcattaagttcttcagtctcatcaaaattctcatcagctccatgagtaaatatagttatctgagttatatttatatctgtgttctaatcagctgccattggaagcaccataaatagcttgtcttttccatgcagcttatcccgtaagttctcagacctatctttactacactgagcaacatcattgtcgaaagttaaatttaaatttgtcaataattcattgtcttcagacacatattttctgccgtatcgagtaaacacttatataaactcaccatctctaacggcttgggcagcttaaacacgtaataactgcattttgcggtagcattattgtatttgtttgaaaacagtctgtattgaaaatattagtccttttacaattcattcagggtttctttttctaagtgttacctgtgttctaaatattaattacggttcttaacatggtttgcttaataatggcatcttaagctctgttcttccaactgaggcatactttgttaaacatgtgccttcttgtggtctttaatttttttccacttttcatagaggtgtgaacaaaaaatgattttgctttcctttaaaggaaaaatactggaggtaaattggttttttttttaagataaaatcactcatctagttttaaatgttgctaactaatgcagaaagaaaagttttaaattttgtaggtcaagtaaaacccagtgaacttgtgtagatggtgggcgtcagtttgcttttcctgctctgcaagggggcagtctgctgctcctctgcctcttggcacagccattgatagggtgagatttaggtgaatgctgatgttgaagctgttttcatttcttcttggtagacattgaggctagacctgtgttacctgcttttgcccaactttgtatttaatgagatcccgtcctcatcactggaagatactgaagtgaatacatagatggatctagtgagttaggctatcttcaacaaaataagcatcttttgctgtagaactattctgacctacatttaccctaaatcatgctaatatacccactgttttcccttggagttgaagagttaatgaactcccgaagtccctaaagtagtaagtgacaacgtcaaaaccaaatgcatggcttctgactccacacacagtggattttcctcaccagctggaaaargggtgtgtttgtgtgagagagcgtctccgagagaagagctaacggagatgaccaggacttgcactgagaaaataccaccaggacaaagcctgttttcatgagtcattgtctggttttatttctagattaaaatgtgtttacaatgtattcgccataaaggattctttaaaagaacaggagttgaatgtctcacaatgtgttaagatttatttaagctgaaagaagaatgccaagcttggtggaactctgcctttctagtcagtggacttactggctggtactgcctatccactgctgttcacctgatggttactgatggggtgatgactgtggattggactcagkgtataccagagaggttgcaggtgatactcagtgccaaaatcacttaataaggatgtaaggttctcaagtccttttttggtgttattagttttataggggaattaagaaattagattctgttctgaagtagttttccagctactaattttaacatataaacttctggccctggtttatttttataaatgaagatatgaaacactgaagtgttaaaactaacaggtgtcaaatcattgccttttctctctctttcacccctcaggggggacacagcgattgccacgcgccattggaatgtccctggccaaggagctcatattctctgcgcgagtcctcgatggcaaagaagccaaagcagtgggcttaatcagccacgttctggaacagaaccaggagggagacgcggcctacaggaaggccttggacctggcgagagagtttttacctcaggtatttctcattaaatgagtttattttttctcattttaggaaacattataacactttgactaaaacagcagtcatcttgcctatggaagaagtccctggcttgcttccaagtaaagggatgcgtgggctctgtaaaactagagcagttacacaarataaacactatgatcctgtggaattctgatgaygctttgaagatgctccaagggtcttattgtagccacactttgataaaatatcccttgacaatgcttgtcacatgtgcacaacttcctagcaaggtgttttaatttgctcaccagctgagcactctaatggaagccatagccatggaaagaaagagtgatagggctggctgtcacactgggccaccccaagtcaaaatacattgaaatatgctgttttctagtaagggactgtagtctgttgtgccagagtggacttccattgcagtggcttcacttgaaaagtgaaaagcctgcttgaaaagcagcagttgtttgtctttctgtgtgtttgcctatggtggtgtaggcgttgttttgactccattgtgcttcctcacaactacactttcaaatctagaacatgatgcgtatggctgactcaggagtgatatcagtggccgtgcactgacagtcctgctttaagcaattctttttgtcacccgttcagatatatttttcaaatatgcctttggtctgaaatcacaagattaaagggctttaaattgagagaaagagtcttcttttgctgtgtaagcagtagtgatcttctttattcctagtggagtttgaagttttataaccccctaaccatttctagagtcaaaataatttttctctctaactcagggttgcttaactcaaacaggtttcataaccttttttgtgggctgtggatctttttgggaatgccatgagattccaaattcatgcatttgattctttttaaaaatgcatgaatgctcacatttgttcagagtcttgcatccagtttcagaaagtgttcttggcactcagcacaggagcctttgctgacaaaccagtccccactctgctggtatgcacctgctgaatcggtttttaaaaccacactgcctggcattgatgcttctggtccttcttaattaacttaggagctgttagctcttttagggaaggaccattatataatttattccccacataaggtagtgcagagccatacattcagtagatgctcaataagtatttgttggattgatggaaacagagcaaataaaaaaagatttttgccttaaaaagataagattctcactacaaacttatttattcttcccaaatatgagagaagtctctacctaaagacaaattaaaggtacaagtatcaggagagtataatctgactgaatattggtgttataacttaccttggcttaaaactttatgaccagaayatacctcagttgaaagaaaggggtgtgtttaagaaaggttatgacacagttccaattctgatgatctgcagagcccgctcctggcctcctgacatggatgttcagctctctacttcagagctccctataggcagcttattagccccttagggcctgacttgctctctctcccatgatgcytctgtggccaccatgcagcaaatgccaccaccgtccacacaccgccccgcctgagaacgtgagcactgtcctctcctctgctccctccttccactgccagtgtgtcgagccgcatcccattgtgtggttacccagccgtcatcacagtccctgtgcatgtgcctttgtcacctttcattggaaggacactccttcagaatgttgattgttaaaattaattttcctccaggtcaaacaaataagaagatgttgatgtataagaagatgttgagttacttcagaaaatatgtgactgcaaaattacatgcacgagtcaccaaatgaagtttgagtggaatcacctttatttttatgtttgttactttgttgccaaatgattagtcctccagataactgaaagcttttgtaaaatcagtatttctaggtgatatctgtattatatattacttccatttatctgagaaaaaaaggcttgtaaagaagaaaaggcactggaaatgttttaaggaggaaacaaattaaatcaagcactatttctaatagcattttgaattttcctgtttttctcatggctttctaaactttacttcccaaagtgtggtctgtggaccagcagcctgggcatytcctggcagcttgttagacgtgcagaatctcaggcccatctcagacccactgagtccacatctgcattttaacaaggaggatggggatttgtgtgcatctaggagtttgacaagcaccttttcttggtcagttgacaatgaaaatggaaaaattagaggagcacaccatttaataaaatggattgattatcatgaaaaaaatggtggtggtgtctatgatatatacaaatcacagtgggaagaattatcaataagatatttgtctaacaactatagccttggaaattgtggcctttgaaaaagatttgtaaacatgatttggaagaaaatttagataggtcaaatttaataatagaaactccttgataggaaaacatgtcttttcatgcatttatccatgtcaccatccaagagtcctttgctgtgcctgttgtttagagcctaccttgtgttttaattcaaaagagcattcagttcaaaatatagcattgaattcacatttattacccataaatggtattttaggactttaaaatgtgatccaataatgaaattccatctgagggattctggtttttctgcttggtaagagtttggcttctgcaagacacaggtaacattctccttctcacaacagatatccagttcattccttgtgactcttctgcatcctgaaagacttatgtagacttcatatttatgtgtgctgtgggagcactgcttagaggacactgttgattaatccaccatcattgctgttagttgtcaaggcgaatggaggaaatatagccagtgtctgaaggagatgatatcagaaccctaccttaatcaatagcaacagcctcatccccagcccaagcttctttcaaaacccctaattggtgtggtactgaggcaaagactacctccttttccttcctctacttaacttctaggaagtgttgctgaagaacagcaagctcacagctggacatgcactacctgctcacctttaaggatccggagtttgcagcataacaaaacatgtggaatctaaataatgtgctgatgtggttgttgcagttgctctttaattacagccttgcaaggctcagaaaattttccatctagtatctgacagccattgctggctgtgcaatggatccagtggtgggaattctgaattttactgagatatacgacataatttgcataaaaaataattgaagtctgtttctttaatttgaattttagggacctgttgcaatgagagtggcaaaattagcaattaatcaagggatggaggtaggttccttaatgcttgagtttgttttgggaatggagagtggagatttaatttaaatgaaccatgtttagacttctacattttttttaaagttctaaaatatggttgtttaaatgctactattactgaaagctactgaagttccttgcaagtacgtcatttatttcattcttacagttattgctaattcagtatcacaagcacagaattcagtaattttaccagtgccctgaagcttatgacatgctcattattcttgccatccagttaacagacagatttattggctagtagttcatagaaaaccaaaataacagggcattctgtgcatttttagcatcagtattatattatacaaaacattccaagaacagctagctctttccacctttagcttctcagtgtgccttctacaaggaggcacacgcaatgcaggtataaggtgaatccattgtgtgtcctgggggtaccccagggagatgactccaaaagagtgaaggccccaggcctgggaggagggggtggtgcacatacccatttattggacttttcatggcagttattatattttgggtaacttatgggtattttgaagaaaagtgcttccttcttggtagactaaggaacctccgcatcttcctgggctgtatagcagtaaaaagagattgactttatacagtcaatactgtataacagtaaatacagtttcataaatttgcaaaagtatttgattggtttatttaaatatttacataatggtaacaataccaatagcaaataccttatatagcccttactatgtattaagcatcgtgtgtgtgtgtgtgtgtgtgtgtcgcgacataaaggcctcacctagattaactcatttaatcctcacaatactcccatttggtgagcattataattagccccttgttcagacatgcctctttgaagcacagagaggttaaataacttccccaaggtaactcagctcccaagtgagggagtcaggacgaacccaggaagcctggttctgtgtctcatgttggtcacactctgatctgctgtactatatcaaaggattgggtgctttggggataaggttattcaatttgaatttctgttgaatataccacatttcgcaaagttatttctgctgaaatggattatgtttttattctcaggtcgatttagtaacagggttagccatagaagaagcttgttatgctcaggtatgtaatgcaatcacaaattcaatgaggatgacccttacaaattatatttaccttctgtataattcaaatgaatttcactgagcaagattacccttgcgcccattccaaaatcatacaaatgggttgaaattagttgtttctgctatttgttaccagctcttatgactgattctgttccacaggaatgcctcttgtctatataatctagaaaactcttagagtaactgagtcagtcctgggtgtgcaggagctgtctctctaggcttatgctttcttttgtgggattggtcctggcctcccactgcaatgtagagaggtagaggagagtggtgatgagcgtgtgcctgccatgcaacctggggtgagactgcttggcttttcctgaacctctgatctgtctctcctgaccactgaaagttcactaatgaaattatagttttattttttacacagtcggcccttttcatctgtaagttttgcatttgtggattcaaccaagtgtaaattgaaaatattcaggaaaaaaaaagatggttgcatctgtactgaacatgtactgacttttttccttattattccctgaacaatatagtataagaactgtgtacatgccatttacattatattaggtattataaataatctagagatgatttaaagtatacaggaggatgtgcgtaggtaatatgatatgcaattttattaatatataagggacttgagcatctgcagattttggcatctgcaggaggtcctgtaaccaatcccctgcagataactgagggatgactgcatacaaattattaggtcttcctggagaggaaaaaaaaaatgttttcccttttttgtctttctctgaaagatagaactttgttttagggcatctgaaatagcaaaaaagttttgttctacctttcctgggagttggaaactgcatgagcactcgtttaaaggagcagtatctagagtgtgactctgtgcccagcttgtatatataaatcaccacctgtcattgatgagtacgtgccatgaggaaagtgaattacaaacgtcttagaaatagcctcagagcccaaagaaaaattttaaaagcacatttggccataaattacaacttactaaatgtaaacaccagaaattattcaaggtattcttcagaccacaatggaattaaactagaaatcaataaaagaaagactgctggaaaaacccmaaatattgggtgattaaacaacatccttctaaataatgttatatgtcagagatgtcttgaggaattataaagtattttgaattaaaatgaaaatacaacttctcaaagtttgtgggatatactgaaagcagtgcttagatagaaatagcattggatgtatataatagaaaagagaaaatatctaaatcgataataaccttccaccttattaggaaactagaaaaagaagagcaaaatggggtagaggaccacttggagtaagaaggatgagtttggttacataattaggagaattgttcaggtgactgatttcaaaattttagaatgtggttctaagtagttttcttagatagtgcttgataaacttttacagttgttttaacatttttgacatatttaatattttgtttttcttagaccattccaacaaaagacagacttgaaggtcttcttgcttttaaagagaaaaggccccctcgctataaaggagaataaaaggaacagaaattcttaagatgccaatgtaataaatgtacttcctggaagtgtctttcggatccactatatgcctcagcacatggaaccttaatgaccaaagtgaagagcagattattcatacggtgtaataagcatctggaatggacccatccgtgtacttcattcaaatgtgtaaatgtcatattcattcagatttataaagctagtagtgtatagtcagaaacagaatcaaagttagatatacatttttaaatatttactgcatatgaggctttctgttaattttttaatgtgaataatttatatattgcacattctagggaataatattgattgtatgtctactgtgctgcattaagaaaataaaatttctatataccaaaaatgtgaagttataccaaataaagtttctaagtgattaatgcatacgaacagctacatatacatatatctaaacctgaaaaatgaattgatattctgagtgaaaactacctaatataaataaaattagtgaaaagaaaacatgggaatttttctcttaccccattctttttgaattgactaaatcattgcatgctggactttagaagaaacaaccctttcattgctgcttctatcaggcaacctctttacatggtcagtcctgtaatacagtattgaaggtgaagaatgaatccaaagactgaagccaaagaaccaaagcggacaggagacctagtgcagtgggacttgctgggacctcctcccagcaagtggtgtggtcgccgactggcctaggaaaggcgatgtttgcacacaaaggaggaaagaaaatggggcagccaggattggagcatggaaatggcttggggtcatggattaaagtggagactgttctctgcttccctaccctctgctatttgcctccaatttctgtaagggaaagaggtgaacttaacaaccctttgtcctaacaaacacctgccttcctacccaggccaggtcaagaagctgtaaacggcctccaggttgcatgcctgagtagccacacctggggagtaggcactggtgggagttgtgtgggacattgggaactggagaattcgctgtggaaaaaaggagaacattctgatgcctttaagtaatttgagatagctctactttacattcattttatcaaaccaccctgccttcctagtttgtgtcaggtctgagtctggtcatgccagagacaacgtccccgggagtgcccctgcagcaagcttcactgtggtacagcccagctgtgtccctaaggtgtcctcctttcacatttccatgtatcagataaacacccattttactgtggatttacatcctcattgtggcgacttcattgctatttgaaggcatgtaggcttcatttttttaattctgaaacttacattttttaacttaggaatttgaactcaacctcaattctaaaattcttataagaggcaaatgtggactggctggctgctgatgtctgtcctgacaaaggtaggcggtgtcttcactcatgtttggacactaaggtgagcgctattttctttatgacctttggtgctgaggctctgcggatttatgatgattgctcagctgatcatcatactataaagagggcttactaaaattcacatttggcactctctgtggtggtcgtatcgggtggcatgcatactaaacttgctgggctattcgttttgtgcgtgataatttgcacctaaaatgctggtggtggttttcatagccttttaaaggttgcagggccagtttgtcctatccatgacatgctaaataccactttctcttgaactgagcaggaaataattatgtcgttagggaaaaatattaagagtgtgctgtgtgagtcgtttctcttggattcatactctagtctactgtcactgatcgagcaccatttaatttcctaacaagttctgatgaagtcactggaatgtatctgaaagtaaagtcctgtagtgacttaaggtattgcagacttcatgtattatggcagagaaaagtgcctgtccaattctctgaataaatgtttgcctttctcttgattttactttcagtatcggtcttgctgctaagcagtcctgatcctcccccaagtcaagctcacagggctctggatagggccgtgctacctagggagggtcccctgcatgggctgctcctcttttctccagcacaccgcctgttggtgcacagagttggaaatgcagtagacgtatccatgtgttcagactaggttagagaaggctctcaaggaggatgagtgatcaagcacagatagaattcagaagatgaaagcaaaataaagaaaaaattttccgttatctcagagcatgaggcctactggttttgaagtaatttagtgctggttaatttctaacttgtctatgaaaggaaaggaaaagaggtctccaagtttctgaagttctgaggcaagagaaaagttctagtaatggccaaaataagagtcagattttctgagactgatttctgtaatgtaaaggatcatttcacgtttgctttgttcttaataatgatggatctggttttcctgttaatcattttttttgttgtttttctagcaatcaaaaattggcttgtcacaaagtgttacttttctgatagcacttttctaagtgtgaataggccaaagtagtggagtgtcgattcatggatcagcacttagaaaaagtgtgtacctgcacatgggtgtgttgctggcccgccatcggcccttttcctcacttgacctgaacttctacctctggtgatatgccctacatttgctcttattcgggctccaaggatcctggcacacacattcagaaatagttaatcatgccattatttgtctaccgatctagtaaaatattaactaatacttacatcagtacgtattgaactttatcagaatagcaatagaagttattttctcatagtatattaataactatacatgtttcacaaaaaataaaacattttaaagttagttgctaatattctggtaacacaacataagaggtacttttctgcataaatgaagcaggatacagattgtgatttggggtattttgggaggtggaaggtggctgaatcctctgttcaattgtatttgtgtctcaggctccaaaaatatcactgtttcaaatgcttgcctttggattttcacagtcttctttgggacctccagaaattcagctaccccttagagggttagcacctaataagcaacccaaaataattctcagggcagcatgagagatctggggacctggtggggaaaataaaggatgtcaaggacagaccaagacatgcacccatgtggctcaggagcagcccaggagacgcgcctgtgtggcaagacatgagatggccccttttccgggagctggcagttccctcaggggccccaaagtgagctcctaggaaccaacatgtaaggtcctttttaaaggcctaatatagaaacagtactgtgtggtgttttgatttaaggaaacattttgacaagatcactgaaaataccctctaaataagatgagtgaataagagctgggtattatggtaatactgagtaacatttatgaagccattcatacctaccagatgctttacagacactacatccccgaaaggataggcactttggttattctgtggcacagaggaagagaaaaccatagagggatcacttacccacagccccacggcatgtacatgctggagtcaggaattacacccagggctactggcccttttgtcactgttgagcttgaaaacagccaaacagcataacagaaggctgctgatacgtgtgttttcgtcaaccaagagggagtagtgtcctttgctctgatttggtcaacaattttctcattacttggaaagataccaaaagtgtgcttatcagcagatctgatgacacaggcaagtaatgtaacaattagagctaatgcccactcagcgcctcctctatcagacactgtgcgttttcacacctaataccaaaatcttatgaaatgggtttgctgatttatagtttaagaaactgaggcagcaggattcatgctgggcattctgtgttctgggttccaatgtttaacggctataccatcaagggcacggagccagtcttggtagatgtgaatgatgcttggatctgtcaagatgctagtagtgattggtgtatgtcctcacaactcagttccccctaaaaccagcaactggagtataagtgtgaagactcatggtttgatagcaatgcttgtcaaaaagggggcaagatggcctgtaatcccagcactttgggaggccgaggtgggcagatcacgaggtcaggagatcgagaccatcctggctaacatggtgaaaccccgcctctactaaaaatacaaaaattagccgggcatggtggcgggcccctgtagtcccagctactcgggaggctgaggcaggagaatggcgtgaacccaggaggtggagcttgcagtgagccgagatcgcgccaccgcattccagcctgggcgacagagcaagactccatctctaaaataaaataaaaaacaaaaagggggcaagatgtgctccctgtgggtcaagagtgtcccagacagcttttgggaagggtgacaggtgtgttgctctatttggccctggtcagactcatctggattgttgtattcagtactcagcattgcaatttcaggtggtcatagattcactctgtagttttctgtaaagcacacaggagctctttggccaagtttcagctccaccgaagtcagcgatgagaccgtggacaaagtgcctcatgtccctgagcccatttcttcatttgtagaagaatccagtagttcaggatggttttgaagacccagtcacattggatgtgatctgtataaaagtgctttatgtggtggtcgtgttttatttgtttcatatttcagaagacgggaaggtgggtctcgcaaccatggctggtttggaggcatgtacaagaacctgggctcttcactcaggaaaagagaagtctagggaaacatggtagctgcctccagtagaactgcaatatgaaacaggtcttcagaggcttccagggcgaggggaaaccatgcagggctcctccccacctccccacttctgcttgttgctctgcgcttgtccagagacaagagatgttgactaaagtctatgcagggaagttacttacaccctcctaggtccaaaagctgcccactgcctctggagtgttagagcagaaagtgggcaggcatgggcagggccattgctgcgggaagttaagaggcaccagaggacagttcttccaacttagacggtttttgtgaagtgaaagcagactgcaggcctccagcactggcgcagactctgactggtgcaggcctctaacactggcatggatttagcagatgagaaagatgggtctccttacaaatactggtcactagtgagttgggccttgagagacagagaaaacaggtatctgcctaaggtgtgtctggttaactatattggcccttgaggtaatctacaatttaaggagttttagttcctctaacattttaagaaatcattctcatgtttgagtgccatgtttatagtaccaattttgggggccagggtgggaagattgccctgagcaaagctgtccattttcccatcatctagttggttttcatggagcggcccacctgctccccacctcaggagatactggaggactctagccctgcggtggctgtggtcaggccaagggcaggccaggcttccttcctaggcttcagttcattcccccatcttgctgccaaggtacctttagatgttttggtcccctaaagcatttaaacagactgtcgtgtaaaatgctgtctgaacaaagtctcccatgaacccacggcacagtgtgtacctgaacctcccaagagaaatagtaaaatcaccacatcatcaagttgcagctcagggactacgtagctttagtggtgatgtttgcaggaaaaggtttcagagaaatttgaaaattggcaggtgcactttcttgacctttccaaaaatagtctgagtcactttcactttcagccttcaaactgtgttgaatgaaacctttgtgcagtttacagaaagtgaagaactgtttggcaagagagagaagttcgagctcctaatagcctcggctgcattgagtaacatttcttttgagttgtctattaacactttcctgaaacatgctttttatgacgcctagaacttgtgtaagagtgactgtaatttgagttatttaaaaatgtaagtacaagaaatgtgtcacacgccataagagctaggaaatgacagctcacattcatcttggtggaaggaaactctaattattggaagatgtgattggagtatttgttcttaatacctacggtggctctgttatatgcttgcctaacaccagtattggcttgcaaataacactgaaaagctcctttcttttc

SEQ ID NO: 95392 - DNA, 18001 bp, Homo sapiens
aaaaaactaagacaagtgctggtggtgagggtgtgaaagaattggaacccttatgcactatgggtgtgaacagaaaatggtgctgctgttatgaaaaacagtatggagcctgggcatggtggctcacacctgtaatcctagcactttgggagcctgaggcgggtgggtcacaaggtcaggagttcaagaccagcttggccaagatggtgaaaccctgtccctgctaaaaacacaaaaattatctgggcttggtggtaggtgtctgtaatcccagctactcaggaggctaaggcagagaattgcttgaatgcaggagatggaggttgcagtgagccaagatcgtaccactgcacaccagcctgggcaacagagtaagactccatctcaaaaaaacaaaaatagtatggagattcctcaaaaaattaaaaataccatacgatccggcaatcctgttttttggtatttatccaaaataattggaatcatgatctccaagagatattggcactcccatgttgatatggtttaactctgtgtccccactcaaatctgatctagaattttaatccccacgtgttgagggagggacctgtaatccccatgtgttgaagtagggagggaagtgattggatcatggggtgggggcagtttcccccaggctgttctcttgatagtgagtgagttctcatgagatttttcttttttttttgagactgagtcaggctggagtgcagtggcatgatctcagctctctgtaacctctgcctcccggttccagcgattctcctgcctcagcctactgagtagctgggattagaggtgcatgccaccacacctaattttttttgtatttttagtagagatggggttttgccatgttggccaggctggtctcaaactcctggtctcaagcaatccacctgccttggcctcccaaagtgctgggattacaagcatgagccactgtgcccagtcagagttctcatgagatctaacggttttctaagcatctgrcatttcccctgcttgcacttctcttgcctgccaccatataagatttgcctacttcccgtttcaccatggtggcaagtttcctgaggcctccccagccatgcggaactgtgagtcaattaaaccttgttcttttataaattacccagtctcaggtatttctttatagcagtgtgaaaatgggctaaaacagtaaatacaatgggggtacaggcattgggtaaatgtttccattccaaatgggagaaattggccaaaacacatgggctacaggccctatgcaagtccaaaacccagctggtcagtcattaaatctcaaagctccaaaatctcctttgactttatgtgtcacatcaaggtcatgctgatgcaagaggtgggttcccatggtcttgggcagctctgcccctgtggttttgcagggtggagcctccctctcggctgctttcaccagctggcattgagtgtctgtggcttttctagttgcacagtgcaagctttcagtggatctaccattctggggtctggagaacagtgaccctcttctcatagctccactaggcagtgccccagtggggactctgtgtgggggctctaaccccacatttcccttccacactgccctagcagaggttctccatgagggctccacccctgcagcaggtttctgcctgcacatccaggtgttttcatacatcctctgaaatgtagtggaggtttccaaacctcaattcttgacttctgtgcacctgcaggcccaacaccacgtggaagccaccaaggcttggagtttgtaccctctgaagccatggccccttttagctctggctggagctggagtggctgggatgcagggcaccaagtgccaaggctgcacaaagcagcagggtgctgggccttgcccataaaattattttttcctcctaggactccaggcctatgatgagaggagctggcttgaagatctctaacatgccttggagacatttttcccattgtcttggctactaacatttggttcctggttacttatgcaaatttctgcagctcatttgaattcttcctcagaaactgggtttttcttttctaccacgtggtcaggctgcaaattttccaaacctttatgctctgcttcccttttaaacataagttaaaattccaaaccatgtctttgtgaatgcgtataactaaatgcttttgagagcacccaggtcacttcttgaatgctttgctgcttagaaatttcttctgccagataccctaaatcatctctctcaagttcaaagttccacagatctccagggcatggtcaaaatggcaccagtctctttgctaaagcatagcaatagtgacctttgctccagttcccaataagctcctcatctctatctgtgaccgcctgagcctgggcttcattgtccatatcactatcagcattttggccaaaaccattcaacaaatctttaggaagttccaaactttcccacatcttcctgtcttcttctgagccctccaacctgttccaacctctgcctgttactcagttccaaaattgctttcacattttcaagttatctttatagcagtgccccactacattggtaccaatttactgtattagtccattttcacactgctataaagaaatacccaaaactgggtaatttataaaggaaagagatttaattaactcacagttccacatggctggtggaggtggctcaggaaacttacaatcatggctgaaggggaagcaggcacgttttacaaggtggcaaatgagagaagtgcaagcggtagaaatgtcagatgcttagaaaaccattagatctcatgagaactcactcactatcatgaaaccagcatgggggaaaccctcccatggtccaatcccctccctcccttgacacgtgggaattaaaacttcctcctttgacacatggggattgcaattcaagttgagatttgggtggggacacagagccaaacaatatcacatgttcattgcagcattgttcacaaaagccaagaggtggaaacatgtgtccatccactgtgatatggtttggacatgtgtctcctccaaatctcatgttgaaatgtgatctccaatgttggaggtgggtcctattgggaggtgtttgggtcatggtggtggatccctcataaatggctttgtgctggccttgtggcaatgagtgagctctcatcctattagttcatgcaagagctggttgtttaaaagaacctggcatctccttccgtctctcttgctccctctcctgccatgtgacatgcttgctcccccttcaccttccaccatgagtaaaaccttcttgaggcctcgcagaagcccagcagatgctggcaccatatttcctgtacagcctacagaactgtgagccaaataaacttcttttctttattaagttccccagcctcagatgttcctttatggcaatgcaaaatgagctaacacacacagatgaatggataaagaaaatgtggtatacacacaaagtggaatactattcaggcttaaaaaagaagaaatttctgacatatgcaacaatatggatgagatttaaggacaatatgcaaagtgaaatatgccagttacagaaaaggaaataattctacttttatcaggtacctagaatagtcaaattcatggaatcaaagagaggaatggtggtcaccaggggctggcaggaggagaaaacagggagttactaatcaatgagcataaagatccagtcaggtggctgggtgtggtggctcacgcctgtaaccccagcactttgggaggccaaggcaggtggatcacctgaggtcaggagttcgagaccagcctggccaacatggtgaaaccctgtctctactaaaaatacaaagattagccaggcgtggtggtgcatgcctgtaatcccagctacttgggaggctgaggcaggagaatagcttgaacgcagggggcagaggttgtagtgagccgagatcatgccacttcactctagccctggcaaaagagtgaaactccatctcaaaaaacaaaaaacaaaaaacaaaaaaaaaaaaaagaaaagaaaaaaagaaaaaaaagaaaatccagtcaggcaagatgaatgagctcaagagagctgctgtacagcagtgtcctctacagtcaacaataatggattgcatattaaatatatgttaagagggtagatctcctactaagtgttcttacctcaataaaaaaatgaaagaaaaaaatactggtgctgatgctgggccatccctcaattttaacttggttgtcctggggtggggcccagacagatagggtggacatggtgcaaccagacacttttatggctgtgctctgcacttagtagtaattactattatttattgagcacctggggtactaagcactttgttgctgtttcattgagccttcctagtaccctgtgaggttggtgttgtcatccccgcttgagaatcaaggaatcagaaagtgaggctgttttctctaggtcatccacctggaagtcactagcgcctgtgttcagccctggtcagcctgaccccaaagcctatgctctagctgctgtgctgtgggactcaggctcctgtgggacacagacgtgggcaccacatgccctttccttccaattctctgtcctttaagttttagggtcaatagggtaacctttgccctgcacctgtccacactgaatggccatcatccaggtggagaagggagtggcttgtggctcagcattaaggaagaactttctggcactcaaaggagcttcatggtgagatgggcagcctggaaaagcagagggcaaccaccaccatccctaggaacccaccaccatccctgggcacctacccccatccctgcacatccctcacaatccttgggcacacatcaccatctctgggaatctaccactatccttgcacacttaccaccgtacctgcacactgaccaccatcctacacactcacctctgcctctgcgcacccaccgccattcctgaacatccaccaccatccctgggcacccaacactaccatccctgcacatccaccactgtctctgaacacccaccaccatccctgcacatgcaccaccatcctggggcacctgctaccatccttgggcacccacttccatccatgcacacccatcactgtgcctgggcacccaccaacatccctgcacacccaccaccatcctggggcacccactgccatccctgggcacccactactgtccctgcacacccaccactgtgcctgggcacctaccaccatcactgcatatctgccaccatccctgggcacccactaccatccttgcacatccaccactgttcttgcacacccaccactgtccctgggcacccaccacaatgcctgcatatccaccactatttctgggcaccaaccaccatccctgcacatctatcaccatccctgggcacccaccatcatccccgtgcacccactaccatccctgcacacacaccaccatctctgggcacccactaccatccttgcacacgcaccactgtccttgcacacctgttaccatccctgggtacccatcaccatctctgtacatccatcaccatccctaggtgtctaccattatccctggataatcatctgaaagatctgttgggagaggaagtgtcatccctcagtgtagtgtgtgtgtgtgtgtgtgtgtgtgtgygygcgcgcgcatgtgtgtatgtgtgtgtgtgtgtggggcagagatgtgcaagggggctgggattagatatcctgctctgcctctggaccctgagtggaagggctcaggtgggctagtcaaagctctgtggtggcgctgtttgtggaagatgagctcacagagctggagttctagaaggccctcygttggcctggagcctgccttccccattgttctcttaacactgggtgcctggggccctggcaaggttgtgggggacatcttgagctgaagcagggttttgagccactgctgctgctgccattgtcaccatggtctcagctctgcggggagcacccctgatcagtgagccccctttcccttcttcctggggctgttmacaggggcsctgggttggtctggccagagaccaggtggagaaaaacaaggtggtggttagggtggggktatcctggcctggaagagtgaccagctgagagaggagagagagagagagagagaaactctggagctgytgtgaaatgctcaggatggaattccttttaagtcacttttctacaaaaaaaaaaaaaaaaaaaaaatcaaaaacagtccatgtgtagcagtcaatttagtttcctcctctacaacttagggatattaaccccacacctttcaattgctgagaggattggatgagattaagttggaaaagctctgggaaaggcctggcacagtgttcaaagacttgacaaactccaccaggttggctgcctcctccttctcactcccctcgcggtgagrrgaaggtctcatgtccctgtggccacgccttttgtggacttgagtttcagaagcagccacagagcagctactccatgccagcaactctgcagataaataagacatgcagataaataagaccagccgccgttcttcagaagttaactytgtggtgggaaagactgacatctattccagcctcgtgtgacagaggatgtggaagatcgggtgtgtgagagtgtggggggtggtggcatgscaggagactctcactggggaacacacctctgataagacccttcaagtatgagtcagagttaaccatgtagaggaaaggagagggtgaatgttctagaragcaaggtcattgtgagagaacaaggtggcactgctgaaacataacgtgtgaatgagggagtgggccgcagggctgggctgtgaagggtcgtgaagggccgtgtggacctcgaaggggcagttatggtgggagccatccaaggtgtcacmgggctgggcttttcatttaacaaatttgttctgatggatgtgtatagaatagcttggaagagtggttgagacatgatacaagaagaccatgaaggaagccaggatggaggtgtgaacctaggaaaggayggtgmtctcggagggaaggtggaatccacaggacattgggactgattggttggaactgggtgaaagatgtcatggggaaggagtgaagaatgacattcatatttccagtttgggtaaatgtgtggcccatcatgttttaaagcacataaggaaagtcacaaggcagaagaaggcattgatggraacagtggttctgtttagatgtgctgggtttgaggtgcctgcagggcattcaagtggaagtgtcctgccagtagctgcctctgaggtcttggggaagatgccacaggggttgccagccttcaggcggtggctaacagcagggctgcccagggggtttcctcaaagtggaagagaagagggctcaaggcaggaaggccttagaaagcatatcagcgtttatggcctgggcagaagtgaattccacggaggataaggaggagagtcagccagagagggaggaggaaacctggsagaagggagcatcgtggaaaccaggagaggcaagcctttcaacagcgggtggcggacrgcatgagtacagctgagagctcccatgagacagagtcgaagggggcctccttggrcccgcagagcagtttcagcgcgcggtgatggcagggaggccaattcaccaggttggaaaacaagcgggagggagaragtggcrattttccccaggagtttgggcgagaagagggggaaagagacaagggagtagcagtcagcatgagacttgagggaaggcatttagaagatggagactgagaaagtctctacgagcaggggaaggaggagcaggaggggaacggtgctagcgygccgggagaggagggacaacggatggagcaaggcttggtgatgggaaggacaaatctagagcttagagggaagatgggcctgcatgagattggaggccccgcacccaaacaatgatggggtggagatgagggcgaggaggctactgatgagtttgcaagtgagcagggctaaggcagaaagaggaagaaattccacaagtgagcaccttgcttttcttagtgcagcaggagacgagatcatgttctgagagccaaggggtgggacagcgtggcgtgctaaaggacaatactgagggttttcatttcctgtgagggaaatgggagagagaagtctgagcagagacaagcgcgagtaccagtgttagttgtagttcataacagaaacaacaactcacttatttttagtgccaagagctacgctgtgcccacgccttttctcatttattcttccaacaatcatatgaggcaggtgttactcacgtcctcattttatagaggaagaaacaagcctcagggagggcccaaartcagagatggagcaaggagcagaggggggcttccaacccraaccttgctgcaaagccatgacctcaaccactttgtcatcctcgggggcattcaaggtcccgtggagkttggagaccagggacaccaattggcacaaacaagagtttgtacaactctttcactttttgactctgtgaaggtggagagcaggtgtggaggcgcagaggtcaagagargcatgggaaggcttgtcagaggtggtgggcagtgggataggagctcacagaggtggggaaatgcgggtgaggacaagaagcagggatgaccagggcaggggagggactggctgagacacagaggaactggaggggactaggtctggggagatgaaggagccctgatgctgtgacayccaggtgctaatgtcctctgtgatttgggggactggccacacacagccaatgatgacagggcagggaggtcaaaccagacrggcaggctgggcttccagggagaagggctttttgcaggttatggtttagaagtggtggtgggggtggaggagactctcgggacatcttggggtcttgtgtgtggagaaagagcagcttccccttgagcgggctataggggagcagtgttctgggggagaccttgtttcagttaagatctggagatggagggtcaatgccagaagggctgtcccttgacagttgggctgagagacccatgaacacaccgcctggccatcccctccgggagcatctgctcagtggggctttggatttatagaactttgtctccatccaaacttcgccccttcctagttataaaatcttgggcctcaggactaaataatccgyaacrtgtaatatggagcttrcaataggttagttttcttcctgtctctggcctgggtggtgtgaagcaggatggggaaggagaggggctggtctcggggtcagggtgatgctgatcaggaatgcaagggggctgatacgtgctgctggagcctggccttctgcccacccctyctctcctctcccctttcccagrggtgcactcaagccctgtttcttctccttctgtgagtggaccacggaggctggtgagctgcctgtcatcccaaagctcagctctgagccagagtggtggtggctccacctctgccgccggcatagaagccaggagcagggctctcagaaggcggtggtgcccagctgggatcatgttgttggccctggtctgtctgctcagctgcctgctaccctccagtgaggccaagctctacggtcgttgtgaactggccagagtgctacrtgacttcgggctggacggataccggggatacagcctggctgactgtgagaacccctctccctggcgggccctgacttccccacacctccctccctctttccctccctctctccttctcattcaagggctgtggcttcgggagcttttagagcccttctgtaaactgaagatgatttgagatggcaggtagagaacagccagcacggagtaaaacacgcagtaggcaggcagcaggcaaccaaattggagtcaccccttcatttccccctgctgctaaagtcggggtcaaaggaaacaaacagctcagtcccctaaacttaactatggccacaaggatcagacattccttctgaaattagaaaagacaaactgaacagagcagtcatgccaaacttttcaagctggtggcagttttagatggccatgtgggaagggcagtcataccggggctcatctttctaacaggtcgagcaccctctatagattccacctgggtcttcctaatcttgttactgaagatttagcacttgtaggctgggtgcagtggctcaggcctgtaatcccagcactttgggaggccaaggcaggtggatcactctgaggtcaggagttcgagaccagccaggccaatatggcaaaaccccgtctctactaaaaatacaaaaattagctgggcatggtggcagctacctataatcccagctgcttgggaggctgagacaggagaattgcttgaacccgggaggcagaggttgcagtgagctgagatcacgccactacactgcagcctgggcaacagagtgagactccgtctcaaaaaaaaaaaaaaaaaaaaagatttagcacttgtagattcattcaacaaatttattgggccctactatgtgctgaacaatgagataatgggaagactgctgggctaaaagtcaagaggcctgaggccagccccaacccatgctatttggtrgctggatgggaccctgggtgagtcgctgtasacctctaagcctcgaytgattggtttgcaaagcaggtgggagggcacctgccccaatcaccttgatcaggcaggagaggctcggtggagccagcgtgggacctgtgcagtgagcaccctggtctggggtggctgtaaccatctgacccccaggcctatgctctgccctatgcaggggtctgccttgcttatttcacaagcggtttcaacgcarctgctttggactacgaggctgatgggagcaccaacaacgggatcttccagatcaacagccggaggtggtgcagcaacctcaccccgaacgtccccaacgtgtgccggatgtactgctcaggtagctgggcctgggcccagggctggcaggagtcaggccctgcattagcttttkttcmattcccagtttagtttgctaccyccatctctgagtgaggkttcccccacatcaggctgggcccacggaggagagggagatgggacaagggatgagggtaggtcttccatcagtctgaattggggtcccagataggagactgccttagggctataggaatggagggaggattgtttctgatggagggggagagggatagggttgtacctgtgcttccggagtggttgagacaggattggatttaggcgagtggagtgtgtgtgtgtgtgtgtgtgtgtgtgtgtgtagagagagagagagagacagacagatacacactcacacacacacacacacacctggatgtctcctgttctctcattgtgtttctctgcctatcaccccagatttgttgaatcctaatctcaaggataccgttatctgtgccatgaagataacccaagagcytcagggtctgggttactggtaagtaacttgggctggagccccgcagcggtggtatggttaggactggtgggcagcagcagggaacaaacccctttccttcctcacttctggtttagagaccacactytccttcytgttcttctctgggcrgtgactggcaactgcagctgatattatctctcctcttccctgttctccatcctcagggaggcctggaggcatcactgccagggaaaagacctcactgaatgggtggayggctgtgacttctaggatggacggaaccatgcacagcaggctgggaaatgtggtttggttcctgacctaggcttgggaagacaarccagcgaataaaggatggttgaacgtgaatatggctctcagctctcagtgtgtctgcaggtgccatgtcagagccagagcacctccgttttccctcacctcacctgtccrcttgggctgggtttccagtggactccagaaagcccagcaccagaggcttacctccatttctggtggcctgtgggcaggtgtttggggggggcaccagtgcattttttgtctaccacacctggcaaaatttgggtctagggtggccagatttaacaaaacaaatacataagaaacaacaaaaacaggatgccccagtttaatttgaactttggatatacaacagataattttaagcatgtccaaaatattgcataggaacatatttatattaaaactatttgacgtttatctaaaatttaaacttaactgggtgtcctatgttttacctggcaaccctagctggatctagggctgtgcacctctggcttgattgggaaggttcttgggacactttttttctgcagctttggttgcagatggtggtcactgtgctttggccctccagctgtgactactaacacacacccctgccaagccgggggtgctgcttggtcgcgggagaagaatgaccacccggagcttctgctttcaccttgctctctggtgccctctcgtggcggaagattcaagtgccgctgatagagacggtgcgctcactttgcccactactgctaggagtttggaggatgggacgggagtgaccgtggctttcaatccgcacagccagtgcagccttctgccttagtcagcacacgagaagcccagaaaaagatagcgcggtcccctgctaatctgggacgactgcctctaaaggaggaaggtgggtgggtctcaggatcgcagtggatgtggtggcagcagcagcagttgcagagataggatgatgtgtgagaagcctgagccctgagttcagactgtagattcttctgaaaaggttccaaagaaacctgtaagcactgaactgttggttgaggcatggctggtgactcttagggagaggaggggacgacactgtcgccccccaccatcctcctccacctaattcagccaccctgaatgcctccgggtcagcatacaccagaggggcgtggaatgtccacaattagcgagtcaggccagtttccttcccctgctggtctggtcaagatgatgatgaaacttgagagcgactcatgcaaggggacagagtggtgaagaaccctgctggcagtaggggcatcaatgactaatggagctattaaatcataagtagggagaagctgctgtctttttaacatcaaggcaaacacggtgtgcctaccatgtgccatgcattatctaatctagaccctagaacaatagctatgatgcagctaccattatgaccaccattccacagacaaggggaaacagaggctcagatgagataaatttgcacccagctcagtgtgactccacatgtacgcttactcactgtactttgccaaggggttgttgttatggtcatctggcctgggacccatgacccatccatctttcttttttttaaatttattttttgtaagacaaattaaaaattttatttatttttatttgtacaactaatggggtacctgtgtgattctgttacacatatagattgtatagtggtcaagacagggcttttaaagtatccctcatctgagtaatgtacactgtccccattaagtaatttttcattgtccacccccctcataccctgcattgttctgaatctccattgtctattattccagtcctttttttttgagatggagtctcactctgtcacccaagctggagtgcagtggtgcgatttcagctcactgcaacctctgcctccgaggctcaagagattctcgtgcctcagcttcctgagtataggtgcccaccaccgcacctggctaatttttgtatttttagtagagatggggtttcaccatgttgaccaggcgggtcttgaactcctgaccttgtgtaatttgcccaccttggcctcccaaagtgctgagattacaggcatgagctactgtgcccggcccctattattccaatctttatgtccatgtgtacacattttttcacacccacttaggagtgagaacatgtgacatttgactttctgtccctggcatttttgacttaagataatgacctccaattccaaccatgttgctgcaaaagacatgatttcattctttttttagggctgaatagtatgccattgtgtatatacatcaaattctctttttccattcatccattacacttaggttggttccatatctttgctattgtgaatagtgctttgataaacatgaatgcaggtgtctttttgacataatggtttcttttcctctgggtagatacccagtagaaggattgctaaattgaatggtagttctacttttagttctttgataaatcgccatactattttccacagatatgttaatttacactcccactaacagtgtataagagttcccttttttctgcatcatcaccaacatttgttgtttattgcctttttaataacagatattctgattggggtgagatgatatttcattgtggtttaaatttgcatttctctataatcagtgatgttgaacatttttcatgtaactgttgaccatttatatatcttctttaaaaatgactatttatgtcctttgcccactttttttttttttttgagaaagggtcttgctttgttgcccacgctggagtgcagtggtttgatcatggctcatggtagccttgacctcctgggctcaagcaattctcccacctcagcctcctgagtagctgagactacaggcatatgccaccacacctggctaatttttgtttttttatagagacaaggtttcactcttttgcccaggttggtctcgaaccctggaacttaagcaatcctcctgccttgacctctcaaagtgctgggattttaggcatgagccaccatgcctggcttgcccactttttaatgggattgtttctgtcgttgagttgtttgagttctttgtatatgctacatatgagtcccctgttgaatgaatagtttgcaaatattttctcccattctacaagttgtttattctgttgattatttcttttcccgtgcaggatctttttagtttaagtcccatttgtctatttttcattttgttgcctgtgtttttgaggtcttagtcataaattatttacctagactaatgttcaggagagttttctctaggtttccttctagtatttttatagttgtgagtcttacatttaagtctttaatccatcttgaattgatttttgtatatgatgagagacaggggtcgtttcattcttctgcacatggcagaagttttcccagcaccatttgttgaaaaaagcgtcttttccccaacgtatgttcttgtcagttttgtcaaaaatcggttggctgtaaatatgtggccttatttctgagttctccaccctgttccactgatctgtgagtctgttttttataccagtaccatgttgtttcggctactatagccttgtaatataatttgaaatcagataatgtgatgcctctggctttgttctttttgcttaggattgctttggctatttgggcccttttttagtttcatataaattttaggattttttttctaattctctggaaaatgatgttggtattttgatagggattgcattgaatctgtagattgctttgggaagtatggtcgttttaatgatattaattcttccagtccatggtccaaccatccatctttgaaggattcgtgccttctacttcaacttcagacttctgttgcctgcctggcctggttgcttcactgggtcccattcagcttgtctgggagaggagcccaggaataggtgtagtgaagctcttggaaccaaagagaacattgttaaaggatttgggggctgtgagcagtgatgatggccacagtctcttcaagatggggctggactgggatcaggcctggacaagggaccctgaaggcctgggctgggtggttgaccaggagcaggtgaagacggagctggagaaggagtatttagggaagagggccctgatcaaagccagggaggcctcccttgttatgagggctacagagtgtgcaggcccatctgaatgtagaggccaggggagcctctatgttcagagctcagctcctgaaggacatgctcaggttggtgagagtaaccaggccatgtcctggtatctctctccttccacgtcgctcaccccacttaccatgggccattaagtcttacctcttttactttctttatatctctagaaactctccctcctttctatccacatgcagctgctttaaatcaagtcctcatcacctcttcccaaggacgattgcaatggcttcctaagagtgttcgtgtctctaaccttggtccttgcaactccacctcctccctcagagtgagctttctatcttgtttctgccttgcatcctaggcccaatagcttttcttatcttatagggttaaagttcaagttccttgggttggtatacaaggtctttcatgaccaagactcagctgactgctacagattcaactctcacctgttcggaaacttttgctctagctagtttgtgtccttggcggttagtttcctgagggtagcatgctgcttcacgcctttcattatcaccgatcattcttctcccattcattacactctgtcccttgaatgcaacaagctgtttgcaccacagggtctctgtacctctctcttgtcttcctggaattttatttcttcagatctttgttttgttttgtttttttgaatttcaagctgtaagtttttttattacagaaaaaattttggtgccatgtgtttgtggtatcgagtgagtagaatacaaagataaccaaaggtaaccagtgttaacccagggctcacttgttcacactttaaatttccagtttcttaaatagatttaatttttggcgttagactcctatcctagctgtttgattgcttgatacataattaaaaccaaacatgtctaaagccacactccatcctcctgaaacaatatccttaccttacttatgttaattttagtattcttcttccagtcactcaaatttgaaaatactgtcatctttgactttttcctctccatttgccacagccatcctataaggtctctgtaatatcttcaacttccaccgccctttcagatcttgttgcttccagtcaagtttgaactgtgcctctcacatagtattcttttttttttaattatactttaagttctagggtacatgtgcacaacgtgcaggtttcttacatatgtatgcatgtatacatgtgttttggttttttgagatagggtctcactctgttgcccaggctggagtacagtggtgcgatcatagctcactgcagcctcctgagtagctgggactacaggtggacgccaccacacccaactaatactttgatatttttgtggaaatgcatttcctcagacctttgggtgacgctccctttttcttcagtcaggtcttgtctcagtttcacctcctcaaagtgacttctctgattgctgtagctgaaggagtctttcccctctttgtcactatcttggcactacagcatgctccattatctgaaattattccatgcacctctgaatttatgtatatccccttttcacttgcctatgctagattgtaagcaccatgggggcagaaaatttgttcgttccttatatgtctaccacctagaatagtacctggcacattatactcaataaaaaaaaaagaacctgttgaatgcatgattgatgcatgaatgaatgaatggtaggcactcagctaatgtttgcagaatcagtgagtgaatggggcttgataccatctaatatgcaacaattgattcaatgatattacttaatcactacctatgtgccagaccctaggcatctctc

SEQ ID NO: 95393 - DNA, 16930 bp, Homo sapiens
  misc_feature (1)...(16930): n = A,T,C or G
gcctggccagctgctcagaccagcttgcagagccgcagccgctgtgggcagggggtgtggcaggagctcccagcactggagacccacggactcaacccagttacctcacatggggccttttctgagcaaggtctcgaaagcgcaggccgccctggctgagcagcaccgccctttcccagctgcactcgccctgtggacagccccgacacaccactttcctgaggctgtcgctcactcagattgtccgtttgctatgccgaatgcagccaaaattcctttttacaatttgtgatgccttaccgatttgatcttaatcctgtatttaaagttttctaacactgccttatactgtgtttctctttttgggggagcttaactgcttgttgctccctgtcgtctgcaccatagtaaatgccacaagggtagtcgaacacctctctggcccctagacctatctggggacaggctggctcagcctgtctccagggctgctgcggcccagccccgagcctgcctccctcttggcctctcatccattggctctgcagggcaggggtgaggcaggtttctgctcataagtgcttttggaagtcacctacctttttaacacagccgaactagtcccaacgcgtttgcaaatattcccctggtagcctacttccttacccccgaatattggtaagatcgagcaatggcttcaggacatgggttctcttctcctgtgatcattcaagtgctcactgcatgaagactggcttgtctcagtgtttcaacctcaccagggctgtctcttggtccacacctcgctccctgttagtgccgtatgacagcccccatcaaatgaccttggccaagtcacggtttctctgtggtcaaggttggttggctgattggtggaaagtagggtggaccaaaggaggccacgtgagcagtcagcaccagttctgcaccagcagcgcctccgtcctagtgggtgttcctgtttctcctggccctgggtgggctagggcctgattcgggaagatgcctttgcagggaggggaggataagtgggatctaccaattgattctggcaaaacaatttctaagatttttttgctttatgtgggaaacagatctaaatctcattttatgctgtattttatatcttagttgtgtttgaaaacgttttgatttttggaaacacatcaaaataaataatggcgtttgttgtatgcagtgtgatcctatagcgttgcccagcctgaatggggctcccctcaggatgccagtgagcgaggttacttctctaggcttctctgaagaccactcagaagccatgtccagagagaattagtccctcagagtccctgctgcttcctgggtgtgggggacagactccctcagccctgccttagagggcagcagatgtcatgagacaaggataagtgggtagagaagacactggggacagccgatcattcagaggacacacggtttgatcaggagcgggggaaatatctgaaggctttctcgaaacttcacggcatgtgcttttattaacctggctgtttacaggagctgaagctcttgggtttgcggtgatgactcttgaacttctttttcaacgagcccaactgcttctgtgggataaacaaaattctgattactgagcctttctgatcccatggagaaggggccctggagtgcagggctctccccacccacacagcctcagaggtgtcggtcaaatacccacagaggctttctccacccccgtttccttaacagctgcaggattagaccccgctcagcagggcctcagaggagtacagtgcaatgccacacactcattaggaccttgtcctcttttggccttggtcctgcttatctaccaaaggcggggaagtctccactcctgccctgatggcaaaggcaaaggtggtggctagtaatcaggtccctgtgcccaggggtaaggacaaacacgccacagctcatagtctgaggtaggagggtgtcctcacaaaccagtggtcttgaccgtggtccacagagcctggcttccacaaggggctggctgggaagcaatggtaggcactcacggccttccgccagccagcggcctcggcttctatggttcttgtgtgttgttggcttgggatttcacttgtgaaaaaggttcagttttctttttttaaacaaatggaaaaccatcactaggggaagccactgccacactaacagaggaggtgacagctcaccttcccgcgcttctggaccagccctcggtacacggtcgtctctctcctgccctcatcagtggccttctctcttgggggctttgccttctcatcctctttgtctgtcaaaaagtcatcagtgccatccccatcctccgtgcttccaaggtcctttctggtgaatagctcagctgggaggaacacagggattggctgacagttattttaggctgagttcgctgccacctttgcaggggaggcagcaccacagtctgctccctgctgacagtagagggtcagggagaagcagggcccgttctgcttacgtgggtacaggtctgtcatgctgtcatcacttgcagctcccccctcatcactggatgtgggctcccagaaggcttcccgcgggcgaggcccgtcaccgtccatctggtcctccctcctcctcctccggtgcaccaggcaggcaggcacgtactccaccccttgcttctgacattcttcatctgggagataagccagcacgtgctgggtacctccacaccccccacggtcctctgggccacagctaacttatgaggactgcactcggccagggccccacagccccaccgccctggacaaaaaccagagcagctgctgggtgcctcagctctgttcctaccaggtgtgcagggagggtggtgggccagggctgcagccaggaggcaagaagatggtagaggtctacggggcctttaccactcatccccgatctagccaggcctaggaagccacggctaggagggcactgaccaggcccaaggccaactgtgccccagtgagcttggcatggcctctcaaaggcaactcgggctggcagtgatgccaccctctccccagcagcctgaagtcctccctcagcacatgggagaccccgtcccggagggcggggctcagtggaggttggctgcctggcctttgctgccccttagtgggtgagaagggagttgggacaaggcttccatggaaagacctcactggagtcaccaccgttgtccccttgtatattggagggtctgctggggcttgccctccagcccagcgcagctaccatcatcatccctcatgggctgcatgagccctgctgggccctggccattgatgtggcggcccatctccagggctgtttccctccttgtctctgccacccacccccatggccatgcagcagccttgtcaccaccagaacgtgaaggcagagcccccttacagccacgtttggacttccctggaccactgccttgcagtgacctcggcgccccagtcccatctcagctccacagtccaccatcataaccattcttcatgggaaccccgtggccccctgcacttagagccttcctgcccacccctgagcagctaacacactggctggaaaaagtccaagcctcaggctggcagcccttgtgcctgcaaggcctctgcaaggtgcccgccttctacttgagaaaccctggtcctgccttctcaatccacactcatgcttcgggagggctggactgcctctccgcactcatcagaagcccgtagacgcatcttcccatccgcaaaccaacctgaatctgtccgctccagcctctgtccatttccctccttagctggactccagaaaggctttctggtgacccagcacctgcctaaggccggacactgccctcatgggctgcagcctacgctccactctagccaggtgtccctgccaagcttcaggtgcctcaccaaggttgccaggggcctctgtgttatcaaatctatcatttttctgtcctcatcttcccttcagtaccacgggaggacttccagcctcttcctggggctcaggaccaggcctctctcccttctctaaactctcgccgggtgctcacccagatccacggtgcaaccatctccttcatccagcacgggtgtccctgtttcaaaagcccgatacttccctaatacacacctttcctaatacagctcaagcttaaaaccttcaaagggactctgaattctccccccaaaacccaccgtcttttcctggatgaccgcagtcaaggagtcctcccttctcaaccatgcacactgtccatgcagcccccacccaaccctctccacacacccactgcagtgctcctggcctggtctctgggtcatccgggctgtgcacactagcccagccagtcctttggagcctacctcagccaacacatttttgcctcagacttccatggaccctggcttctccctggggtgctgttcccccgaccccactgccaccacatccctccagcctcagcctcgagcgaatccctcagcgagtctccccagccctcctgtctccgcaagcccaccccacatccctcgcccagtttctttcacacctcgcattgccacgcacactcactcactcccgagcctgcttctggctctgtgcctgcctgcactaaaagctgtggggtcaggggccatcatccctctcttcactgtgccaaaaaacaggcctgatgcatcaacacggatcgctgaaggacgacctgccttcaagcacgctccatctggggcaaggcgggcatgcactcagatggcgatgcactgatgggggtccactgggacttacatttacacagagctcgctggtaccgccggccctgggtgtgcctcagcacgtgttctgggcacttgttgatgtgccgcagggtgagtttgcagaacaactggtgcctacagagcagagagaccaaatttgtagggacagttcacagcaaggattcagactggtggctgtgtcttggactcatccctggacagtctaccatgcggcttggacatcgggcttttaaaggctcccggagcaattccactctgaagctgggtggggaaccgtctgacccaggccgactgcagcctcttaatgtttaccggaaaagcacgcatggcagcctcactgactgctccaggatgagttcatgcaagaggatggctccacctggagcaagggctcaatgaatggaaacatcctatctctgttttgacgattattacaaagcctagctcccagctaaatcaaagaccccttctggggttaagggaagaacccaacgctgttcacaacctcaggtgacaaatcacaagcctctactcatctgggaagcagccacaccccacaggacaaacctcaggtgagcaaacgagctcaccaagaggcctcgccgctgggaccgcaggtgattccagcacccgggcgcccacctgggtcccagggctcccaactctgaaagagtaggggctgcagcactggcggagtccagcggaggggctgtcctaattgccctgggcctccccgcgccgccgcggaccacctacgggttcttggtgctgggcacgatgtgcggctcgaactctgcatagtcgaaggccggggaggcgcggaccagccgctggtactttttgccgcgggtgtagacctggagctccggcaggcggcagggcagctcgtgacctgtcaggatgcacctcacctgcggacgcgtgggcgggcaggacgtcaggagggccagggctccgctccctggtgccccctcctgccgcgcccccttccctctcctcccctgatcccgccgcgccctctcccctgccctcccctctctcctgctctcccctctcccctctcccctgccctctcctctcccctgccctcccctcagcccctcatcccaactgcgcccttctccgccactccgttcccctcccgcgctgcgaaccttgcgggcgtccgtctggagccgcaggctcgggtgctcccgcagaaacgcccgcacgtcgcccggcaactcgctcatggccgacgcgcccgcggagcagcccggcggaagccgctcgcagaacctggagccgggggcggggctctgggcgggactcagcggcgccccggatgcagatgcytcctgcgtcccggaagcgcccgcggggccgggtgcgatggcggcggtggctgcgttgcagctggggctgcgggcggcggggctgggacgggtgagcgccgggtgcggggtgcggggtgcggggtgcggggtgcggggcgcggggaggggtcccggagctcagcccgcccgtccgtgtccgcaggccccggccagcgccgcctggaggagcgtcctcagggtctccccgcgcccaggtgagggctgcaggccgggctgtgatccaggcgcctgggcagagccacctgctgtctgccctgcactttgaagggttgtcgtggggattgaaatgaaccaactgccggctgagcggaggctccctgggagtgacaagttccgtattaaaatgctttcagtggaattgtggtcgtgtgccgggcatgtagcgagcgctttgtcctcacaacgcgagaggtagctccttggtcgttcccctgttacagagaaggctcgagagttacttccgaacgtcccatccagctaatgggtggccagcccaggctgaaagcccagggctctgaaagtaaagcgyatctaaccaccgcggcttacgtgttcctctcagtgtgcagcacagggctgttttgccgtgtgtagagtgctgtgcaagcctgccccaggcctgcctttttataaaaaaaaaaaaaaaaatagtatccgcaaggcccctggtgcttttcagcggatggaactcatcctctgagagcttaaaggcactttctgtgtacattcttccctctttacatttacgatgagttgtaaaaatggaaagctgttaagagagctctgtgagccattactgaattgatatatttttctacataacacaayaaccactagtgcctgactaagctacttagtaactgtagctgcttattttttattttttgagacagtttcgctcttgttgcccaggctggagtgcagtggcgcaatctcggcttacagcaaccacctcctcccaggttcaagcgattctcctgcctcagcctcccgagtagctgggattacagaagcaccatcgtgctcagctaatttttgcatttttttgtagagatggggtttctgcatgttggtcaggctggtctcgaactcctgatctcgtgatccgcccgccttggcctcccaaagtgctgggattacaggcgtgagccaccgtgcccggccaactgtagctgcttattaaatgcattttgaatggatgaatggtgcatcttagtgcagtggaatacatctagattcttgagtaaaaaggcatgagttactcagggtcgtggttggtggtcaaaccggcactgagccctagatcccacttactcacttggcagacgtactgtgtgtgccttgttctgggcaccgggttaggagctgggctggatacaggtgctgctagttggctctaggcagcaggttttgattggcagtactggagtctgtcttggaacgggctgctccaggtctgtgttcgagggcttctggctccatgtcagtgttgtgaaactctccaggggtggcctggaggccaagcagatgtggcagttctgcagcagaagcatctgccacaaaagcggaagatgactcctttcttcagtgggtcctgctcctcatccctgtgactgcctttggcttggggacatggcaggtaaagaccggcatctggtgtgcgtaactctgggcccttgaccttgctgccatctgcttggccttatgctctgtcactgtaggtcyagcgtcggaagtggaagctgaacctgattgcagagytggagtccagagttctggctgagcctgtccctctgccagccgagtgagtgcatggctgcccccctagggcctgttttacttgagttcaacagcagagccctggcttctgctggccagcttgccccttttggtgggacttttagtcactgccttgacctcaggtgggagctctcattatcagtcatctgttgggcttgctgttgacacctgactgcccttgtgaagctacctgagaccgcctcctgacatatggaggaaagtcttattttgagtcctgggtgtcacccttttttcaggtatagtaaacttatcctccacagggcccaaggccctgtggctgaggrcagataatgtaggtctcaccgtgagggtggtcgtttgaaaaagtgccctgaatgatttgtctgctctctccctagaatatgccctacagagataggtatattcagccacattttccattcagggtagcaaacagtatgccagatttggcttgcagatggggttttggcccacatattttttaaaatttcacataaaatattcattgaggagtccagatttttagcctctcttgtaaagttggactctggcagtgcagatccacattcccacatggcatcaaagttcccctttgaagagcacgccctttgcctttctccttcacttgtctggccctggtgggctgtgtagtctgccaccctcaggggattcgttttccagccaaaccttgctcggccactgttcttatctccatgcagcccaatggaactgaaaaatctggagtataggccagtgaaggtcaggrrgtgctttgaccattccaaggagctgtatatgatgccccggaccatggtggaccctgtccgggaggcccgggagggcggcctcatctcctcctcaactcagagtggggcctatgtggtcactcccttccactgcaccgacctggggtgagtaggacatgtgggagctggctgtcctggcagaggcagtcagggtatactaatttacatcactatttccttcacaatccccaaccttggtaggaccctggggaacccaagatacccaggagattcaattccttgcatmgtttaagtccctaattgtgacattgacttaatcttctcagccagctcatttatgactggataatttctgtrtgttgacctctgaagggaaaggagggattcgtgaaacaggggccctgcctctggagaactgtytagttgcccacacattagatgatggcaagctatgaggggccagcaagaggacttcaagagaaaggaccccagccctaccttgagggagtggaggcaggggtggctccctagagggctatttgggagttaagagatgggaagaacattccaggcaaagcaaatgacaggtacaggagcacctgtgtgattaactagggaactggaggattcacgtaaaaatgaaaatacctggggctcttgttaacccatgggttcctgttttagggctgggatggggcccaagtactcatctccagcaggctggggtgccagggctgctcctcacggctgccttggttaggaggagggattggagacagctcttgccatagttcaggggagaggtgtggggtctaaactctggcgtggcagcgttgctcaccagttgcacgttgtagtaggtagaccacaagaagcagagatagaaggggaaagccacactggtaaaaaggtagtgatggtggcagggagccttttaccaaccacgaaggtgcctcaagagaggaagactttgcctgtgtggcactgccagggctccactgagccagccctgttttaaaagccttccttggtgctctagttgttcctatgggtgcctgagtgaccatgagtgactgtctttagtcaaaaaccctccccacctgaagtagcactttcattaccctagagtcaccatcctggtaaatagagggttygttcccaggaagaaagtgaatcctgaaacscggcagaaaggccaggtaagggacatggactcttcctactttagagaaggctctgggagtccaccaggctccatgcaatctcacacaccttcctttatagattgagggagaagtgsacctcattgggatggtgaggctgacagaaaccaggyagccttttgtccctgagaacaatccagaaaggaaccactggcattatygagacctggaagctatggccagaatcacaggcgcagagcccatcttcaytgatgccaacttcygtacgttgtggaccagcccatctcggaacaagtagcttttgtgaatactgtccttcctcctaaccctcattgcccagtcactactgtggcttatgttctcacatgtgtatatggcgggtgggaggaggcagcaactcagcaaagaacctaggcaagtactgagcggacaagggcggggatggtcacccaacgtaaaggccatacaggacttccaactggccacgcaaaaatgacagccwctaggaagtggtgcagaggctggcaggccagtagggggtggacttgagtctgctgtctccacagagagcacagtccctggaggacccattggagggcaaaccagagttactctgaggaacgagcatctgcagkacatcgtgacctggtgagtccccagcggccctctggcttnctccccttcagcctagcagcctgctaatgctggcttgctttcaacccctaggtatggactctctgcagctacatcctacctgtggtttaagaaattcctacgtgggacacctggtgtgtgacagatcagctgctgaagccctgtccctggataatgcagtatttcaagactgcctttatgctggatcatgtgctactggtataaagttctggccttctaccttaaatgagctcatgacyggttcatcataaaatcctggcttggtttcagtccaaagaactttcccaaaacttgatactcaagttacatctctagggaacaaaatgcctggtttaagaatgtatttaagggtgggaagggccgggtgcggtcaggagctcagaccagcctggctaacatggtgaaaccccatctctaccaaaaacacaaatatgggccagccagttgggatgctgaggcaccagaatatcctaaacctgggaggcgaaggttgctttgacatcacaccactgcactccagcctgggcgacagagtgaggctgtgtctcaaaaagatacttgctaaccccaagtaagattcaacccgagatactcaacagacactggctgaaggaaaatttgtattatttcaattatttttatgtacagaaaactcaacagtgtacatttaacccagtttagtggcaagttctttagcctttgccttttcgagcttggcgatacgagccacagacttaggacccaggacattgccaccccagtgacggcggatctgaaaagacaaaaagaggcagttagcttggcttactgttttctgagattttcaaggttattagttgcgttaattctgtttggctgttccaagctgatcgtcagatagaacttctcataggttaagccagccagttatttgggagaaagatttgtgaatgacagtattttggtgtaaagctgcctcttacctcatcgtatctgtcattgtaattggtcctgatagcttccaccagcttagccaaagcgcctttgtcttccctaaaaggcaggaggggaaacaaaagtgggttttttgccttagtttcccttttagaatgcaaaaataccttttagctcaagacagtcttttgcctcagatgcaatgctgaccacatggtttattcaggtgaagaaattcttaaccatcattggcaaaagttcagataaatatatttcttaaactaaaagattggcctttaaggcaaaaggaaacaactgtgaggcatggattaaatgaactggggggaagtttggggccaggctgtgtacttacgagttcacctgtgtgaaggcgacagtggtgcaggtcttcctgtggactagacgtcccagtcttgcctttcccttgataatgcagtaagggacccccattttacgacacagggcaggcaagaagacaaccagctggaagaaagcattagctgaagactgtattttgaccaaaagcagcaaatttcagttagcttgtaacaattgctcagggttaaaaagctcatggattcgcacttcaaggttgaattcagtgagagattcacatcattgcaagagccacgcatgtgttggatctgtgtcagtactgccctcacccacttcggtcccatcactgacttggcattaggtctactctctcttcctggtactgccagaagcccttgggttagcagtcaacaggcaaacgcacctcgatgggatccacgtcgtgtgcaatcaccaccagctgagctttcttgttctccaccaaggtggtgacggtgttaactcctagaacacacaaccactttgtgagcactcacagggcctgctctagtcacaagaagctgctgggctcagctgctgactcagtgttaaaaagctcggttttactcttcacagtaatttcaggccaagaaattttacatcactgcaacagcccgcccccagtgttcaccctaaggtggggcctactcacctgctcgaaggacaggtggtctcttcgttgggacgtcccctttgccagcagccttcttctcggcccgggccaacagtctctgcttcttctcttgctttgtctctggtctgtacttgtgggccagcttaagcagctgagtagctggaaaaacactcttcagtttaggcttggagtcaaggttctaatccttgtcacttaacacttaataacaaatgctggactgcggtcctgctatatgactataatttaatgacaactgcagttcaagaagcctaagaccatccccctcatgttctggatgaaataaggaatccttgcctgagaaactcctttccacgccacagaacctcacctgtttggcggtccagggcctgggtgaactggttaatcgcaggaggcactttcagccgcttatagaggatggctctctgccgctgcaacctgatatagcggggccatttcacaaagcgggtgaggtctcttttgggctggatgtcctgtcctgagaagtaaagggtgacaccgagtgaggctcaaattccatgtcaagttcatgtctggggccactaggaagggtgttggtgcatcagcgatcttggtggtttaaaatgtcatcaccatctctcagatagcaaatattcttttacatcatctgcacacaaacacctgagaacaaagagcacgatgcttttcctcatctaacaagaagccaaggtgccacgaagtacagcagaattgcagtcctagtacctcgctgcgacactgctactgtacttgtttccagatggctaagctgaattcaaggccactaccatattgagctgaatgctcgctcagcaactcccaatgaaagcaagaagcatgtatcattgcccccgtctctaagagacacaaattaaggactgcgaccactttacacccactaaaacctacaagatacaacacaacccaattaccaccttcccttgagaaaaacatagaccgttttcattctgccgtttgttacttaccaatgccaaaattcttaggccttttctcaaacaggggattcaccactttcttagcctcctgcttcttcacgacagctggggccggagccaccttctttcccttggccttctttcctttcggctgggcagaaagaaaacgtcagttaaaccgccgcctccactcgcttcgtcgggggtagggctcaggctggctcctccaaaacaagggacgctgacagcacctgcctgaactaagctggcgagcagctttctgcaaccccccagcaccacccctcgacaggagcatctcacattcagccgcacaagcatgcagccccgggaaccccgagtggccagagcaaggctaagcccgagaccacgctctcttcgcgtcgcccacccaggagacaccccggactcatgactcctctgagtcgcggccccacaggctctagaagcaacaggggcgggctcagaactcgtcgctcacaaggcctctggagcggcccccagcaagcccgagagacgctagggctccgagccccgcactgcggtgctccaggcctgcgacacccagccctgcgacaccgggaacaacgcattccgctctcggccgcccggggctctagtccatctcaatgtctccgtgccacaccaagtggggctctaatccacctcggtgtctccgtgccacaccgagtggggctctcctagcgccaggaggagcaggaggccctccgaggccgcgcctggaggaggatggcagcggatacagccggaacctggctatagtgccacggaactacagctcactcaccatcttgggcggcgggaggagagagaaaggaaagggaattgtgggtaatatgtatgcggcctcggagatcgcgagagttgataccggcacgggatttcggatttaaagcaacagcattcctataaagctaaaaatcgaggcggggccgagaggctgcggcggctgactaggttttcggaccgcggcgcggcggggaagagagactgcggcgggagggccaggccgtgggagagacgcgggaaagtgcgggtcgcagaggcacttgaccaccccgccctaggccgacccggcggacgcggcgtctggtgtgcgggcgctggggcgggtatgagggtgtggtggggggtggggatggagggggggtgggtgtgtgggcgggagtgggggtgggtgggtgcgtaggcgctggggtcggagatcccctttcctgcgtgtgacttatttcccacaccccgccaaaaatgggcacaaacaatgcgagtgcgtccaggagtccgctcggtcgtgcgccagactccgaacctagggggccccgggccctccctgagcaccgcgcgcaaaggcccggccccagggccaggcaactccagcgccgaggccgtccagtgcggctggagggcagaggccgagaggcgcggcgcggaacttgagccccttgtcccggcgcaccggggaaccatgagggatgttaagcgagggagtggaattaccccccttttttttttcttttggagacgtagtctccccctgtcgcccaggctggagtgcagtggcgcgatctcggctcactgcgacctgtgcttcccgggttcaagcgattctcctgcctcagcctcccgagtagctgggattacaggcgcctgccatcacgcccggctaatttttgtatttttagtagagttggggtttcaccatgttggtcaggctagtctcaaactcctgacctcaggtgatccctgcctcggcctcccaaagtgctgggattacaggcgtgagccaccgcgcccggttggaatgaccactttttaggacctcttccctgccgcgcagagactggagggagcggggcccgcagtgcagggatgaggtctggagcggggcagcctgagtgggagtggaaggaaagcgtggatgtaggcggtgcagaggggtcgaattggaaggactcttcggatgggagggcgtggcgaaggtggcggcgggctaagaagttaagccaagggctggggacggggagctggtgttgagtttgcagggctccctgggacacgctgtgggcctggacgtgaagtctggactggagccctggacagggcttggagggctggccaggagttccaggatgagcttgctctggcaaaggcggggccagtcctggcaccccctgcggtgtctgctgatggaatgagttcatctgtgtttcagtgattgactttatttggcagaaagggaatccccagaaatctgcgtgttctgctaaggttggggcatagagggtggctggggtagactctgcctgcactcagaggtctgtgctgcactctaggtcccaggtctccccgctgcgctgcttgaggctcagccatggcccagcagagagccctgccccagagcaaggagacgctgctgcagtcctacaacaagcggctgaaggacgacattaagtccatcatggacaacttcaccgagatcatcaagaccgccaaggtgggggtggggtggcccaccaaggggagcagagtctgagaaggggtggagacaggagaggccaggggctgagcagcgcgagtgaatagtgttctaggcaggaagcacccagtgcacagggagctggtcagtagataagcaaaccaaataatggcacgtccagcccttactaacagtatggatttggatggagatttcactttttagtgcctcagtttctcctgcatggtggggtccttgtgatgactggtgagtttatctgtgtaaaacagttacctcggggcctggcacacagccaatgagcaggagaaaagcagactgaggggagaagtggggggtggcctccaggcaggtggagcggtcagcactggggcctgcaagcctgctgaccactgcagctacagctgcatcagattgggctggatccctcctggctgctgcagacctggcaggctccataagcgatgatgatgaggatggaagctagcatgtacttagtgcttgccatgtatcaagccacgttgtgaggttatctgtgcctgttctgctgaatcttcatgaggactctgtgaggtgggcactgttgtcctcttcatttcaggaggaaacccaggcccaggagacttagtgacttgcccaaggtcactcagctcacaactggctgagccaggatttgaacccacgaagtctgggtcttaaccactgagggtacctgacacccaccccgaactgagcctttgcaaggcctgccgggaagccccatccagcctcgcttggc

SEQ ID NO: 95394 - DNA, 42587 bp, Homo sapiens
  misc_feature (1)...(42587): n = A,T,C or G
tgctacccgatttcaacacttactatagagctgcagtgattaagacggtgtggcgctggcgaaaggttcaggggaacagaacacacagtttagaaatagacctacacagatttatggccaattgatttcagatgaaggtacaagggcaattctacgaagacagtcttttcagcaactggtcctggaacactggacatctttatgcaaaaacgaaccttcaaaatggttatgccattttatttatttatttatttactattttttgagatggagtcttgctctgtcttccaggctggagtgcagtggcgacagctcggctcactgcaacctccgtttcccaggttcaagtgattctcctgtctcagcctcccaagtagctgggattacaggcacctgccaccacgcccggctaatttttatatttttagtagagatggatttcaccatcttggtcgggctggtcttgaactcctgagctcaagtgatccacctgcctcggcctcccaaagtgctgggattacaggagtgaggcaccacgcccggccacaagtcctttattatactgtatgttttacaaatattttctcccactgtgagcctttttatctgttttcctaatttttaatttttgatgaagtgcaataattgacagaatgaatagatagaaaattggcaccaggtgcagtggctcacgcctgtaatcccagcactttgggaggccgaggaaggcagatcacctgaggtcgggagttcgagaccagcctgaccaacatggagaaaccccatctctattaaaaatacaaaattagccgggcatggtggcgcatgcctgtaatctcagctactcaggaggctgacaggagaactgcttgaacccaggagacagaggttgcagtgagccaagaccgcgccattgcactccagcctgggcaacaagagcaaaactctgtctcaagaaaaaaaaaagaaagaaagaaagaaaaaagaaaagaaaattggcaaggatacagaacttgaactccactggacctgacattaaaacacttgactcaacaagagcagaaaacattcttctcgagcacacacagaacatttaccaggagagaccacagtctgggctatgaaacaaaccctgttaacttcaaaaagattcaagtggttttttgttgttttttgatacacggtctcactctgttgcccaggctggagtgcagtggcaggaacatggctcactgcagcctcaacctcctgggctcaagtgatcctcccacctcagctttctgagtagctgggactataggcataggcgtgggcaaccgccccagggtgattttttaaatttttttgtagagacagggtctcgctgcattgcccaggctgacctcaatctcctgggctcaaatgatcctcctgcctcagcctcccagtatcgggattacaggtgtgagccaccacgccccagccaaggactcaagttatacaaagtatgttctctgaccacaatgaaattcaactagaaatcagtaacagaaagatctctggtaaattcccaaatatttggaaactaaatgacatacctttaaataactcattagccaaagaataaatcaaagggaaattagcaagtattttgaactgaatgaaaacacaacatatgaaaattcgtcaggtatcacaaaagcagactgaactttttagaccttacaaatgcatgactgtcccccttgcctctgatcttctgcctggggtctgcctttccccaatctttgttcactatactgaatcctacatgacacagtcaacctatgaagaaatccagagatagactctctaaaataaatggatttgggaatagcagcttatctggaatactgcaaccgttgaggatggtcttgcagtgagtcctgttattggtctgtttgtagaaatgtcttgtggtaagtcctgttgcaggaatgtgtgcgtgagggctgcttcatcacctccaactgttttagtttgacataagtgactccattttggtaccggcaacgttcacaactttccatgtgacttcagcaccctgcaccccgatcctttccctggccactttgcaggaccactacctatgagactatgggttccttgagagctagggctgggtctcattcgctcctgaaactttcacccagcagagtgatggcccacgccatgcatgacatgcgttgctcaatgactgcatccactcagccagtatgccagtccccactgagcctcactctcaacctccctggctggcataggttccttgtgcagacatccagtggcagtaaaatattgctgggttctcagcttcccccacctgcagccctcactggcccacccagttgtcctgtctctgctcaggacgagacccccccccgcctcttcagtctctgtagccaggtgatggcagtggccttttccagaccctcactggccccttagttcactatgatgacttcacctcttgggaacccatggggatgtctttccctccaatacatctacatttgcctgacccagaatgtggtttcaagatgggtccatgcctggctccaaatccccttatcagagtaaggaaataccttaattcctagtttgctaaaaactcgttataaatggctgtcgcgtcatttactgtgttcctgttctgcaaccattgagatggtcacgtgggttttgctcctttaatctattgatatgaattacactcttgattctctggcattgaaactgctttgcaattctgaattaaatccagtgtggcactttgctaaacttggtttattattgtctaaaatcttgacattggtatttgtagggaccagccccacagggtccgtgggtctctccctccctgtgtgcagcaatgagagagtgtagaaatacacacacaagacaaagagataaaagaaaaggcagctgggccygggagaccactactaccaatgctcggagaccggtagtggccccgaatgtctggctgcattgttatttattggatacaaagcaaaaggggcagggtaaagagtgtgagtcatctccaatgataggtaaggtcacgtggatcacgtgtccactggacagggtgcccttccctgcctggcagccgaggcagagagagagaggagacagagagaaagacagcttatgccattacttctgcatatcagagacttttagtactttcactaatttactactgctatctagaaggcagagccaggtgtacaggatggaacatgaaggcggactaggagcgtgaccactgaagcacagcatcacagggagacggttaggcctccagataactgcsggcaggcctgccggatgtcaggccctccacaagaggtggaagagcagagtcttctctaaactcctccagggaaagggacactccctttcccggtctgctaagtagcgggtgttgttccttgatactttttgctactgctagaccatggtccacctggcaacgggcgtcttcccagacgctggcgtcaccgctagaccaaggagccctctggtggccctgtccgggcataacagaaggctcgcactcttgtcttctggtcacacctatgtcccctcagctcctatctctgtatggcctggtttttcctaggctatgattatagagcgaggattattataatattggaataaaaggtaattgctacaaactaatgattaatgatattcatatgtaatcatatctaagatctatatctgctgtaactattcttgttttatattttattatactggaacagctcgtgtcctctgtctcttgcctcggcgcctgggtggcttgccgcccacaggtatttggtaacttccctttctcttacctagttttggtatcaaagctaagttcacgaatgaagtgttctctcaattgattctgttagaatttgtctacgtctggaattacctgttctctatatcgtggaacttccctgtaaaaccgtctaggggaacattcttaactactgactcaatttcatcagtgattacaactcaggctttctattacttttagtcagttttggagatttttcttccatttactttgagttgttccaacttaagctgcatgcttatttttctttagctttaaaaatacagacatacagcgtatgtgtgtataaatggcactatttatctgtagatgcacatacatttaggggctatgtttttttgtgctgctttagctctgttccacaaatcttaaattttttctttttgagacagtcttgctctgtcacccaggctggagtgcagcggctcgatcttggctcactgcagcctctacctcctgggttcaagtgattctcccgcctcagcctcccaagcagctgggactacaggtttgcaccaccacacccagctaattttttatttttaatagagatggggttttatcatgttgtccaggctagccttgaactcctgatctcaagtgatccacccgcctcccaaagagctgggattgacagcatgagccaccatgccaggccctgttccacaaattttaatacgtagcattttcattatcctttagtcccaaatatttctaatagccattcggaattctttaactcataggtaatttataagtgtgttttaaaaattccaaatatgaaatgccactgcactccagcctgagtgacagagcaagactctatctaaaaaacaaaaaaaaatagctcaaattttttttaatgacattgggatacggtcagataacgacactgattccttgaaatatcttaagacttcttttctggacaaagtaggtggtcagtttccatccatgttccatatatgcatggaaagagtatgtattcttttcagatactgttgtgtctgtctctcagctcaagctcatgctcacctcacatcctatctttcacagggctttttcatcagttgcctctgtctggtaacagtcacaccagctcctgttcagttacagtctttgtctcgtaaccggagagtttcatcaaaagaattttatttacagctttatcatccatatgccactaaaattcacctgttttctttcaacctgcactcattttgattgcctggaactctggatttaattcttccatcccactttgtatcttgcattcacttcactctctctccagcttttattctttctttctctttccctaggtccaatgcacttgacccaactcacatgcgtggactccgggaaggtactgctccctccctccaaattctgagcagtaaaatgccgccccggggcactggggaacagaaaggaatgagaccccaacaggcagaagccaagagagcggggaggagccatggcgttctgccccaggatgcaccacgcctggacgtgctcccccgactcccagtgccaggtgcccatatgccacacctcagggttgtcctctgttcgggtgagctgcggactaacgtggcccggcagcagaggccaccgtcttctgtcccgtggytcctgcgaacacaggcagtggggaacaggcagtgactgcccacccccaccgttcctcctccctgaccctgcaaacctcggggaagctttcaggcccgggaaagcagaccaggccccagtctccctcaccctttccctgggtctgaaggtcccggatcctgcgttcaaggatgacgctgaaactctctctttctcacatgggatctgtgatctgggccctcacaactcagcagagcaccactgtgtccccctcacatggagaggccgaggtctgtggagatcctgggacagagccagcgtcaaggactcagagggtgtcctggagtctcctaggacggaagacggcggccccaggtgggaaagactcagaccaggcctgcgcgctccaggtcctgcggcaggatgcggcccttcttgcgggctctgagcaggcggcgctcggcgcgggccgccttcttcctgcgcaggttctgccgccgccggtcctggcgctgctgcatcttctccaccacgccggccrtgcgcttctcccaccggcgctgccgctgcgccctgcgcttctccttrcgcttcagggcctcctgcagcaggcgttcgtcgtcacggatcttcacgccctccgccttgtagaggaggttggtccacttcatcttcgcctccagctcctgcgccttcccctcatcctggccgcgcagctcgtccagccggctctgccgtgcctgcaggcgctccagcagctgccggtagttcctyccggtcagcggcgtgaggttccccttcaccctctgcctcttctcttttctgcgctgcgccttgctggccggctcgtcttcgctcacctccacctgggaggaaggtatgacatcagctcatgccagccctgcactaggccccagccttggccagtaccctaagggacctgcgaggtccccgtcaccaccttacagacatgatggggttcggagagagatcatgaagctaacaaggggcaacgctgaggcctgaagccgacccagcccgcccaaggacccagctcccgctcaccttatkgaagatcagcccgggcggctccygcggctccgtgcaggccccctctggggttgcctccaccacctcctgggcctccrtggcctcctcagccttcctggccttctctttcgcccrcagctcctttcgcttcctcttcttccggtcccgttcctgctttctccgccgccttttctccaaggckgcaggggacagctccttggcactgccctgggggaaagaggcacccactcattaaagttctctcgatcccagggkyccccagcctggcccatagtcgagaagaatcagggctggaaggcaggtgagaaaatcctcacgcaaacaaggggcccgcggagttcaatgttccaccatgatgttccccaaaaagcaaatgaccccwaaagagagaagggacccccaaataagaatcacagcttccaattcccgggtgcttaccccgtgccaggatacattacgcacatggtttcaaatgtcatacatcgttttatagatgaggagggtcaagaccactgcctagaacttggagttggcgtctgaacacctgtcctgaccgctgcccattctgttcacgaggtacccaacgaagccctccccaatggcctttcccatccccgggccaacaagagccctacaccagcccaaacgagacctgtgcttcaggaacaagggcccagasccttgctcacctcttaggaaccacacactgtacctcgggatggcggaggagagtagctggggactgtcccccacacagcacraggccttaaggaagggccccaggaaaagggtgggtaggggccaacacaggggagacagtaccattcagcacaaagagctgcattggtgcttcctgtgcctggccactcagctcaagtccctactcaactcacaggactattacgacattcagagaaacagacacaggaggtgcccatcccagtgtcagttcagcaaaggcagcttcccagaaggaaggaggctgatgagcttggggactgaggttctccaagaaaataactgctctcccagagcacacctgctggggccctgccagactcgctgcagaggggagaacaggggctacggcccctcgctgacagctgaccccagggagaacacaggcagagcagtgacggcactccagcaaacctgcccgcctacctggccccgggcctcctggatcttctcatgcagtcgctgtcgcagaacatccagagcaaagacagactcaggctcagtggccaggccatctgcagggaaggagacaggactgcagggggscctctcttcccctccccctccctccctagggccacgaatccctgtcccactgtggccactcatggatctgcagggcaattccagtaaattccactccaccgcttcaacctggactggttcctacaacatcctccagracaggtaactcagtgcctcacgaggtaggtcaccgtggtatgagaaaacacttcctacggtgcaagccaaaccacctcctccaaattttgtagcctgggccccagaacaagttggctctcacaaggcccctgcagagacctgagggcagggaagctcttcaagccaabctgctccaggtcctcagagagacacagccttgccccctgacatcctgctagccatgtggcctggaatgccacacagttccttcggtcccatccaccctarcactcctgtgatctttgctcttggggaagtctcgtgctatccctgtgcgcctgctgctgctttttttttcttaagagcaaaggggaccaagcccaagcccagccccagccccgccctgcacagaaccaacatgccctgaagcctctcacytgcagggttccctgctgagctggaagcccaagctgcttcctctttgsctgcctcagscctcctgsccccagaggctgctggagatttctcccccaaggacttggccttgtgctcagcagccttctcttctcgcttccggaatttcttttgtgttttcttccttttcttttttgggggccctgcagtttctgagccttgagttttgccagctgaaatgcaaaataagaaagagttaagtcccmatctcatggcccattcaataggcaggaaaggctcaccaaggctttgatcccaggaagatgccgaaagaggatcaggatcgggggccwgagacactgatcctagagctcagaaccacaaccttgacccagtagttctgcttgtgagaattcatcaggcacaaagatgaggcttcaaggacgttcatcaccattatttgagtgaaacattagaaaaacctgaatatccacctccactaacaatttctggccctgctttacaataagctaccatgctgccatcaaacacaatggcaagggctttcattttagctgctgggggttatgtttacattttttcttttttgagatggagtctcaatctgttccccaagctgaagtgcagtggcgcaatctctgctcactgcaaactccacttctcgagttcaagcgattctcttgcctcagcctccggagtagctgggactacaggcgcccaccactgtgcccggctaatttttgtatttttggtagagacggggtttcaccatgttgtccaggatggtcttgatcttytgatcttgtgatccgccctcctcagcctcccaaaattctgggattacaggcatgaggccgcacggccggacaatgtttacattttaaatgggagaaatcagtstaagtaaagtaggagctgaatcgttttaatgaaaaaaaaaaaaaatttcaaaaaggatgagaaagacagacggaagacatactaggtaatgagaaaattcacttaagattttggatttgctataaccaatatatcgtccttgaataaaaaggaaaccccgttttacctctggtggttccagagaccctgctgctctcctctcctcctgggcccagacagcactgacacgtccccgctgtcggcttccccacccgattatctacttcccttrtgcagcgtggtcaccaggccatgagaaccctaagcgcaggagccytctgccatcctcctyctccccacaccgcaccatgcccgtagtgaagggactgaaagggtcttttcccactgactgaccattactcctgtctctactaaaaatgcaaaaaaaaaaaaaaaaattagctgggcgtggtggcgggcgcctgtagtgccggctactcgggaggctgaggcaggagaatggcgtgaacccgggagacggagcttgcagtgagccgagatcgcgtcgctgcacgccagcctggacgacagagcgagactccgtctccaaaaacaaaaacaaaaacaaaaaaaacaaataagggaaacggcgataatttcacaagtcacttagattttttttctagtactttacagactcgtctacaccggctccggccgcgtcccccgtttcgcaggccccttagtcccggcccggccctgtgcgttaccccgcgtgcgcgcctgctgttccggggccgaatgggagcagatcttcttggccaggctctgcaggtaggcgtccttggygagtagagaggccatggcggagacccgggccgttcacgactcacaccttccccgctgygcgtgcgactctcaccacctccgccggaaaccaccacacgggcaggcgcggccaaacgaacgccgagccgccagcccgcgcgctcgattagccaagcctgactccgccggaagcggcgcgcggggcggggcgcacagcattgcgggccgaggacagccaatctccgcccggagtcggtgcagcagggcacccccggggcctggcctcagtgcctcwatcaccccggtcccgcacgtgttcctgtgctcccctcacccccaaccccgacacagcaggcgctcatgagtaggggcgaaatgaatgaatgaccagcagtacattcattccgtcctttggagtggggggcctcaggtctcaggcggacacagactgagcgcctggcacgtggcaggccctaggttcagtcctaggggacacaagcagtgtgtcacacacacagatgtgttctcggcgagtgtctgccgtagaggtgactgataaacctggcaagcgtgtgactgtcaggtgaggggagcgccaaagaaagcccaggggaaaagggagaagtgttgggcgggagggagcctgcatgttcaaggaagaccccctgggcagtggcttttgctctgaaaaatagaattacacactacgattccctcccccaccccggtgacggagtctccctctgtcgcccaggctggagtgcagtggcaagatctcggctcactgcaacctccacytcccgggttcaagcaattctcctgcctcagcctcccgagtagctgggattacagacgtgtaccaccacgcccagctaatttttgtatttttagtagagacggggtttcaccatgttggccaggctggtctcgaactcctgacctcaggtgatccgcccacctccgcctcccatagtgctgggattgcaggcatgagccaccgtgcccagcccacactgcgatttttaacacaagatgtggtctttataataactcactaggggcaggagaaaagagaggtcatggcctgaggcttgggaccaccacaccccagttcctgcactggaaaattacaggctcattaaggacccagarccccttccagggccaccccgttggtagagaagggagaacttaagagtcttaaattacaatttgaaaaggtggctgctgatatatatattagaaacagaactgttgtatttgawacagaactaaactttcttcccctaacttctgccatgaggtgatttaaaaaaatttttttggccaggcgcagtggttcacgcctgtaatcccagcactttgggaggccaaggcrggaggatcacttgagccctagagttggagaccagcctgggcaacatagtgaaaccctgtctccacacacaaaaaaatttaaaattagccaagcgtggtggccggcccctgtagtcccaactactcaggaggctgagaagagacgattgcttgaaccggggaggcagaggttacagtgagccaagatcacgccactgcattctagcctggagtgccaggctgtctcaagatatatgtatttttttcacttttaaaaaaggcagtcaaatttagcagtgtgggggtcgaatgccaactatagtgacactaaggttaattagttctgacatcccactgccattcagaccagcctagaggtgatgtttcatggaggataggcgtgacgctgctgctgactcccctgaactgctgggtatcttaacaccatcacctactgagttcagaatgggcatctgaccccccaagccccatctcttcctctcactgtcaacccttttttcagttaaagcggctccatccttccaggtgcttgggccagaccttgaaaccactgactcctttcttattccccacatccaatgcttcagcaaatcctgtcagctgtgccttcagagcacctccagaatctcagtggacccactcccatctcatcaccactttggtcctgttttatttattttttgaaatggrgagtctcactcttcctcccagsctggagtgcagtggtgtcatcttggctgactgcagtctccacctcctgggttctgcctcagtctcctgagtagatgggactataggcgtgtgccaccatgcctggctaatttctttttcttttttctttttttttttgaggtggagtttcgctcttgttgcccaagctggagtgcagtggcccgatctcggctcactgcaacctcygcctcccgggttcaagcgattctcctgcctccgcctaccaagtagctgggattataggcatggaccagcacgcccggctaatttttgtatttttagtagagacagggtttctccatkttggtcaggctggtctggaactcccgacctcaggtgatctgcccgcctcggcctcccaaagtgctgggattacaggcgtgagccaccgcgcccggccaatttctatactttttagtagagacagggtttctccatgttggtcaggctggtctggaaatcccgacctcaggtgatccgcccgccttggcctcccaaagtgctggggttgcaggcgtaagccaccgcgcccggccgatttctatactttttagtagagacggggtttctccatgttgcccaggctggtctcaaaacttctgaccacaagtgatccacccgctttggcttctcaaagtgctgggattacagcaggagccactgggcctgacctggtcctgttttagattttaagaytccaaaataacaaccaaatgcaacacacaataaaaayaggcataaaagcctttcagctggaaccgccaccttccagtaattcgccaaaatgacgaacacaaagggaaagaggagaggcacccaatatatgttctctaggcctttcagaaaacatgcagttgttcctttggccaagtatatgcaaattgatgagaaaggtgatattgtagatatcaagggaatgggtactgttcaaaaaggaatgccccacaaatgtcaccatggctagactgggagagtctacagtgttccccagcatgctgttggcactgttgtaaacaagtaagggcaagattcttgccaagagaatgaatgtgcatattcagcacactaagcactctaagagccgagagagcttcctgaaacgcgtgaaggaaaatgatcagaaaaagagggaagccaaagagaaaggtacctggattcaactgaagcgccagcctgctccacccagagcagcacactgtgagaaccaatgggaaggagcctgagctgctggaacctcttccctatgaattcatggcatcgtgggtgttaaaaaaataaaagacctctggactagaaagaaaaaaaataggcattaaaaaaactatttggggaacaactgaagaaatctgaatacagctagataccagaggatatgcaatcatcatccattctggttgtggtgatggacgaaggagaatgtsctcagagaggcaaactgacaagtacttccatgagttccactgccctcaaaataaaaagcttgggataaaagagttacatggactgagaatgggccggggcttagcaatgtggaggccactggtgaccttaataggtgtagttttgctagagtcatggagacaaaacctgtctgacgtaggcccaagagagaactgcaaatggttatcagctgcttccccgtggagctctgctgccaaggccatgagctggagaggaaaaaaggtcagcagagcgrcttggctttaagaaggagaaataacttgattttcacatgggaatgatggtcctggccaagcagaaaatgaagctgatggcaggtcttatcgctcaggattttaggaacagggtaagtgggatcccaccacaaagtctggccagttccttccgggctctcgcttcatatatgcttccatctggttgtaatctttttcttcctcagtggttaagtacaaggcatttccacagctaaaatagtgcgggaacagatcaccacacgtatcaatggggaaattctccctcagaggggaagcaacttccctaggccaccccagaagccaggtccagagccaggactgggcctcaagctcctgtctgtctggtgccttctgcttggctgtggggttctctggttcaggtggtgatgggtcagctgtgttcttacctgtccccaaggctggatcctgggctgtcacctcattcatacatcgggaaagaygatggcctcccccatgagaagatgaagcacatggatggtgctggaggaactggggtggggtgctcccccacacttcctgtggacgaactgtgctccccccacacttcctgcccagtgttgtgacttctgcatttctaaggtgagcctggcaccaaaagacactgggtctagacttccatcaggttcaagttctgattcctgccacttcacttcctagctctgtggccgtggtacacctcaccccttctaagtccacatcctctcctctctaaaataccggcactaggagcaccggctctggtagcagtgaggatgagatgccagcagaggcacaggtgcctggatgtgcaatgatggcagcaggtccattcactgaatactggggacctaccaggtgccaatgaggagagagtgaccttgggccaggctgtccaggcagagctgaggagctgctgctcggacaactgctgggagaccaaggatggtcctggactgacaaggaatgaggaagaaagagcagcaatgcaaaaaagtggcggtgttttaatcaagtctcattacaacggcagaattaggaatgagtcccacctagcttccacatgcgtgggcagyagctgtcacacgggcctgtcgtggcactcagcccatggcacagacatatgtggctcagggcaagaaccagtggatggggctctgcacaggaacgctggcctcgggatgggagacccggcctgcccaacactgctcagagcccctcccaactctgacaacaggctcgggtcaggactccccgaaatcaggcaccctcctgcyccactgctgagatccccaacgggccagacctagcttggaaactttcttccacctggctggccaggaaggcagcaaacagagatgatgactcggaatgatgggctattcggaaatggctagggaaacaactgtttccctactgtcctggygggacccaccctgggctaacgggcttcccaaggaagtcctagtggctctggggtcctgaagtccccaaatgggaacctaggctgagagaagcaaggctgtgagggcatccaaagggctgcctcaggttttgttcctgagaacgaagcgtggccccggaggctcaggcgtgctcagtggggccagggccaccagcatgggagtgggcaggggctgccacctgtagggggccagcactgggctccggggacgccagcagaggggccgagaggccatcagcagagtctgtgtcgaggtccagcctcccgtaagcttcgcacagaggcaggtcattagcttcgcaaaggcttgagcttttccaccaccagaaaccccagggagagacaggagcaggcagagaggaaagccaggggaggggagagcaagacagaagcagagttaagaaaacacgaccacaccccagaccwgcctttccctttctccactcctgctccatctgtcccctgagttggcaggcctggcaaggagaggcggccagtggtgagagccaccctagcattctgaaaggaggaagccgccctggcccaaccaccaacagctgtgtgacctcagcaggcccttcctgcccagcctccacgtgggcctgtcctagcctatgcctcccagctggtgctggtccccctcctcttgcaaaaagctgtcagcctggccaccctccctcctccctgactgcagaaaccccagtgtcactacactgcaaagagctctctgagggcagactgtgttctttctgggtctgtccctgcctgagacttagcctgaagggggcgacagttgggaacacaggccctggcacttcccgatagccctacatcagccaggcggcctccagcaggcgtccccacctctaacacggggaatcctcacggcagccaggatgcaggtgaagagctcagctagcccttcccatgcccgcagctgtgacaatccacgctcgcctctttctaacctgcaggcaggggccctggctttcccgcggcctgcctcgcccctggcttcctcccttgctcctgccctcagtgttcagtctcagaaccgtcctgggcacagagtggcatcccgaggaamgcaaaggagaggcagagccagaaagagcaactaacaagcagagagggggcaggcgagcacagaggcgcagctcatgcggaacagggcagggcagggcagggagcggagcgccctttgggggaccagcaagaaggggcagaggaaactcggccaggacctggtcgcttaaaggcaatgtacagaggaggscaactgcttctgccacaggggctgtgtgagsccccccagggggcgctggtgtggacaggaggcctgckggaggggacacaggctggcctggaagccccgctgggtgaagctgagggactgttgggggagggcatgggaagcctggcacagatgtcctgggtttgcgccctgctctgctgcagggccgtgagcaggttccctctctccctgccccaaggcaaggcaggcaggctgaattacaggcccacagctgctctgtgcaggggccctcagggacggtggctgcctcaaagagaccgacaaactgaacagctgtggaaggagatgcccagaagggtctgaaacacccyaggacccctctcagccaccctagtgtggaggaaatgctgcctcatgtctgctgagttaatgagtactggggaccaaagattccctcagaaccccctggaaaactctaggactgctgcagctcagcagtgccactgagcccagggcagggaaaccaagccccaggtcatgctggctctggatanctgtggctcccagcatggccaatgggcagaaaggagtattttaaatccaccaccaggaaggaaaggtttgtccaggagaaggcacaagatggacatggactctgcatctgctggactgaatcttgattttctaagctaatggggcagagtggaaggcctccctgtctccagcctaagtttccccctaagtaaatgatacgtagactctgatttctcagggcccctccagctcaaacggtcgaaggtttcagcttcttacggagccccacaagggtcaggatgatgggttttgacccttctgcatccctgggacccagcayggggcctggcacgtaggttggctccagctccgtggataaggctgagtgggtcacgaattggagctccaatggctttcaaggccattccctgcctgggcttcatcccccacattcccatgactgtccctgcctccacactggggtttggtgacatccacatggaattgcatccctggtgccctggacataggtgtggacctgactgcccaaaaaaggctggcccagccttggctgaaatctctacatatggattcagaaggtaacaggagcagcacagccccagaacgcactgcccgaggaggaaggctctcggaagagggcctgcgggggatacagccaggcgcctcccttctccagactcggcctatccgactggcgtgagtcctgtggttttcatcacattgcactgtgggaaaggcccagggccctggcatatggatgtgaattgtctgtcggtcaaacgctctggccaggagctctgctctgaaacccaggcatggctccactgctaagaccagcaagaatttgaaaaagcagaaggcagccctgcctgctggccaggcccaggtaggcaggctcccgctctgcatggggagtccagcgctatttatacctggacgagtaatactcctcctccagctcgtagaggtcaatggagatctcgtctcgcagcgtgatgagcttccggtcgcactcctcctgcagtgtgcgcagctgctggttgcgctggtcaatggcctcgttcacggaggggaagtcattgaggatcaggaactgcttgaggtcggacaccagcttcatcagggactcgccggctcggacctgtggccatcagaaccagggcggrcacagggtgaggggggacagcggccttgcctacargtagctgatgctggrcaagggatgscctctctaggagcctcagcttcctcatctgcaaagtgggactctacccctgacctccacaggttcatgtgtgagaattaagtgagaaaactgggatgtcagttctgcagggcaggccctcccctctcgtcagcctctggcttccactcytgcaggactggcctccagtccaattatgcaggtgtacattctgctcatgaaaaactcaaaccccacagataaaactgcgatcccattttgcctcctgccccggggtaggattaacatggctgccagctgggsagagctcctgtgggacctttttccatgcattttgagccctggacgtgcacctgcggaattatctgcttgctgtgtttctcctgtgatccgaaggaatccaatggcgcctacagttccattcggctgtttgtcttttcactcacaactgaccttaggaactcctgagttagcaggaagggctaccctctttctggccactgcacggctacaggacgggcatgggtggctctctgcccagccctcctccaagtgccccacgtgaggacagtctcctgagaaatgatttgcccccacctcattctttaaagytgccgagtggtgaaaccaaagcatctctacatttgcctccttctgctccttctcgggggaagaagaccagaccagccccagagccccctccactccacccaggaaacctgaggggactgatgctcttggagcccaggccgtgccctccaccctggccactcacgatgttggcggctcgcacatgcatctcgtaattgtcctgttcaccctgagtggcccgtgacacctgcgtctcgtcctcaatctgggggaaaacaagaaaacctagaaatcaacccagccaaggcatccccacccctggcccggcccagcccagcttacggtaactgtcatctacccaggatgtccacactggccacaacctgtctgtggtgccatctacagacctaagcgctgtcagccagacctctgacaaggttcaattccaccctctcttgttctggccatgggagacaacatgcacctttgctcaagacaaatagaggcaacccacgctgcttgctgtrctaggtgcagggatgggggcttatcttggcccggtctttttgggctgtgggagccctgtttggtaggaaccgttgtcacttgcttggcatttggtaaactgttggatgagtgaagggatgatttaagttttttttcgcgaccatttcctgatcacttcccaggtgccaggctgtgtcatgcacttgaccaccattaacccatgccagtttcacagaagcctggcctgccacccctggtgtataggtggccaagcgaggctggatggggcttcccggcaggccttgcaaaggctcagttcggggtgggtgtcaggtaccctcagtggttaagacccagacttcgtgggytcaaatcctggctcagccagttgtgagctgagtgaccttgggcaagtcactaagtctcctgggcctgggtttcctcctgaaatgaagaggacaacagtgcccacctcacagagtcctcatgaagattcagcagaacaggcacagataacctcacaacgtggcttgatacatggcaagcactaagtacatgctagcttccatcctcatcatcatcgcttatggagcctgccaggtctgcagcarccaggagggatccagcccaatctgatgcagctgtagctgcagtggtcagcaggcttgcaggccccagtgctgaccgctccacctgcctggaggccmccccccacttctcccctcagtctgcttttctcctgctcattggctgtgtgccaggccccgaggtaactgttttacacagataaactcaccagtcatcacaaggaccccaccatgcaggagaaactgaggcactaaaaagtgaaatctccatccaaatccatactgttagtaagggctggacgtgccattatttggtttgcttatctactgaccagctccctgtssactgggtgcttcctgcctagaacactattcactcgcgctgctcassccctggcctctcctgtctccaccccttctcagactctgctccccttggtgggccaccccacccccaccttggcggtcttgatgatctcggtgaagttgtccatgatggacttaatgtcgtccttcagccgcttgttgtaggactgcagcagcgtctccttgctctggggcagggctctctgctgggccatggcygagcctcaagcagcgcagcggggagacctgggacctagagtgcagcacagacctctgagtgcaggcagagtctaccccagccaccctctatgccccaaccttagcagaacacgcagatttctggggattccctttctgccaaataaagtcaatcactgaaacacagatgaactcattccatcagcagacaccgcagggggtgccaggactggccccgcctttgccagagcaagctcatcctggaactcctggccagccctccaagccctgtccagggctccagtccagacttcacgtccaggcccacagcgtgtcccagggagccctgcaaactcaacaccagctccccgtccccagcccttggcttaacttcttagcccgccgccaccttcgccacgccctcccatccgaagagtccttccaattcgacccctctgcaccgcctacatccacgctttccttccactcccactcaggctgccccgctccagacctcatccctgcactssgggccccgctccctccagtctctgcgcggcagggaagaggtcctaaaaagtggtcattccaaccgggcgcggtggctcacgcctgtaatcccagcactttgggaggccgaggcagggatcacctgaggtcaggagtttgagactagcctgaccaacatggtgaaaccccaactctactaaaaatacaaaaattagccgggcgtgatggcaggcgcctgtaatcccagctactcgggaggctgaggcaggagaatcgcttgaacccgggaagcacaggtcgcagtgagccgagatcgcgccactgcactccagcctgggcgacagggggagactacgtctccaaaagaaaaaaaaaaggggggtaattccactccctcgcttaacatccctcatggttccccggtgcgccgggacaaggggctcaagttccgcgccgcgcctctcggcctctgccctccagccgcactggacggcctcggcgctggagttgcctggccctggggccgggcctttgcgcgcggtgctcagggagggcccggggccccctaggttcggagtctggcgcacgaccgagcggactcctggacgcactcgcattgtttgtgcccatttttggcggggtgtgggaaataagtcacacgcaggaaaggggatctccgaccccagcgcctacgcacccacccacccccactcccgcccacacacccaccccccctccatccccaccccccaccacaccctcatacccgccccagcgcccgcacaccagacgccgcgtccgccgggtcggcctagggcggggtggtcaagtgcctctgcgacccgcactttcccgcgtctctcccacggcctggccctcccgccgcagtctctcttccccgscgcgccgcggtccgaaaasctagtcagccgccgcagcctctcrgccccgcctcgatttttagctttataggaatgctgttgctttaaatccgaaatcccgtgccggtatcaactctcgcgatctccgaggccgcatacatattacccacaattccctttcctttctctctcctccygccgcccaaratggtgagtgagctgtagttccgtggcactatagccrggttccggctgtatccgctgccatcctcctccaggcgcggcctcggagggcctcctgctcctcctggcgctaggagagccccactcggtgtggcacggagacaccgaggtggattagagccccacttggtgtggcacggagacattgagatggactagagccccgggcggccgagagcggaatgcgttgttcccggtgtcgcagggctgggtgtcgcaggsctggagcaccgcagtgcggggctcggagccctagcgtctctygggcttgctgggggccgctccagaggccttgtgagcgacgagttctgagcccgcccctgttgcttctagagcctgyggggccgcgactcagaggagtcatgagtccggggtgtctcctgggtgggcgacgcgaagagagcgtggtctcggkcttagccttgctctggccactcggggttcccggggctgcatgcttgtgcggctgaatgtgagatgctcctgtcgaggggtggtgctggggggytgcagaaagctgctcgccagcttagttcaggcaggtgctgtcagcgtcccttgttttggaggagccagcctgagccctacccccgacgaagcgagtggaggcggcggyttaactgacgttttctttctgcccagccgaaaggaaagaaggccaagggaaagaaggtggctccggccccagctgtcgtgaagaagcaggaggctaagaaagtggtgaatcccctgtttgagaaaaggcctaagaattttggcattggtaagtaacaaacggcagaatgaaaacggtctatgtttttctcaagggaaggtggtaattgggttgtgttgtatcttgtaggttttagtgggtgtaaagtggtcgcagtccttaatttgtgtctcttagagacgggggcaatgatacatgcttcttgctttcattgggagttgctgagcragcattcagctcaatatggtagtggccttgaattcagcttagccatctggaaacaagtacagtagcagtgtcgcagcraggtactaggactgcaattctgctgtacttcgtggcaccttggcttcttgttagatgaggaaaagcatcgtgctctttgttctcaggtgtttgtgtgcagatgatgtaaaagaatatttgctatctgagagatggtgatgacattttaaaccaccaagatcgctgatgcaccaacacccttcctagtggccccagacatgaacttgacatggaatttgagcctcactcggtgtcaccctttacttctcaggacaggacatccagcccaaaagagacctcacccgctttgtgaaatggccccgctatatcaggttgcagcggcagagagccatcctctataagcggctgaaagtgcctcctgcgattaaccagttcacccaggccctggaccgccaaacaggtgaggttctgtggcgtggaaaggagtttctcaggcaaggattccttatttcatccagaacatgagggggatggtcttaggcttcttgaactgcagttgtcattaaattatagtcatatagcaggaccgcagtccagcatttgttattaagtgttaagtgacaaggattagaaccttgactccaagcctaaactgaagagtgtttttccagctactcagctgcttaagctggcccacaagtacagaccagagacaaagcaagagaagaagcagagactgttggcccgggccgagaagaaggctgctggcaaaggggacgtcccaacraagagaccacctgtccttcgagcaggtgagtaggccccaccttagggtgaacactgggggcgggctgttgcagtgatgtaaaatttcttggcctgaaattactgtgaagagtaaaaccgagctttttaacactgagtcagcagctgagcccagcagcttcttgtgactagagcaggccctgtgagtgctcacaaagtggttgtgtgttctaggagttaacaccgtcaccaccttggtggagaacaagaaagctcagctggtggtgattgcacacgacgtggatcccatcgaggtgcgtttgcctgttgactgctaacccaagggcttctggcagtaccaggaagagagagtagacctaatgccaagtcagtgatgggaccgaagtgggtgagggcagtactgacacagatccaacacatgcgtggctcttgcaatgatgtgaatctctcactgaattcaaccttgaagtgcgaatccatgagctttttaaccctgagcaattgttacaagctaactgaaatttgctgcttttggtcaaaatacagtcttcagctaatgctttcttccagctggttgtcttcttgcctgccctgtgtcgtaaaatgggggtcccttactgcattatcaagggaaaggcaagactgggacgtctagtccacaggaagacctgcaccactgtcgccttcacacaggtgaactcgtaagtacacagcctggccccaaacttccccccagttcatttaatccatgcctcacagttgtttccttttgccttaaaggccaatcttttagtttaagaaatatatttatctgaacttttgccaatgatggttaagaatttcttcacctgaataaaccatgtggtcagcattgcatctgaggcaaaagactgtcttgagctaaaaggtatttttgcattctaaaagggaaactaaggcaaaaaacccacttttgtttcccctcctgccttttagggaagacaaaggcgctttggctaagctggtggaagctatcaggaccaattacaatgacagatacgatgaggtaagaggcagctttacaccaaaatactgtcrttcacaaatctttctcccaaataactggctggcttaacctatgagaagttctatctgacgatcagcttggaacagccaaacagaattaacgcaactaataaccttgaaaatctcagaaaacartaagccaagctaactgcctctttttgtcttttcagatccgccgtcactggggtggcaatgtcctgggtcctaagtctgtggctcgtatcgccaagctcgaaaaggcaaaggctaaagaacttgccactaaactgggttaaatgtacactgttgagttttctgtacataaaaataattgaaataatacaaattttccttcagccagtgtctgttgagtatctcgggttgaatcttacttggggttagcaagtatctttttgagacacagcctcactctgtcgcccaggctggagtgcagtggtgtgatgtcaaagcaaccttmgcctcccaggtttaggatattctggtgcctcagcatcccaactggctggcccatatttgtgtttttggtagagatggggtttcaccatgttagccaggctggtctgagctcctgaccgcacccggcccttcccacccttaaatacattcttaaaccaggcattttgttccctagagatgtaacttgmrtatcaagttttgggaaagttctttggactgaaaccaagccaggattttatgatgaaccrgtcatgagctcatttaaggtagaaggccagaactttataccagtagcacatgatccagcataaaggcagtcttgaaatactgcattatccagggacagggcttcagcagctgatctgtcacacaccaggtgtcccacgtaggaatttcttaaaccacaggtaggatgtagctgcagagagtccatacctaggggttgaaagcaagccagcattagcaggctgctaggctgaaggggagnaagccagagggccgctggggactcaccaggtcacgatgtmctgcagatgctcgttcctcagagtaactctggtttgccctccaatgggtcctccagggactgtgctctctgtggagacagcagactcaagtccaccccctactggcctgccagcctctgcaccacttcctagwggctgtcatttttgcgtggccagttggaagtcctgtatggcctttacgttgggtgaccatccccgcccttgtccgctcagtacttgcctaggttctttgctgagttgctgcctcctcccacccgccatatacacatgtgagaacataagccacagtagtgactgggcaatgagggttaggaggaaggacagtattcacaaaagctacttgttccgagatgggctggtccacaacgtacrgaagttggcatcartgaagatgggctctgcgcctgtgattctggccatagcttccaggtctcrataatgccagtggttcctttctggattgttctcagggacaaaaggctrcctggtttctgtcagcctcaccatcccaatgaggtscacttctccctcaatctataaaggaaggtgtgtgagattgcatggagcctggtggactcccagagccttctctaaagtaggaagagtccatgtcccttacctggcctttctgccgsgtttcaggattcactttcttcctgggaacraaccctctatttaccaggatggtgactctagggtaatgaaagtgctacttcaggtggggagggtttttgactaaagacagtcactcatggtcactcaggcacccataggaacaactagagcaccaaggaaggcttttaaaacagggctggctcagtggagccctggcagtgccacacaggcaaagtcttcctctcttgaggcaccttcgtggttggtaaaaggctccctgccaccatcactacctttttaccagtgtggctttccccttctatctctgcttcttgtggtctacctactacaacgtgcaactggtgagcaacgctgccacgccagagtttagaccccacacctctcccctgaactatggcaagagctgtctccaatccctcctcctaaccaaggcagccgtgaggagcagccctggcaccccagcctgctggagatgagtacttgggccccatcccagccctaaaacaggaacccatgggttaacaagagccccaggtattttcatttttacgtgaatcctccagttccctagttaatcacacaggtgctcctgtacctgtcatttgctttgcctggaatgttcttcccatctcttaactcccaaatagccctctagggagccacccctgcctccactccctcaaggtagggctggggtcctttctcttgaagtcctcttgctggcccctcatagcttgccatcatctaatgtgtgggcaactaracagttctccagaggcagggcccctgtttcacgaatccctcctttcccttcagaggtcaacayacagaaattatccagtcataaatgagctggctgagaagattaagtcaatgtcacaattagggacttaaackatgcaaggaattgaatctcctgggtatcttgggttccccagggtcctaccaaggttggggattgtgaaggaaatagtgatgtaaattagtataccctgactgcctctgccaggacagccagctcccacatgtcctactcaccccaggtcggtgcagtggaagggagtgaccacataggccccactctgagttgaggaggagatgaggccgccctcccgggcctcccggacagggtccaccatggtccggggcatcatatacagctccttggaatggtcaaagcacyycctgaccttcactggcctatactccagatttttcagttccattgggctgcatggagataagaacagtggccgagcaaggtttggctggaaaacgaatcccctgagggtggcagactacacagcccaccagggccagacaagtgaaggagaaaggcaaagggcgtgctcttcaaaggggaactttgatgccatgtgggaatgtggatctgcactgccagagtccaactttacaagagaggctaaaaatctggactcctcaatgaatattttatgtgaaattttaaaaaatatgtgggccaaaaccccatctgcaagccaaatctggcatactgtttgctaccctgaatggaaaatgtggctgaatatacctatctctgtagggcatattctagggagagagcagacaaatcattcagggcactttttcaaacgaccaccctcacggtgagacctacattatctgycctcagccacagggccttgggccctgtggaggataagtttactatacctgaaaaaagggtgacacccaggactcaaaataagactttcctccatatgtcaggaggcggtctcaggtagcttcacaagggcagtcaggtgtcaacagcaagcccaacagatgactgataatgagagctcccacctgaggtcaaggcagtgactaaaagtcccaccaaaaggggcaagctggccagcagaagccagggctctgctgttgaactcaagtaaaacaggccctaggggggcagccatgcactcactcggctggcagagggacaggctcagccagaactctggactccarctctgcaatcaggttcagcttccacttccgacgctrgacctacagtgacagagcataaggccaagcagatggcagcaaggtcaagggcccagagttacgcacaccagatgccggtctttacctgccatgtccccaagccaaaggcagtcacagggatgaggagcaggacccactgaagaaaggagtcatcttccgcttttgtggcagatgcttctgctgcagaactgccacatctgcttggcctccaggccacccctggagagtttcacaacactgacatggagccagaagccctcgaacacagacctggagcagcccgttccaagacagactccagtactgccaatcaaaacctgctgcctagagccaactagcagcacctgtatccagcccagctcctaacccggtgcccagaacaaggcacacacagtacgtctgccaagtgagtaagtgggatctagggctcagtgccggtttgaccaccaaccacgaccctgagtaactcatgcctttttactcaagaatctagatgtattccactgcactaagatgcaccattcatccattcaaaatgcatttaataagcagctacagttggccgggcacggtggctcacgcctgtaatcccagcactttgggaggccaaggcgggcggatcacgagatcaggagttcgagaccagcctgaccaacatgcagaaaccccatctctacaaaaaaatgcaaaaattagctgagcacgatggtgcttctgtaatcccagctactcgggaggctgaggcaggagaatcgcttgaacctgggaggaggtggttgctgtaagccgagattgcgccactgcactccagcctgggcaacaagagcgaaactgtctcaaaaaataaaaaataagcagctacagttactaagtagcttagtcaggcactagtggttrttgtgttatgtagaaaaatatatcaattcagtaatggctcacagagctctcttaacagctttccatttttacaactcatcgtaaatgtaaagagggaagaatgtacacagaaagtgcctttaagctctcagaggatgagttccatccgctgaaaagcaccaggggccttgcggatactatttttttttttttttttataaaaaggcaggcctggggcaggcttgcacagcactctacacacggcaaaacagccctgtgctgcacactgagaggaacacgtaagccgcggtggttagatrcgctttactttcagagccctgggctttcagcctgggctggccacccattagctggatgggacgttcggaagtaactctcgagccttctctgtaacaggggaacgaccaaggagctacctctcgcgttgtgaggacaaagcgctcgctacatgcccggcacacgaccacaattccactgaaagcattttaatacggaacttgtcactcccagggagcctccgctcagccggcagttggttcatttcaatccccacgacaacccttcaaagtgcagggcagacagcaggtggctctgcccaggcgcctggatcacagcccggcctgcagccctcacctgggcgcggggagaccctgaggacgctcctccaggcggcgctggccggggcctgcggacacggacgggcgggctgagctccgggacccctccccgcgccccgcaccccgcaccccgcaccccgcaccccgcacccggcgctcacccgtcccagccccgccgcccgcagccccagctgcaacgcagccaccgccgccatcgcacccggccccgcgggcgcttccgggacgcaggargcatctgcatccggggcgccgctgagtcccgcccagagccccgcccccggctccaggttctgcgagcggcttccgccgggctgctccgcgggcgcgtcggccatgagcgagttgccgggcgacgtgcgggcgtttctgcgggagcacccgagcctgcggctccagacggacgcccgcaaggttcgcagcgcgggaggggaacggagtggcggagaagggcgcagttgggatgaggggctgaggggagggcaggggagaggagaggrcaggggagaggggagaggggagagcaggagagaggggagggcaggggagagggcgcggcgggatcaggggaggagagggaagggggcgcggcaggagggggcaccagggagcggagccctggccctcctgacgtcctgcccgcccacgcgtccgcaggtgaggtgcatcctgacaggtcacgagctgccctgccgcctgccggagctccaggtctacacccgcggcaaaaagtaccagcggctggtccgcgcctccccggccttcgactatgcagagttcgagccgcacatcgtgcccagcaccaagaacccgtaggtggtccgcggcggcgcggggaggcccagggcaattaggacagcccctccgctggactccgccagtgctgcagcccctactctttcagagttgggagccctgggacccaggtgggcgcccgggtgctggaatcacctgcggtcccagcggcgaggcctcttggtgagctcgtttgctcacctgaggtttgtcctgtggggtgtggctgcttcccagatgagtagaggcttgtgatttgtcacctgaggttgtgaacagcgttgggttcttcccttaaccccagaaggggtctttgatttagctgggagctaggctttgtaataatcgtcaaaacagagataggatgtttccattcattgagcccttgctccaggtggagccatcctcttgcatgaactcatcctggagcagtcagtgaggctgccatgcgtgcttttccggtaaacattaagaggctgcagtcggcctgggtcagacggttccccacccagcttcagagtggaattgctccgggagcctttaaaagcccgatgtccaagccgcatggtagactgtccagggatgagtccaagacacagccaccagtctgaatccttgctgtgaactgtccctacaaatttggtctctctgctctgtaggcaccagttgttctgcaaactcaccctgcggcacatcaacaagtgcccagaacacgtgctgaggcacacccagggccggcggtaccagcgagctctgtgtaaatgtaagtcccagtggacccccatcagtgcatcgccatctgagtgcatgcccgccttgccccagatggagcgtgcttgaaggcaggtcgtccttcagcgatccgtgttgatgcatcaggcctgttttttggcacagtgaagagagggatgatggcccctgaccccacagcttttagtgcaggcaggcacagagccagaagcaggctcgggagtgagtgagtgtgcgtggcaatgcgaggtgtgaaagaaactgggcgagggatgtggggtgggcttgcggagacaggagggctggggagactcgctgagggattcgctcgaggctgaggctggagggatgtggtggcagtggggtcgggggaacagcaccccagggagaagccagggtccatggaagtctgaggcaaaaatgtgttggctgaggtaggctccaaaggactggctgggctagtgtgcacagcccggatgacccagagaccaggccaggagcactgcagtgggtgtgtggagagggttgggtgggggctgcatggacagtgtgcatggttgagaagggaggactccttgactgcggtcatccaggaaaagacggtgggttttggggggagaattcagagtccctttgaaggttttaagcttgagctgtattaggaaaggtgtgtattagggaagtatcgggcttttgaaacagggacacccgtgctggatgaaggagatggttgcaccrtggatctgggtgagcacccggcgagagtttagagaagggagagaggcctggtcctgagccycaggaagaggctggaagtcctcccgtggtactgaagggaagatgaggacagaaaaatgatagatttgataacacagaggcccctggcaaccttggtgaggcacctgaagcttggcagggacacctggctagagtggagcgtaggctgcagcccatgagggcastgtccggccttaggcaggtgctgggtcaccagaaagcctttctggagtccagctaaggagggaaatggacagaggctggagcggacagattcaggttggtttgcggatgggaagatgcgtctacgggcttctgatgagtgcggagaggcagtccagccctcccgaagcatgagtgtggattgagaaggcaggaccagggtttctcaagtagaaggcgggcaccttgcagaggccttgcaggcacaagggctgccagcctgaggcttggactttttccagccagtgtgttagctgctcaggggtgggcaggaaggctctaagtgcagggggccacggggttcccatgaagaatggttatgatggtggactgtggagctgagatgggactggggcgccgaggtcactgcaaggcagtggtccagggaagtccaaacgtggctgtaagggggctctgccttcacgttctggtggtgacaaggctgctgcatggccatgggggtgggtggcagagacaaggagggaaacagccctggagatgggccgccacatcaatggccagggcccagcagggctcatgcagcccatgagggatgatgatggtagctgcgctgggctggagggcaagccccagcagaccctccaatatacaaggggacaacggtggtgactccagtgaggtctttccatggaagccttgtcccaactcccttctcacccactaaggggcagcaaaggccaggcagccaacctccactgagccccgccctccgggacggggtctcccatgtgctgagggaggacttcaggctgctggggagagggtggcatcactgccagcccgagttgcctttgagaggccatgccaagctcactggggcacagttggccttsggcctggtcagtgccctcctagccgtggcttcctaggcctggctagatcggggatgagtggtaaaggccccgtagacctctaccatcttcttgcctcctggctgcagccctggcccaccaccctccctgcacacctggtaggaacagagctgaggcacccagcagctgctctggtttttgtccagggcggtggggctgtggggccctggccgagtgcagtcctcataagttagctgtggcccagaggaccgtggggggtgtgrargtacccagcacgtgctggcttatctcccagatgaagaatgtcagaagcaaggggtggagtacgtgcctgcctgcctggtgcaccggaggaggaggagggaggaccagatggacggtgacgggcctcgcccgcrggaagccttctgggagcccacatccagtgatgaggggggagctgcaagtgatgacagcatgacagacctgtacccacgtaagcagaacrgsccctgcttctccctgaccctctactgtcagcagggagcagactgtggtgctgcctcccctgcaaaggtggcagcgaactcagcctaaaataactgtcagccaatccctgtgttcctcccagctgagctattcaccagaaaggaccttggaagcacggaggatggggatggcactgatgactttttgacagacaaagaggatgagaaggcaaagcccccaagagagaaggccmctgatgagrgcaggagagagaygaccgtgtaccragggctggtccagaagcgcgggaaggtgagctgtcacctcctctgttagtgtggcagtggcttcccctagtgatggttttccatttgtttaaaaaaagaaaactgaacctttttcacaagtgaaatcccaagccaacaacacacaagaaccatagaagccgaggccgctggctggcggaaggccgtgagtgcctaccattgcttcccagccagccccttgtggaagccaggctctgtggaccacggtcaagaccactggtttgtgaggacaccctcctacctcagactatgagctgtggygtgtttgtccttacccctgggcacagggacctgattactagccaccacctttgcctttgccatcagggcaggagtggagacttccccgcctttggtagataagcaggascaaggccaaaagaggacaaggtcctaatgagtgtgtggcattgcactgtactcctctgaggccctgctgagcggggtctaatcctgcagctgttaaggaaacgggggtggagaaagcctctgtgggtatttgaccgacacctctgaggctgtgtgggtggggagagccctgcactccagggccccttctccatgggatcagaaaggctcagtaatcagaattttgtttatcccacagaagcagttgggctcgttgaaaaagaagttcaagagtcatcaccgcaaacccaagagcttcagctcctgtaaacarccaggttaataaaagcacatgccgtgaagtttcgagaaagccttcagatatttcccccgctcctgatcaaaccgtgtgtcctctgaatgatcggctgtccccagtgtcttctctacccacttatccttgtctcatgacatctgctgccctctaaggcagggctgagggagtctgtcccccacacccaggaagcagcagggactctgagggactaattctcyctggacatggcttctgagtggtcttcagagaagcctagagaagtaacctcrctcactggcatcctgaggggagccccrttcaggctgggcaacgctataggatcacactgcatacaacaaacgccattatttattttgatgtgtttccaaaaatcaaaacgttttcaaacacaactaagatataaaatacagcataaaatgagatttagatctgtttcccacataaagcaaaaaaatcttagaaattgttttgccagaatcaattggtagatcccacttatcctcccctccctgcaaaggcatyttcccgaatcaggccctagcccacccagggccaggagaaacaggaacacccactaggacggaggcgctgctggtgcaraactggtgctgactgctcacgtggcctcctttggtccaccctactttccaccaatcagccaaccaaccttgaccacagagaaaccgtgacttggccaaggtcatttgatgggggctgtcatayggcactaacagggagcgaggtgtggaccaagagacagccctggtgaggttgaaacactgagayaagccagtcttcatgcagtgagcacttgaatgatcacaggagaagagaacccatgtcctgaagccattgmtcgatcttaccaatattcgggggtaaggaagtaggctaccaggggaatatttgcaaacgcgttgggactagttcggctgtgttaaaaaggtaggtgacttccaaaagcacttatgagcagaaacctgcctcacccctgccctgcagagccaatggatgagaggccaagagggaggcaggctcggggctgggccgcagcagccctggagacaggctgagccagcctgtccccagataggtctaggggccagagaggtgttcgactacccttgtggcatttactatggtgcagacgacagggagcaacaagcagttaagctcccccaaaaagagaaacacagtataaggcagtgttagaaaactttaaatacaggattaagatcaaatcggtaaggcatcacaaattgtaaaaaggaattttggctgcattcggcatagcaaacggacaatctgagtgagcgacagcctcaggaaagtggtgtgtcggggctgtccacagggcgagtgcagctgggaaagggcggtgctgctcagccagggcggcctgcgctttcgagaccttgctcagaaaaggccccatgtgaggtaactgggttgagtccgtgggtctccagtgctgggagctcctgccacaccccctgcccacagcggctgcggctctgcaagctggtctgagcagctggccaggctggcttgcagggtgctgctgctggggctacccctgtgtggtctcactagcccttcccactgccagcttggaggccagcagcacccagaccagcagcttccccaaggacttcttgcccctccaccttgcctcaagctactaaaactcccagggtgttacccaataaaacacttggcaccaatccaagctgattttctgaccgatgacttttatcataaacagcagcttctaccacccctttaatactgcatcattctttgggtgtccctaaatgttttcactattcctataaaatacaatgcggggcagaaacaacatcaaagccactggtgtgattttaaaccagggagattaactgttttgaggtttggctgaaccacccaaaataatttagtagyttccgctaaaaatgtaaacttacaaataagagggagactgctttgaatgataataccaatgcgtctgctcacagtacagcttgaaggccccctcctgtacccccacaaaaaaactcaaaaataggactgagatgccacagccaagcgggctgttcactccaaagcctcggcgtgggggaggcttccagctgccaggctggcctgcactgaagggtcagacgccagactgtggctccagagcagactgagccatcgattctcaggtgtctctgcaaataaagttctcaaaacatctgtgcctttaccaagggaggggaagggaagaggatacataaaagctggcagttttgttgaatccaccccgaaccagtccttgacggccacgggtcttagccaggcaggtagggatctgtgactgttaccactccttcttcttctcatccatggagacacccccagggcccagggccaccaccaggagcaagcccccaatcaccgacatggtctggaagaagtcgtatttcaggaagtcatgcatgggcttgtagactggaatggtccagaaggcgttgaaatatacgttgatggcaaagagccacacaacaagagtcaaagcagccagcttggttttaaaaccaatggccactaaaatcatcagagctgtgcccacgatgttctggacaatctgcataggttsaaacgtaagaaattcaaaataaatgtgaggaaaagagatgctttataaacaaaagttccagctgctgcacgtcatgaagtctctatccatcaggctgatgtagctactgctgagacggctgctggtgcaagtagggagataaaagccaaagggaggcaggaggcaataaagcaccagctttgaaatgtggaaggtttggggaagactgaagttcccaactagtaacaggctgtgatttaccaagatgaatctctaatccataactaaattcccaagtgcttcttggcccacccagccatccaggccagaaacatcctctctcctctctccatggcgccaggagctcttcctggacactacccggccagggctctcagtcagctccggaggtgtgctctggaagctcctggaggcctgcccctgacacctgacacacaggaattacttgagaaagatacgaacagtgaggaaagaaagaagagtaaggggagcccgggtggagagccttggccaaccaagggccaagcacactccaccaaggtcagaggttctggccttcatttgctggaaagaaggcttgacacacaagagattgacgatgttttggtctgttttaatgggatcaaaaagtttgctccgccgagcacggtggctcacgcctgtaatcccagcaatttgggaggctgagacaggcagatcacgaggggtcaggagatcgagaccatcctggctaacacggtgaaaccctgtctctactaaaaatacaaaaaattagccaggcgtgttggcaggcgcctgtagtcccagctgctcgggaggctgaggcaggagaatggcgtgaacccgggaggcggaacttgcggtgagccgagatcacgcactgcactccagcctgggggacagagcgagactccgtctcaaaaaaaaaaaaaaaaaagtttgctccatttcagcagctcccccaggctgtggttaatacccaaccagggaggggtgagcagggagggggtgggggagggacagcattcacaggaaaccagaccggttcaggcaagtaggaatacttacagaaaagaagctggcgtcaaagtgaaggagggtcatgaacatcagaaccagcaagaccctgcctccgagctgcatgtactgtttgggggagctctcacgcatggtggggacgcccgcaaacatgctcttcccttcagaacgggattctgctaggagcagcaacaggcctcctcccagggccaggttcctgaggaacagatatgtgggctggaagctaagcctcaccaggatctggcctgtctgtgagaccaggtgcagggagaccttgctgccagtataagaaggcccttacttccctttctccaaacccagtgatctgccaagcaggaccaggcaggcatgcgcacaggacctcagactcgagttacacccatgtaaaaccttacatagctcaggagacagaggtatctttacaactcgacagtgacaggctacctgaacacacacacaaccgagtcctagtcacagcttcagtgttgaccagctgggtccccgtggtcaggtctgtcctccactcagacccggagtccccacacccgtgaaataagggtcagaagagacggcttcagtctctactattctaggggctctgcaacatcctcttcagaacctgtttctaagaggcacaatttagacaggggggtccaatcttttggcttccctgggctaccctggaagaactgtcttggccacacataaaatacactaatgctaatgataggtgatgagctaaaaaataaaacttaaaaatcacaaaaaaaactctcaatgttttaagaaagtttttgagtttgtgttgggccatgttcaccccgtggaccacaggctggacaagcttggtttagacccagagaagtctactcaaaccaatagttaactgagtttagaaatacagattgagtatccctaacctgaaatgcttaggacccaaagtgtttcagattttggtatatttgcattatatacttattggctgagcatcccaaatctgaaaatccaaaacctgaaatgctccaatgagcacttcctttgagcgtcatgttggtgcccaagatttttcccattttggagcatttcagactttggatttgcaatgctcaacctgtagaaggagcgtatactaaaaccaaccagaatgcacatacctcatcaaaaacttcaagtcccataaaatgctgtaggcaatcgtctgaggggaaagaagagagagatacttgagtctcagcctttccaaaggcatttccacagacttcataatacattaggccgtctctccaatgtcagctggagtctaaaacacacaaaaccattgtaggagaccgaggacagatctaagctcaaaaatgtggttctgtatttctcaagaaatgtgctatgatgttccagagaacaaagtgattctgagaccactgatgtggattcagatattctgttcccagcatttcattctgaataaccaagtattcttctttatgaagcaacgtgataacaagacagcatcctggctgcagccaagctcgagacttcccttgtcacggtaatcatagaaatgggacaaaagatggcccagtaccgaatgacctgcctctacagccctgcttgggctcacgacttccccagaagagaaaggagctccaggcagtcagagacatgcagggggctgaagggggagtgacactgaaccctcaaggatgtcttttcagaagctctgctccaccagagcaaagagaagggagccccgaccacgcggcccgtgtacctgcagagctatgattccaaagagcccgaagcaggcgtactgcacgaagttcctgctcaacaccaggacgcagccagctggagagaaggacaagggttagggggcctgagggtgggtgccggcggggagcactgtcttgatacactgctacctcacctggcccttaggtccagaggcagccaaaccacctacccaagcaaaagacaacttctggaagaattaatgataggcaaggaccacacatggtaagctgactagacttatcacaaacaccagaaagtggagcccttgccgtcataaagaatgggctgtttcccacaatcagctcccaagtcagccacccacctgaggtaggcaattaactgctctactgtggactgccagccagactccagcatctcctgctttgggtccctgacagggaccatgtcctatttccttagcaagctctaaagcagtgagctcagggctagagactaagcgtccccaccaaggcttgcagaaccggactcctggcctggcacagctgagctggagaagaggggaatggaggggggacagcagtccaggagacccccgagttcacacacagcctcccaactgctaacgatcatggaacaagacgcccagtgaatcctgaccacccgcaragccactcactcagctgtcccagcaagttgaggaagacgaaggacgaggccagcaggtagccgcagttccaggtggtgtcgatgtagtcgcgctgctcgctccactggaaccacatacggatgccgtcctccaggaaggtgctgatcagacagaggcgcgccacgtggggcaggtactgctttgtgacacggaggaactgcagggccacagaaacccaagggtgaggtggctgcggcggggagcaccaggccgctgccaggcacgtccttgggcggggtgtgtgaggaacagacgctgtggaaggcaagagctcttgtcagccccggtgccttcccagggcagactagggggctctcagtgcttgctcctgagcgctaccctgtgagtctggacacatgcaacaatccaaggatcagtcccggagatgcatgacttgacrttaggccctctggggcagatcctatagggcagcagccctaacactctgctaccgtgatttcccccagtgcctcggcaggcaactacagtcttccaaggtggcactgccacaagacacagagctgctcttttcggtcaaaggcatttacaagttggaatcacagaatgacatctgaaaaggcacttagaggtcatctatccaacgtttctgcacctcagcactactggcatctgaggccaggccactctttgccgtgggtcatcctgggtgctgcaggctatgacgcacgacatgtctgcccacgacatgccagcagcagcctccctcctgaggcaccgctgcactttgccaggcatctccgctgctctggtccaacccctcaccttacaaatggctatattaaacccagcgggaaggggttcccctaggcttcgcagacctgatggtgcaatgccaagacttgaccccagcctgcaggtcacacatggctgaggtgccaagggcctggacctcccagcctgcccagtgacgcccagagtaccctgacagaacaagggttggcttaggtgacagccagggtgccacacctagagggccacatggttgactgaatagtaagatcacgtttacagttatccgaaaatctccagagcagcaggaggaggccccaggctctggacagcgcatgtgtgctgttgcaaaccagggctggcgcttcccagcccgacggagctctcccctgcaagctcaggatctgacgtggggactgtgtgtgcagcaaccgtcagcgcagcatgaagctggtaccgctaatggctagaaagcgctgggattttgtcaaagcctgcataatctcgagcaaattaaaacaca

SEQ ID NO: 95395 - DNA, 24064 bp, Homo sapiens
ctattgtgtgctttgggtcaccccatcaagacaagattcccactgccctggtggctctgcccaaaggggaaagcccctgccctgcctcctggaccctgctctgggcacaggtgtttcacaagtaacatcatggaccccgacaggaaactgaacacgagtggagcccagtggtctcttgggaagcaggggcccaggccagccctcactgtcctctcccaagggagcccttagagggtcagggaccctgggcaatgatctcccagcctttcaggagcggcagcgctggaaggacccaggctatgggatacccagacagcgtcggctgcatccagcccccagcgtggccccaggcactggtcagtgtgcctctggcctagaccacaaagaaccaggtcacaaagtgggccttgccctcctgttgcccctgaccactagcccacctgcctctggcccccatcagccattagtcaagttgccaatggccctactgggaagggggctcgcaccggagaaggtcacagacatgggcctgtgggcaatggggacaggcctttatcataaggaaatccatggccttaggaggtagcctgagccagtacctatcttgtttcccacagaaggaataaatatttacatccacggtcagaaaccacaagagctcctgaaaatcagccagctcagcagaggccatggggcaggaggggccagccaatcggtgaccgttcccttgtgatatttaacagaagctagggtgagaaccctggcctggctggaacacccagaccagcttatatcaacttggcaggaagtaacagagttaattaacagggttgacagcagcttctctgaccttctccttccagatccaccaaaaatcccagaccactgactcagtggtgagataccccttgaaagtcctgagaaactccccccgggagagaagacaccaggacaagtaccttttaagggagcaccagggctcaagtaagaagacacggcctgtggctccaaagcctgaagacaactctgcaagacaaaaagagatggatggggccgggcatagtggctctggcctgtaatcctaacacttggggagaccgaggtgggaggatcacttgagtccaggagtttgagaccagctggggcaacataacaagaccccatgtcttaaaaaaaaaaaaaaaaaaaaaaagagagagagagaaagaaaaaagaacaaaaagagatggatgaagagggagacaggaggcaggaggtgggtgaggccaaccaagaaggagagggggaaatcagagacagggagaggaagggagaggcagagaagagcaacctacacagtttgggacaaactagtatctgtctgttcagcttcaccgaatgagcaggtcgtactgagacaccaactccctcttcagtgagcacacttcatcccccaaagccccaagtacagactcccctgcccagcgcaaaccccaaagctgatgtagtcagctatttggcactcccctcgccccaggtagctcagaataccccacccagaggctcccagaatacccccgctcctgcaaatgagcccacctgctggaaatgggagggtccccagcagcccaggagaaagccacaggcaaggattccggccacacagaggggagggcatcttgcccrggggtgacgctggtgcatcctcaggagagccagcccgaggagtggagcggagtgagagggggccttggtgactgggaatctggtcagtatggaatgggacaggcctgctcactactgggcgggacgattaggcagtgtttactcttggaagcttcctgccagggcaggggccgtggctagggtgggcggcctgcagctcctcctgctgcaagctgggccttgctctaagatggttgcagttcagggtaacctgcagcccagtcctgcacaccagacagctctccggatgtgcacgcccacccccttagaggaggcctaagccatctaatctggagaagggacactggaccagaaacccacagacgggggttcacaaggaatgccaggacctcggctgactccctctccggggtccccgctcccatctgacagatgagaggctgtgccaaagacatcgtggttctggctcaactctccacctactctgtgcctgcgcctgatgaggagagtcgcagaagcaggctgcacggcaccagatctcagcatcatcacaaacggcctggcaatccccttcatctcctggaagactcacttcacatgctccaaaccactcttttacacccacagagccgcacaagctgatgaccagcagggggattcaccttgtctttccacccctcaaagtgcagcctctctcctcctctgcgatcagggaggacacacctacacttcctgccaggccctggctctggatcccttcccagctctctcctcctgcatcgttagtttctgcccctctgctagagccattcattcattccttcagccaacaaatgtttcactgagcccctgaaacaggccaggctctgtgctagacaccaggaaagcagccccaagccaggcagacagcagcctcggcctctcacagcttaaattctagggaagagagccagacagcaaagttgctagacagacacatgttgtatatgtagtatgttcaaaggtggtaagtgttatggagaaaaatacagcagaataaaggaatgggggactggagggaagggtgtgctttcatgcaggaaggtaaggaggctgttggagaagggggcatgcttagatatcgagatcctggtacctggctcactccatcagcatgaatgactctcctgtctctttttggtttttgtttgttttttgagacagagtcttgctgtgtcacccaggctggagtgcagtggcacgatctcggctcactgcaacctccgccacccaggttcaagtgattctcctgcctcagcctcccttgtggctgggattacaggcacccgccatcacgcctggctagtttttgtatttttagtagaggtggggtttcgccatgttggccaagctggtctcaaactcctgacctcaggtgagctgactgcctcggcctcccaaagtgctgggattacaggcatgagccaccaagcccagacactctggtgtctcttgattacaatcaacaaccttcccttgacccacactgtcctcctgccatagccctgtttctggctgtctttaagaacttagaaacattattttcagtggctatctccacttccttgccttcaattcccacataccattgaaattgatctttaaaaggtcaccaataactttgtgaaccctgaaagagccaatccttcttgatggatcccaagttactaactgggcctaaattcaaagtaggacctagcagccatttgctgactagggtcacacacacattctgcgttcctggaaagcccccactctcacttaactctgggatggtttcacagctatctgttcctgtttatgccgccagaatcaacccatcgactgtgacctgcatcgaccaatctgaactcagcaagtattaaccaatcagaactaagcaagtgtgccttcctcatttgcataagtggaccaaagtgggaacctgggcaggaagttctctacaaaagacgacctctttctttgttctctttgttccctggaatgcacctttgtacagaaggctgcattgccctggtttacaaactgctggaacaaagtttttttccttttttaaaaagaaaacctgggccaggtgtggtggctcacgcctttaatcccagcactttgggaggccgaggcaggtggatcacgaggcacgcggatcatgaggtcaggagttcgagatcagcctggccagcatagtgaaaccccgtctcttttcaaaaatacaaaaattaggctaggtgcggtggctcacgcctgtaatcccaacactttgggaggctgaggcgagaggatcacctgatgtctggagatccataccagcctggccaacatggagaaaccccatctctactaaaagtacaaaattagccgggcgtggtggcacatgcctgtaatcccagctactcgggaggctgaggcagaagaatcacttgaacccgggaggtggaggttgcggtgagccgagattgcgccattgcactccagcctgggcgacaagagcataacttcgtctcaaaaaaaaaaaaaaaattagctgggcatggtggcgtgcacctgtagttccagctacccaggaggctgaggcaggagaatcgcttgaacccgggaggtggagattgtggtgagccgatatcacgccactgcactccagcctgggcagcagagcaagactccgtctcaaaacaaacaaaaaaaaagaaaacccttttcggtggacttgctgacaatctcagtgccatatctggttcccatctctctgtcctcgtccttctcagcctctcagcagcatctgatgtggtttattctccccctggattctctgatgccactcacatccgcttctcctcccactgcactgactgctccccctcagcctcctctgctgcttcgcccctggagagcccccagcacctgctatctggtcttaacccttcactccctatattggtactctctctttggatgaactaacccaggttcatgtttcaacactaattatgtgctgacgatttccaaattacatctccagcactgacccttccctaagcttaggaatcttatatcctgctgctgattagacgtctctccttggtgactgacggcccgttcaaactcagcaagtgtgaaaaggagctcatggctccacccccatacttcaccctgctccccgcagacatttattgagatgataaatggccacacccaattgctcagaccaaaatcctaggagcctcacttccctgttactccatcaacctctgcctgttacacacgcacatcaaatctacccactcccggccgggcacggtggctcacacctgtaatcccagcgctttgggaggccgaggcggatggatcactggaggtcaggagttcaagacagcctggccaacgtggcgaaaccccaggtctactaaaaatacaaaaattggcagagagtggtggcgtgcacctataatcccagctactcaggaggctgaggcaggagaatcgcttgaacccaggaggcagaagtaagggaggagaccacccctcatattgtcttatgcccaatttctgcttccaaataaagaagtaaaaactaaaaggcagaaataaaatccacaggcagacagcccggcgccgcgccctgggcctggttaaagatcaatccttgacctaaccggttatgttatctatagatttcagacattgtatggaaaagcattgtgaaaatccctgtcctgttctgttgcgttctgattaccggtgcatgcagcccccagtcacgtaccccctgcttgctcaatcgatcacgaccctctcacacagacccccttagggttgtaagcccttaaaagggacaggaattgctcactcagagagctcggtttttggagacgtgagtctgccgatgctccccactaaataaagccctttccttctacaattcggtgtctgaggggttcttgtctgcggctcgtcctgctacagagtgaactggcaggaactcctcccggtgcctgggcctcagtttccccactgtacgtggaagatgagccgctgtgaggctgagcaaggagcagcccaaggcgggaaaggctcgagagtccaggacgcaggcgagcgacctagcccggctctcactagccccaccgcccagtgcccccagctcagctgccctaccgggtgctacacacacagcggccccccagttcccttccggcgttcgcatctctcatccccatcccggatcttggggaggtcctcggcttgccccagtcaaactcgaggtcgatgaccccggatgccgctggctaaggcggcggcccaagtcccgtgcgggtgaaccgcccaggctgcgcggaaccagaggcagggatccggtttccagccggttgtggagagacgagcgcttccggggactggagcgtgcgtgctgaggtatgcgcaacgcgtgcggggtctcttccggagtcttttmctggacggggtccctgcggtgggtgtgtttcggcctggcctgggcaggcgcttgtgctgccagggcgccgggcccggggaggccggggtctcgggtggccgccggcccakgcgctggacggcagcaggatggggaaggcgaaggtccccgcctccaagcgcgccccgagcagccccgtggctaagccgggtcctgtcaagacgctcactcggaagaaaaacaagaagaaaaaaaggttttggaaaagcaaggcgcgggaagtaagcaagaagccagcaagcggccccggtgctgtggtgcgacctccaaaggcaccagaagacttttctcaaaactggaaggcgctgcaagaggtgaggcttgagggggcccgggcggagcgctgcgcagctcattcccgcagaacgcgacggagggaaagacttgggtagccccaaaagacctgtaaaggcagatttgaatcgaaatcttgtaaacagcttttcacaagaaaggtggcctgttgagggaggtctcgaacttgtttgcttgaaagaaattgatgaaagaattatttcaagtacaaaaaagcaaagataaacccttgtaccttttgcataatgaactaactagaatggattttacaaagagaaatttagcttaaaatcccgaaaccaggccgggcgcggggcctcacgcctgtgatcccagcactttgggaggccgaggcgggcagatcccctgaggtcaagagttcaagaccagcccggccaacatggtgaaaccccgtgtctactaaaaaagtacaaaaaatattagccgggcgtgatggcgcgcgccggtagtcgcagctactcggggagcctgaggcagaagaatcgcttgaacccgggaggcagaggcagtagtaagccgaaatcgcgccactgcactccagcctgggcgacagagcgagactccatctcaaacaacaacaacgaaagaacacactggtctgtgtagcaagacagggagaaagaagattcctgtgtagaagtgaaaagcagatagcagacatgtgatggggttctagcgacacttacggtcttgaagtaaatactaattgagctcctaaaaatgtgcactctgccatgtgctctatgccatgygtgttgcaatccccacaataagactgtgaggtggacacttycatcatckctattgtacagatgaggaaataggctggaaragtttaaatagatcatctaagattgcggctgggaaccaggtggctgactctggagtccatgcttttaaggctgtgttgtacctgctgtctccctagtgacctgcacttctgtagaggttgcctgctctctccyagacactcttccacgtgcgtcactcatacattcttaccacatcccttggagctcccttggagctacctcctgttaggatcatagctcactgctgcctgggctccagtgattctcctgcctcagcctcccgagtagcccacacgtgtaatcccagcactttgggaggcccaggcaggaggatcacttgagctcaggagttcaagtccagcctgggcaacatggtgagattccatctctaaataaaagtaaaaagtagtttttttaaaaaagaaatgtgatccccagtggtggagatggggcccataggaggtattgggtcatgggggtagatccctcatgaatgacttggtgccctcccctcagtaacgagtaagttctcactctgctggttcatttgagagctggttgtttaaaaagagcctagcaccttttttgcttgctctctcaccacgcaacacacctgctcccccttcaccttacaccatgatgggaagcttccttcggcctcaccagaagcagatgctggcaccatgcttcttgtacaacctgcaaaaccatgagctacataaaygttttttctttataaattaccaaacacaggtattcctttatagcagtgcacaatgaactaatacagatggggtttcactttgttgcccaggctggtcttcaactcctgacctcaagcaatcctcccacctcagcctccccgagygcttcttgaacctcctaatactctgcacagtatctcagtgcagacattcctgtcttaacacacaggaccagtcaaattcccgtgggcagccccagggttctgtgggatttcttgaacaccaactcttcttccttctcccaagaaagaaaagcaaaataagtgaatggaagggatgtgtgctatagggaaactttggagtgttttctaattcatccaagaaagtcagcccttcagttctttacctatcacagaacaggtaagtagcacccgcctcatcatcgcactgtggtggcgcccactcccactggggatttgaacacagggaggaagctgggctctaagactacaggagcctctgcttgggtgacagccaaggtgtgtggctgctagcagttcttcagccactccagtttgacagaagcttttcttttcatttatgacaccccccaccttcctgagatcttcacagcagtagcaaaccagggaatcttgtaaaaaaaaaaaaagcgatttctgtgtagcaggatgttggcccaagctgtgagggaagttaactccaaaattctttctagataagctgaaaagggaagtggtctgtggtgtccagccactcaacaggtacccaaggtgtagaatgagtttgacattttgtatgcatgaaggagcaggtgcaaaatgcattataataagataagcaaagaaacagcatttcaccacaagtgacccatgagaatgaaaaagagctttttccaaaccgtttgaaaatgaatttcagtgatgcggatgggaattgtatagatgtgtttggtgtatatgtgtgtatatacatacacacgtaagttttttcaatctgctgtgtgtaatttccaaattcaaatgcagcatgtattttattttgggtcccagtggctgctgaaacaaaaatctcaggccccagaaaagcctcttgtcatctctcagatgggttccaaaaagaagcccaaaattatccagcaaaacaaaaaagagacctcgcctcaagtgaagggagaggagatgccggcaggaaaagaccaggaggccagcaggggctctgttccttcaggttccaagatggacaggarggcgccagtacctcgcaccaaggccagtggaacagagcacaataagaaaggaaccaaggaaaggacaaatggtgatattgttccagaacgaggggacatcgagcataagaagcggaaagctaaggaggcagccccagccccacccaccgagtaagtatgggccacctcaccactgagaaccgaggcacagcgacttcaccaaggcctgtctccttatggaggctggtggcctcaccgcagtctctccatcactttaccctgatgtcgtctgttcctttgtttactcgctgttacttgttttcccctagagtgtgcgcatgataaggcagggcctgcttcttccgagcgttgagcagagctcagcatttagtgggtgccagtacacgtgtgtggaaggaaagcgtgctgaagccagaaagacccaagtatgaggcctgtccctgcttctcgccagttgggtggtttggggcaagtttctgacgtcctctgtgccttgtggtagkcatggtggcatcataaggagattgtgaggttggcactcttggctcagtgcctggtgattacttcaaccctgtgatggagccaggtgtggtggytgttgcctgtgatcccagctccttgggaggccaaggtgggaggatcacttgatcccaggaggttgaggctgcagtgagctgtgattgcactactgcctccagccygggtgacggagcaagactctcaaaaaaacaagtgaaaasaataaaccctgtgctggccacccacgtggggtggaccgggagtcagtggccttctctgaatggttcagctggaggtgaygtgttcataagttacagctggcttcatgttgcctgggtgttcaggacacagtcgctgatggctgaggaatgagccatttgggggcctccctgtgttgtgctaggcaggctgtctgggatagagttcagtgaggtgggcctgctcctccctcttgaggcttattgtcaagtgcagtagacagactgtaaactgcagctgttgattaagtgtggtcaggataaatctagtgaggagaaggtattgggygcctggaacaagagggacgtgtccattcagtggggccrggaatggcttttctaaggamatgacatttaaccttagcccaagagacagattccccaggcaggtgttaygtgcctgtgtgagcttcctagtacggagggcaaggggttctgtgtttccatcwtacaggcattctgtctgtctgtttcctaagtgttcaataatgaacgtgttaccttcataattaaaatgttagcactcattacacttgggtggtgggttatgtgtttctgttttatattctttgtgtttgtctgtgttcctaaatcttgaataatgagtgtattttctaattaaaaagaaaagagatgaggccaggtgctgtgactcacacctgtaatcccagctctttgggaggccgaggcaggtggatcacttgaggtcaggagttcaagaccagcctggccaacatgacgaaaccccgtatctactgaaaatacaaaaaattagccaggcgtggcagtgggcgcctgtaaaatcccagctactagggaggctgagacaagagaatcacttgaacctgggaggcaaaggttgcagtgagccaagatcatgccactgcactccaggttgggtgacccagtgagactccatctcaaaaaaaaaaggaaaatgccaagatgatcaaaatagcagaagcagcagggccagcagtcggggtgtctggggccagcctgtgggagaggcaggctgtgccatcgctccactcacctgcacagtcagccccacagccccaccccaccagttgcactagggtcttctggtgatcagcctgttatctttgccttttagggaagacatctggtttgacgacgtggacccagcggatatcgaagctgccataggtccagaggcggccaagatagcgaggaaacagttgggtcagagcgagggcagcgtcagcctcagcctcgtgaaagagcaggccttcggcgggtacgctggtctcagggagtgggrtctgctggggatgcttagcygtggagggcggggcttcttcaaggaagaggatgctttcctctccctgaggtgaatgargcaagcacctcccagggtcctgctaagaaccaggaccacacagagcttgtcacgtgggtgcaaatgagtgaggggcagagagcttttctctgctgacacttagtccatggatccctggggctctgacctggwgccctgtggcctgccgtgtttattaaactacagcctttggttacccttcagcctgacaagagccttagccttggactgtgagatggtgggcgtgggccctaagggggaggagagcatggccgcccgtgtgtccatcgtgaaccagtatgggaagtgcgtttatgacaagtacgtcaaaccarcygagcccgtgacggactataggacagcggtcagtgggattcggcctgagaacctcaagcagggtatgtcatccacagctcaggaacttagaagggaaagyagtaactggattcgttttctcccttttgttcccttttctgtctgagaccactcactgcagctggttttgatgcgtcttgtctccttttggggcgatgggttttaaaatacaaaaggcatccttagacggctttacacccatttatgccttgcacttcattgcctcctgtccgctgacttcaagaccaggccagtagctgggcacggtggctcatgcctgtagtcccagctactcaggaggctgaggagggaggattgcttgaacccaggagttcaagtccagcctggacaacatagcgagacctcatttctaaaaaaaattattatttttttttgagatggagttttgctcttgttgcccaggctgaagtgcaatggcacaatctgggctcactgcaacctccgcctcctgggttcaagcgattctcctgcctcagcctcccgagtagctgggattacaggcatatgccaccacacccgactaattttgtattttaagtagagacagggtttctccacattggtcaggctggtcttgaactcccgaactcaggtgatccgcctgcctccgcctcccaaagtgctggaattacaggcatgacccactgcacctggccttctaaaaaatatttttaaaaaattagctggtcccacttggctcgggccacccttggtctaatcasccctgttcggggggtacaagtggggttggtggtggggtggtccccagaagcaggcaaggctgcctctggagcccagggcctagggcaacacatctctrcccatttttgtgggggcagttttgtttttatttccatttgggaaattgtcaagtaaatcatgaggttgaataggcagaaccrcgctgccaggcggctctaaaagtttctcagtgcctacactcaacatatgctctcctccagccatgagccgactttgcagactgtgtggagcactttattcctctcctcagaggtggttctcgcagccacccctgccaggggcccacaaggcacttctcccaggggggtgggtggatgtggtggcttcgagtcaccctccgtagtggcattgcaggcctgaccatttgtcttaggtctgaccaggggtaggagcggggctgcctcctcacagaatgatggtgatgtgtgtgttgcaaaaaaccgcttctttgtgttgattttccaggagaagagcttgaagttgttcagaaggaagtggcagagatgctgaagggcagaattctagtggggcacgctctgcataatgacctaaaggtactgggctctctcctggggactcagcctgcccctgctccgtgggtgttacactcacgcccttgctgtgttggggagttttaacaatgtgtgggtttgtgctctatgttgggaatactttggtaataatatcagataccgcgtgctgagttcttactgtgttttaggagccatgccaggctcttgttttgagagcccccagcgaaactggggtacccataccagagcagctggcaaccccgccctaatgagaaatgaaggtgctgataccccttttacctggaggaaggcctaatgtccagttgtcccatccgtgaccagggtccctccacaggaaacaagtttatcctggcagatgccctgtggcccatgttcaggttacgcttgcctaaccatcaccctggccctgggagcttgcctttgccttcttyctggcgtcccgaggaaaatcccgcctggggcagcccctggttcttcagatggaaagtgcaaattcagacaccaccaccgtgggaaacaagttcaaagacatatacagaccctgggcagggaaggcgtcatgggtggggagggcagcctgccatctcctggtcacccgaggcaggaatgaagagtcaggcagagcgagtacgtgtgtatttacaggagaacagggtgggggtcactttgagtttatgggcaaatgcctggatgttggtttaaaggacacagtgggaacagyggggaggccagtctgctagatgggagagacacttaagttgtcacctctgcccaccggcttgaagcacttgrgtgtggtgaggaacttgaagccgttcagaaggaagtgacagagatgctaatgttcaggcagcagcctttgctatggtgctcccgtgacggcactgtagagatcccttgaatccattgaagatgcyggaggtgttcatgcttgtttacagagggtgaaactgaggtgagaacycccygggcagtgtcctcacagaaaggtcttctgtgtgctcctgctgtaccccctcagagactgctgccgtggggactcgtccttccctcctgactctgactccatccctggcaccttgcgcagcacatgttcaagtctttcttgaagatgatgctaaggaccagacacagtggcttatgcctgtaatcgcagctttttgggaggctgaggctggaggattgcttgaggccgggagttagagaccagcctgagtaacataggggagaccccatctctataaaaaattttaaaattagccaggtgtggtggcgtgtgcctgttgtcccagctactcaggagactggggtaggaggatcagttgagcccaggaggttaaggctgcagtgagccatgattaccctatagcactgcagcccaggtgacagagtgagatcctatcaaaaaacaaaacaaaacaaaaaattgcatgctaagattgcaagatgagctgttaaaatgtgttatttgcaacttcctgatgtgtagaaccaactcaaaatacaagtataatataggaataagttggttgctggttaactgttgactgtttttctcctacttccttgatttcaagattttgtttttattgtctctgactgttgggcatcagcttaagtcagtgcrataaatttccttctggagttgaaattcatatcagtgccttgtttccatgtgtgtgtgacacacttggattccctacaagatgttacttgcagggcagccgcgttggctcacacctgtaatcccagcactttgggaggccgaggcgggtggatcacctgaggtcaggagttcgagaccagcctggccaacatggcaaaaccctgtctctactaaaaaatacaaaaattagccaggcatggtggcgggcacttgtaatcccagctactcgggaggctgaggcaggagaatcacttgaaacctggggtcggaggttgcagtcagcaaagattgagccactgcattccagcctgsgtgacagagcaagactctgtcacacacacacacacacacacacacacacacacacacacacacacacacacaaagatgttacttgcaaaaggtggcggggggagggggttctgctactacaaaccaaaaatgaaaatgattatcattatattttatttttctaggtactatttcttgatcatccaaaaaagaagattcgggacacacagaaatataaacctttcaagartcaagtaaaggtacttagaatgagtgtgactcaagatactgtatttctgttttgctggtcacttcattgtttctggtcactggtggctgacttgttggttaaagggtttttgttttttcttttaacctttaaaactagaaggaatgtttaaaaatagagttctgctaattgctgaccttaaaaatgattgcaacggagggcaagttatttccactctaacctctgaaacagggtcactgactaagggcctggtaccactgtcgtatctgctctagagggtgccaagggcagagccgttcttcatccttttttttttttttagacagggtcttgctctgtcacccaggctggagtgcaatggcataatcttggctsactgtaactgccacctcccaggctcaggcaatccttccaccttagcctctgaagtagctgggaytgcaggcatatgccaccacccctggctaatttttttatttttatttttttagagatagggtcttgctgtgttgccctggctattctcaaactcctgggttcaagtgatctgccctcgttggcctcctaagtgctgagattacaggtgtgaaccaccatgcctggccagagctgtccctcttgaaataagcagggaggcctcaagatgggagatggggatgctgactcctcccctggccctctccttttattggctgataggggtgtatcaccagcccatcatgctataaatggcagctggtggctaccaccctaagtgccatgagcacctctccactgagaggcaaactgtaggtcrcttgggtgaggttcagtagccaaccgctccctgcttggtggggtgaccctctttgggccgagcctgcagaggcccccacccgcctcttccccctttgcagagtggaaggccgtctctgagactactttcagagaagatccttgggctccaggtccagcaggcggagcactgttcagtaagtgtgtcctgtggggtagttcatggggtttggggcggtttcccacctggaaccagacatgagtcacctgacacagacatgggggaggtggggcttgggcacctacttatcctacgaggctattggtcaaaaaaaaaaaatggtagagcggagttacggaattttggttaaattctaaatatgcacatttaacgaatttaacacttaacacaaaagtactgcattctcgttatttggagaaaaagttgccaaataattacaaagggtccccccacccccgcagccctccagccctgccctgcccggcccyrctgagcagctggctctgcctctgtggagcagtcaccccctgccaacgtggcctcagtgctttgggccctttttgcccatctgcttggtccttgtgcccctgtgcccagcacccaacctgccatcaccctgcactcagagacctaaaaaggcagcgtgtttgttgcttctcctctttgggtttccctttcttctcctgggaggggtgtctgagtcacagaagtgtggggaccatcaggtcgttgctccctctgcttctcttgtgtcctccctccccgtcctggtgacatctcgtggccaggtccatgtctcactcagtacatctgtagcagagtggctagtgggagggctcagtcattgtggggttgactgtgggctgcggctatgcctcgtcacctgctgggatgtttcatgtcgtctagattcaggatgcccaggcagcaatgaggctgtacrtcatggtgaagaaggagtgggagagcatggcccgagacaggcgccccctgctgactgctccagaccactgcagtgacgacgcctagcagtcctgccctgctgctgctgccgccccgctacagaggcaatgtgaccagtcacagggacagatcacatctccccagagtggcaactctggtgaaaccttttcagaatcatggcagaggggcgtggcgtggtgctactgagaaggtcctccttcctcttgactttgtggtctgaaacctggtcttactgtccatgtgtgtttgggcccggatggtcagggtggggagcagggackgcyatgggcacgcctggccacgctttaccgactgctgaccccctgggcmaggtgaggttggggcctgtgggccgccagtccatacggtgctgtcacygcccatcttcggtgacaccctggggtgaggtgctcagcaccttcctctcgaggagccacattttcctcctttgtgttaggggacataacaagctctgctgggcttgagggacccagaccaggtgtctgcagtcagctcctgagacacagctggccggcacaacaggtgttacatcaggggtttcctgtggccgtttgractttgagcatttatctaaattaaattggcccagggttggctggtgggtcacccagcagaggcttctccccatagcacgaggatgtgttgcctgggcacggtgactgcggttattcctggaggtcrgcagacatgccaaccttgggctatttgagctggagaagctatgtgatgctagccggtggctttctgggctaggccccagtttgaggctcccctgggaactagagccaggaacagccagtggcactgacaaggggacggagtccaaggcgttattgggccacctgacagctggacagaaraggggcagacacaccgaggatgcgatttaaaataaatgcagatgtttacttggaatggagcctgtggaggctcagtgttgactctcatctagaatggtctggaaggactgctctgtccaggggcgaggtctatagagactgcagaattaagtatcccactggccagtcacagcctcttgccagaaatgattaaggcagaaactggccttgggcctctttattagtcacctaagaggagtgtgaggtgcgcattctggtgctggatgacccttccccccaccccaagggaaacagtggcccatggaaaggaaggacagggagagggcacacgtggagggaggggcctgtggggtatctgtcttctcccccgcatcagggctgagctgcttccccacccagtgggctgggagaggtggctgcctccagcctcaagagcactttttccgcgcaagaaaccagttcctggaaggaggaagcaggcaagtcagttttcgtggacagtccccgggtccaggagcagttactcatgtgactcaatccagcagtcatggacaggaaactctttggagaggtctgattacccctcccgtttaagattgattttggcccagtcatagagatgggataataggcaggcaggagagcagtcttgaaaactatacacgtggagatcaaggtcagttccatacaaacatctattccagtcccccagacgtggtgcaccccagctgggggcttccacctggagggaggcctggtttgctgaaggcgctgctgtcactcaccaggctggaggtgaagcgctccttgatctcytggagcagggccttcatactactggacaccagctccggcaggatctcctctgcaggtggagcaggaaggtcctgaggccagagtccttcctgtgccccttgccagaagccccagaaggatgagagtgggtcacattcccccttgggcttggcatgcacagagccaccttgcagttccggagccccaagcgtcaccctcagccaggacaacccctggtgctcagaagatgccaaatgagtgggaagtttaagtgggccgagaagtggggttgagcccaccttccatgtgctccttccctgtcagttatagggggagcggggcacccctgaccgctgggctctagggagtgtgaggtgagaaggggttctcaccataggaagccaggtggaccagcagcatgcccacgttctccaccacctccgggtcgtccctgtggagctggtaggtctccttgatgaggctgaggccactgccgccctcctcctgcaccaccaccttgaaggccgccagctctgggggatgggtgggagtgggttcattccctgctttcccctgaaagggaagagccttctgcccaggacgggatgggaccccagagctcacacaggggcctgggacaggacaagagacgggacccaggaggccccatcagcttgggcggaccagtaggctggcatgacctgaacaggaccatgcaagaacagaggaggcagcccccccagagccaaaggggtcgttgtcactctggggaagattaggtagtacagaggtcaagaccatgagcccggagttgccaggcaccagctagtgtcttggccaggcccaggatgctctctgaaggactgtgctgtgggccgagcgtcggttgtgctgtgctcagcgctgggcccagcctgtctagctgagtaacaggcagggtttgtgttgtggggaattggagacactgtttgcagagctgttttgatcagtcacggtgtgcctgcatgttaggaaacctgtgcagatgtgatgtgtttatggacagagagagggtcacagggtagcataacgcagagacaagagtttatcaagtgtgcgtgaaagtcttgatggtgatttctggatgactggacttcagatcgtttttaatttcttttcctttttgatttgttgcttctgttttttggtttgtggcacctggcagatgtaactgatgggggctgattcttgcccccacctctaggtggcagcctcgtcctgtccccaggctcacctgacaccttcaccaggctggccagtcccyggtaggcattgttcaccagcagggctctgtcctggcacagccggatgctttgcaggagcagcgccaccacttgttcaaactgctgctccttgatgcagcctgcagaaaggggccgggctgccttgtgcctgctgtgccatgaggcccacccctcccagccccaggggcccagggcgcccayccagctcacmcagcagggacagcagccagaagactccgcagctggcttcygccatttccccatcygcagggtaggtggccaacacctggctgatgaggtccgggaccttctccaagggggccttgttcacaatgatacctggaacgaggacagggatggaaggggacacccaggccttgggtgtgtgcaggggggccttcccatcccccatctgctgccttcctccagctaacgacaacagcagaaatggggtgggaaaggtcaactgtcctcagagacgggtgcaggggttagcccaggagaggcttggagaatcccacactttgggtgctggcagggttcttgggtttcccgggctttccgtggtttggagctctctttttcctggggcgctggagtgccaagatggggtctagaggagaggaagcagcacaggccagggggccccctactgtgaatcaaaaatcaaaacaaacagggcatccagcaccaccgctgccctctggaaccaggactgcccggaaaatcccaggacatttccctgggcaggaggcacttaaaactgaggggtctgcccactgggcaagaagtcctgaaacccggcctctgccagaaggcctttctcccctgccttttctctctctgctccttgattttcttctgttggagttggaagctctcagaagagcctttcccggactatggctgttgtgttttagggacaggacatggaggtcctcgaaggctctcaggggcagttagggaggggctgggggagggctgccagccccggtgggacagcaggaggagggcccctcaccgtccagcaggagggcccagagcaggcccaggccgctggcgcagacgtccctgcttttgagggagctgttgaggtgctccaggatgtgctccagcagcccagcattctgcagctcctctgacagtgactctgactctgtgggtgagccagaatgagggccccagggcccctccctccaggaagccttcctgcctctgttgtccttgggcactgcagtcccatttgacctgcaatcctaggtgcctgctctgggccaagtcgtgtgcactcaatggagccctgaacaggaggatgtgggactggccccagaggagtctgtccatctcgtgggccaccagtcccaatagctgccatcccactaccaggctgggtctgacctctgtagcttcccatccagggggcctgaccctgcctcctgggctcacagagccagcctgtgccttccaggatggaaccatgacggggccctatcccggtaggatgaactgacatccattttgcctgagggttccagttgacatctattcctagtgcctcctttcactccccaaagtgagatcagccatgtatcatcagttatccagtctgtgcagtaaagagggtgctggggcccagaccccagccctgaaccctgctgcatggactcctggcaactgtccttaggctctctcgaggcccagcttcctgttggggagaacagtgcccacccgatttgtgggtgaaggtgtgagcgctctgtatggccctctccttcccacagtcctggctggaggcttcggaagcccactgggccctatggaatggagacacacagggcatttgagccccagcctcccagaaggggcaggaagtgtgggaaagagatgtcattggtgtgaagcccacagctgcgcctagcatgtctgtagagggaaccagtgacttcaagagtggaagcttgtcatcaagatggaaaaggatgcgaccagcatttggggtggccaaatgaagacggccaaatgccaccatgtatctcaggaggaggcccagcactgtcctgtccaacccacctataccccaaaccaacccttccaagacccctgggaagggctgtcctggagcgtgggtggggcaggaggtggctggcagacacaccctgggttgtggtgatggctagcaggctgtagaccatgacaagaagtggctcctcctcggggtggctctgaagagcactcagcagggtggaggtgatggcttggttgcagggagccttggcttccgggtggtgcaccagcgctgctcaagccagaggaagacgcctggggttagccccacagctcaggcatggggccagacacacaaggctcacaggctgggggatagcatctccactttgcatgaaggaaaccgaggtctgccttgttctgacccagagcaggcctccatgaatccctgtggcctaatggagtgaaggaccggaagggagccctgcccggccaggccacgcatcctggtccctgggagccagtcaggcagcactgaacacaatttcaacattgcatggaactccaaacttccaacagtgaaactagaaaggtggccgcgcgcggtggctcatgcctataatcccagcactttgggaggctgaggcgggtggatcacgatgtcaggagttcaagaccagcctgactaacatggtgaaacccgtctctactaaaaatacaaaaattagccaggcgtggtggtgggtgcctgtagtcccagctattcaggaggctgaggcaggagaatcgcttgaacctgggaggtggaggttgcattgagccgagagtgcgccactgcactcgcctgggtgacgagcaaaactccatctcaaaaaaaaaaaaaaaagtaactaaatactttttgtttcaaaaaaaatcatcaaagctaattcaactcttttaacaacccatgtctctcataggaggctcaatctctcagctccaacctcttccatcaggacagtgaaatgaactcagcactgccctcctaccagccctcttcagaggacacaacccatcctccctgagggtcactccagaggacctcgtgtccagctcctcgcttcatagctgggaaaactggcaggatcatcaggaacttgtccagggccacggagcaggcaaaaggcaggcctgggtgggatccgcgtctccaagctcctggcctgtgccctctctgccatccaggatggggtctgatgggcacaggatggcatggactctccagtggttagatgccaaccaggtggtgggggcagagctaggccaccaggagtgtctcctggcctggccctggcatccaccttggcctagaagatggcctagaaggtgcagcagcagggagcagggcatggcttcccctaacccacccggcccggtgcccaccttggcccaggaggcacagctgcaggaagcagcgcacagcctccccgaccccatctggcctggtttggcacccaccttggcccaggaggtgcagcagcagggagcaggcacacagctggacatcgaggaccctgtcatgtagctccatggtcgtgaccaccacctccaccagctccgggggccacggcagacctggcagggcgggcggcacaggggagactcattttgggccagatcgggggcatatagacccgaccagggcccccagaggctggtaggagcctgcagggccctaggtgggtgaatagaagggggaaggacaatgaggattagcgctaggtccatggagtgcatgccatgtctgccacgggtgtcctgctctgtgctgcccacagccctgtgaagtggcccctcccaaggctgccctccatatgcagatgaggaacctggggtcagcaggatgaaagcacctgctcttcagcagtttgaacctagccagtctattccagagcccttggctgcaactgccctgagggtggacatgggt

SEQ ID NO: 95396 - DNA, 32070 bp, Homo sapiens
  misc_feature (1)...(32070): n = A,T,C or G
gggaatatcatattccctgatccaccctcatcagggaaggtagaaagaatgaatcaaactctaaaaagtcacctaaccaaactaatcttggaaacgcggttaccatggacaaaatgccttcccattgccttactaagaatccaaactgcccctcgaaaagatctcggcctgtccccttacgaaatgctctatggactgccttatctaaattccactactgaccttcctacatttgaaacaaaagatcagtttctaaaaaaatgtatattttgtctgtcttccaccctttcctccctcaggactcaaggccttctagggcaaactccaccctagttcgaattcccagttcactaacaccagcccagagatcatgtccttatcaaaagacggaaagagggaaagttcaaaccaacctgggaaggaccttatctaatactcctaaccactgagatagcaatccaaaggccgaaaaaggagggacccaccccttgcaaagtcatggactgtcactccaggaccaacaccctccaaaccaatgttcaaaagggtttagtctgtctttttttttaattcctttagttaccaaagaacatcttatcatcaatgtaacccgatcaccctgccctcaaacgatcacattcaatgcttgccttgtcatgccctgtggagacctttagagtcaaaaacagctagcttcttcagaaaagtacctctgcccctccacccgcttcagacaaatcagaaacccttgtgatggacaaccacgagccttccaggggttatgttataattggggagatgttatctagaccacccagtatcagggctggacctcctcagagggttgcaccgccctaaaaccttacatccaccttaccaaaggagtcacaccctcaaattgccaaaaccaccagttttcccaaaagtcagaagccctacgggacagcccccaagggccattcgacttccagctcttgatgccaattttacctcatgtctctcatggcaaggggaaaatctgacgttcctsggaaacctgatgggatgtactgggcctaaacctttccaagagctaaccagtcagtcagccctaatccatccccaagcagatgtacagtggtattgtgggggaccaatattgagtactctgccaaacaattggagcagcatttgcgctccgatccaattggccatccctttcaccttggcatttcaacaaccagacaggaagcaggtaacccaaaggaaaagagaaacccytcacgggtcctttgayctctcatatttacatagacagtatcggggttgcgctggggggtacaaaatgaattcaaagctcgaaaccaaatagccaccaggtttgagtctgtattattctggtggtccactataaacaaaaatgtagactggatacattatatatactataatcaacagtgattcatcaattacaccagagatgccataaaaagaatagctcaacaattaggccctaccagccagatggcctgggaaaacaggatagcccttgacatgatattggccaaaaaaaggcggagtctgtgtcatgattggggtccaatgttgcacttttatccccaataacacagccctggacgggacaatcacaaaagccttacaagccttaccaccctagcaaatgaattagccgagaactctggaatagatgacccctttgcaggtgtcatggagaaatggtttggaaaatggaagggactcatgacctaaatmtttacctcccttgcaacagttacaggtgtactcatccttgtgggctgctgtatcataccttgtattcgtgggttaacccaaaggctcatagaagcagctctcacaaaaacctcccccacctctccccatccatagtcagataagctcttgctcctagatgataaagaagaacaacaaagccaactcctgttaaataaatttgaaggggaagaactataaaacagaagaggggaaattgttgggacaactaagttcctcttcaaagattcaacttcctggccataacttggaaacaaatcctacccctacaaccttttcaaaaatcacacctttaccttatttgggaaggtttaagcattagcctgtcggggtcagcttagattatgcggcccaaccccagccaataggggaaggacacagaaacagaaacwgccttaccccagccaataggggaaggacacagaaacagaaactgcgttaccccagccaataggggaaggacacagaaacagaaactgcgttaccccagccaataggggaaggacacagaaacagaaactgcgttagggataaaaaccccttccctcctttgttcagtgtgctcttgggattgtaacaggcacaggcagcacccttctacagaagtaaaagtgacttgctgagaaattttctaagtgcgggtttcttttcgctacaccaagcacttgtttccaacacatgcaaaccagaatggaggtctccctggacctgggtttgggccacaagcttgcaagaccttgggcaagactgttccctcttctgaaccaagtccttccctggcccagccgcttgtgagtaacacatcagtttcatgcttacacctcctggtcttgtgagtaacacatcggtttcatgcttacacctcctggtctgaccgggctctcctttgcagagccttttattccttcccttcctctgaacactggctggctgctttcagggaagaagttcagggcagtggcagggagctccttgcacatcgccatgacaaatgttttatggaaacagtgagctgatgggacgaggggtcggggctagaaagtcagccaaaaggtgtgagaacccggactagcccccagccctgaacatggcaggccactgtgccatggtaggggagtgaaagtttccctctgctcctcttagggttccagctggggctccttacaaaagagaaaaacagttcattaatgcatgtagtgcacctcactgaagaagcttcaacaaaaagcaactcagaacagtgacttagaactgggttatggagcaacttcaacaaagaataatcaacgtgtggggaaatgacaggacccaggagagcggttttaggcttccaagtttgggaaaccrgcaaggtgagtattgggaggaaactaaggcggaagtttcattcacagagccctagggtgccttctttcctctggctgatgcgtctctctcctataatttccatcctgcctcagacagcagagggacagggcagagagagatttccctgcttctgctgcatcttagttgccttcaactcaagataatttctgaggctcattttggagtgacatattctggtgtccttcacggtacagggcacagcctcagaggaccagatccacagctgatcactgagctcttccatgtgccaggcccgtccagggagaacactcagccccacaaacagggcaggtggcaccaggatgctgggcggcagcctaaccctcagctcatgggtgggtggagtggagagcaccctccccatgtggggctccctggtcgtggacctggagaccaccaaggctctgcagtctcagaagtggcctgttggaatggggtctgcaggcagggaagccttgggccagagtccctcaggggcaggaacacagcccccaggcttgtcccacttgtccctctgaatagttaagggctgcccacagggaacttccctccctccctcccttccttcctgcctccctccctcccttctttccccttttcttctttcatcctcccctttcttccttccttactgtggtaaaatacacataacatgaaatttaccatctcaactatttaaacacgcacagttccatggtgttgagttcactcacatcgttgtacagccatcaccagcatccatctacaacactcttttcatcttcccagactgaaactcaacaccgttcacagctccccattcccgccttccccaggcgcccaccattctcctctctatttctacgaatttgatgactccagtccctcagatatgtggaattgtggctgggcgcggtggttcacatctgtaatcccagcactttcagaggccaaggcaggcaaatcaccttaggtcaggagttctagaacagcctggccaacatggtgaaacccagtctctactaaaaatacaaaaataagccgggcatggtggcacacatctgtggtgccagctactcaggaggctgaggcgggagaatcgcttgaacctgggaggcagaggttgcagtgagctgagatctcaccactgcactccagcctgggagagagagcgagactctgccaaaaaaaaaaaaaaaaagttaatagaatcgcatggcatttttccttgttggactggattttacttagcataaggcatcaaggctcacccacgctgtagcaggtgtcagcgtctcctccctttctagggctgagaaacattccatctagagacagactcactccgtgcagccatgacgccttggtgaacaccacggctgcttccagcttttggctatggtgagttccgttgctaggaacacagatgtgcacatgtctcttccagacctcctttcaattccttgggtgtatacacaaaagcaggattgccagctcatacggtaataatatttttatttttatttttattttttgagaaggagtcttgctatgttgcccaggctggagtgcagtggtgcgattttggttcactgcaacctccacctcccaagttcaagcgattctcctgcctcagcgtcccaagtagctgggattacagactcgagccaccacgaccggctaatttttgtatttttagtggagatggaggattcaccatgttggccaggctggtctcgaacttctgacctcaagtgatccgcccgcctcggcctctgaaagtgctaggattgtaggcatgagccaccgcgcccggcctcgtacggtaattctgtgtgatgttttgaggaattgccacaattttttcctgcgcctgcaccagggacacgtctcggagctggcgaactggacttggggtgggagggaaaggaagcattaaagatgcccccagctttcacggagatgagaacggtgccccgggagggcgggacgggatcagggtcctgtgaacggggtatcagtgtaaactcctctgagagatatcaggaaaagcaggaagaagcctctgggacccttcgggaggtaactcctcttcgcagcggggcgcgctctcccagtccctgcagccgccgccgccctctcctgagcttcctcgagcggacgccaggcaagggcgggggtcgtagcggggcggagcggggctttgtccacggaccgcgcgaagaggcctcagggcccggcgcgggcgccggagggggactcgctcgcagggggaacgcgaaggttcctcagtctgcgggacgcagagctccgtggggccgcgagccggggccggggaagcgactctgcctagggggacgtcgcgggcgcggggcacagggtcctgcggggctggagggctacaggctgcggcgcgcgcgagccggaaggccggggatcgtgggttctggggccgcagcttcacgggttcgtctcccccgcctccccgggggagcaggatgtcagggggtcgcccccgcccgggagacagggtgtcaaggggcccccggggacggggcttcaggggcacccggagccgctcggccccagggcgggatgcggggacagggccccaaggtaccagggccacgaggggcgcgcgggtcccttggggatgcgcgcgaggaggcgccgtcccttcctagcaggggtccctggggacccgcggccgcctcccgcgcccctctgtcccctcccgtgttcggcctcgggaagtcggggcggcgggcggcgcgggccgggagggggcgcctcgggctcaccccgccccagggccgccgggcggaaggcggaggccgagaccagacgcggagccatggccgaggtgttgcggacgctggccggtgagtgcaggcctcggccccgggtgcccgcgagggagccgctaccgcagggaatgcggggtgcacccgacagccgggccggggtgggggcgcycagggctgcgaggcttcrggccggccgccgccccagcctccgagaccctgcgtcctggggagccggcgggcaggtgggctyggccgcgctgtgggtgcctgggacccgcagggaggatgggcgcggtggcgcggcctggcggggggctcgtctccggggtccccgggtcctggtgagagcggggtccctcgacgccgtggcggtctccagcctctcctcgcccctccacgctccccgccttccatgagctgctattttcagcacctaccgcccgaccctggactaggacaaggctctgggctgccctgcccgccccccagcccttccctcgggcacggcggccaggcgcccgggttgaccgggaacagcctccataccccaaacgcggaggcgcctcgggaaggcgaggtgggcaagttcaatgccaagcgtgacgggggaactgtgccccgggccctcaggtgatataggagttaagaagaaattattgaggcaaccagatgcggtgactcaggcctgtaaccccagcactttgggaggccgagggtggatcacctgtccttaattttcttggcgccagaagatgaattgagtatttacccagacaacaacgtcgcttcagagggagggatgcagaacgcagggccacggggygcaggctgcaggccagtgaaccccaacgccaaaggccagggagagccgggtggggtacccagagccagcacacagccctttaatttagaggagtgctgtgtacacatytggggagagatgttttactttgatttggaatcaggtggcggataaggcatactgaggcctgacttggtgagggctcctgccccggaggtgcagccctggaggagcgggaggcagaggagtggaaaattcatgaagaaaacngggtatggtgtaggtcgaggccctgccctcagtaatgctcaccatttgtcagtgtttactgtgaggcagcactgtgttcartatcgctgagttctcaggaaggaacggtaaatacttcccgggtcattctttcacccacgggaaaacaggtttggagagatctgggacagtgctctggtccyaggcaggaagggctgagtggggcctgggactcargtctgactgcaaacacctgcctcctccctgtgctgccagcgccttccgggttcttccctgtccctcctttgtggtctttgttttcccttttttgtcttaatatgtttcaacggatgtatacaataaaccgcacatraaaggtacagctggatacatcttgacccagtcaagatgatgaacacagctgccaccccaggagtctgtcctgccccrcgggttatgctgtcttagttggtctcatgtcagggagccttggaggaccagggtcgggcagttggtctctatactcctggggttctggcactggctctggcccatgaccgcacccaagacaaacgtcttgaagactaagaggttaggtctttgagaaacctggcaaatgagtgcccattctcaggttacccacattctgcatgttgatttagtcatccaaccaatgttggttgaacactgatgagaacaagcaggcctgtgctagaaggtgcctgcagccaggagctggtgagctggtgtccttagggacaccaatggcgagggacccagtgtgtggaaatctgggggacaagcatgccagggagaagagctcacatggggaaggcccggctccacaaatcagtcaggcttgttggggcgggcaggagagcagggtagtggagtcagagggagtgatcccccgaaaggcaggaagaggacatgagagagccttggagatgacsrtgaggatgtggttggtgggcggtgagctgggtgtcatgtgctggctccttagagaatgctcagctccttcacacccatcataatccctggaggactgagaccacgtgcaggagttttggaagctggcagtgcacccagtcccggctctcctccattctggtgggtctcaccagagattggccaagaagagatcaaactgttcctggaccaaactgagggtggggctgctatctctcgyggcccaataacgagatgcagatgaactggggagaaagagactttttatttctgtaaccagttacaaggagaagacctggaaattatctccagaccaactcaaaattacaaagttttccagagcttatataccttctaagctatatgtctatgtgtaagtgtgcattcatctcaagacrtaagtaattgacttatgttaatctataactaaggtctgagtcctgaagaccttcctctggatcctcagtaaatttacttaatctaaaacccttatcttgtctcctaaatcatgggggtttgggaagttccttcagacccccagtaaacttatttgtggagtcctggggaatttcttcagatccccaataaaacttgtttaatcctaaatgggtcctgttaagaattccttcgttattttgtcatgcttgaaggcccaggaaaggtctaggcaaaactcttggtgggattttgttatattccagcctttttataagggcactggcttttaatatttaatttaaccactcagtcagtactgaaacagttgttagggaggcctgcgttagtgagacctgacctgccacaamacatcttactcggaatgctgcccataacttcaaaaaatcagctttgacggagccctactgaacacacctagcatctctcttccttcagcttagggtcaaggggctggggttgatggcaccrttgaaagaaacagctttattgccgtgtcattgatatgccataaaattcacctgtttcaaatgaattattttcagttagtttacagagttgtgaaataaattttataacttttccatccccagcccaccaaaactccctggaactcctcygcagtcattccccattcccacctggcctcagacaatcactttctgtctctccagtcttgccttttctggacagttcctatgaatggagtcctgtgttacatggtcttttgcatctgacttccttcacttagaataatgattccgagattcatgtatgttgtagtatgtatcagtatttaattcctttttattactgaataatccattgtacagatagaccacattttgtttatccattcatcagctgaaggacatttcggctgtttctgcttttttagctattttaaactgcacgcagcactgctatgaacatttgtgtacaagactttgtgtgaacatgttttcatttctcttgggttgatacccagcagaggaattgctgggtcatacagraagtctgatttaacattttaagaaactagcaaactgttttccaaagtgactgccccattttacattcccatcagcagtgtataacggttctaattttcttttcctttttcttttcttgagacaaggttttgctctgtcacccaggctrgagtgcagtggcatgatcttggctcactgcagcctcaatctcttgggctcaattggtcctcccacctcagcctcctgagtagctgggactacaggtgagtaccaccacatccagctaatttttgtatttttggtagagatggggttttgccatgttgcccaggctgttctcaaactcctgggctcaagtgatctgcccacctcggcctccccaagtcctgggattataggtgtgagccgctgcgcctggctgagggttccactgtctgtacrtctgcagcaatacataccattcttgtgggtaaaaggtggtatctcattatagttttgatttgcatttccccaaggwcaaatgatggcaagtggcttttcttgtgctttttagccatttgtatatgtttttggtgaaatgcctgttgaaatgttttgcctttttaaaaattgagttgtctcctttgttcagttttgagagttctttacatacacagtatcatatatatatatatatatatatatatataccagatatatgatttgcaaatattttcaaycatcaatagtttgtcttaacacttttttattggtgttttgaagtagaaaagttttacattttgatccattccaatttattaactttttcttttattgtgtatctggtatcatatctaagaaatcttaatccagtgtcacaaagatttaatcttatattttcttctaaccgctttctagtttatgtgtaagaatctgtccattttacctaagttgcataatttgttggcaaacagttgtwcatagtatttccttgaaatccttttaatctctgtaagattggaattgctgtctcctcttttagtcctgattttagttatttgtgttctctctctctctggtcaatgtagctaaagctttgtcaattctcttgatcttttcagagaactgmcatttgattttttttactttatctttttctytctgttctctagttcattggtttccactctaatatttattaatttcccytcttctcactttgggtttaattygttctgtcttttcttattgtagttacttacaatggaagcttacacacttgatttaagattttttttctaatgtagacatttacagctataaatttcccttgaaacacagctttagttatatctcataaattttggtatgttgtgtttacattttcattcagctcagtgtatcttttgattttcttctttgacccattgcttatttagaattatgttgtttaatttctatgtatttataggtttcccaaatttcttttgttaatttctgatttcattcccctgtggctagagaagaaactctgtggatatcagtcctttcgaatttctcagaattgttttatggtccagcatatgattgaccttggacactgttccatgtgcacttgaggagaacgtgacttcggctcttgccaggtggagtgttctagagatgtcagttggtgtccagtgatgtcaagtcatttgtatctactgattttctttctaattwttctatccattaytgagagtggggtaggattttggtgtccaattattgtttttttgtttttttttttttgtttgtttgtttttttttttgaggtggagtctcactttgtcacccaggctggagtgcagtggtatgatcacagctcactgcagcccccacctcccaaggcttaggtcacctcagcctcctgagtagctgcaactacaggcaagtaccatcatgcctagctgatttttgcattttttrtagacagggttttgccatgttacttaggctggtcacgaactcctgggctcaagtgacccacccacctcggcctcccaaagtgctgggattacaagcgtgagtcaccatgcctggcccaaccrttactggtgaattgactgtttcacccttcaattctgtgagtttttgcttcatgtattgctgcgggataattaaggaatcagagagaccgatggggttgaggaggaattatttaattatttaggcgcaccgacccaatcagattaacatccaaaggacygggccccaaacaaagagtcaagctaccttttaagcattttgtggggtggggggagatttgtgcagggggaagagtattacagaagcragaaacaaagacagttattcagttaagacatgcattacattatttcttacttttcaaggaacaacacgttttatgactcaagattatctgtttagtgaccttgcagctgcacagctagagaaacagagtcttcgcaatgcctgggaaagggagagataaggctcactagccacagaaaaacagccagttaatttttaaaggactccagccctttctcttcctcaaggggaattggttttttacatayaactgagtttttgcttacacagtttttaatttcttttaattcctgttctagtattttggggctaggttgtcaggtatgtatatatttctgtytgttatattttcgtgatgtattcactttatatcatggcagaatgtttctctttagtaagatttttgatcttaaaaaagttggccagatggggtggctcatgcctgtratcccagcactttgggaggccaaggcaggtggatcacctgaggtcaggagttcaagactagcctggcgaacatggtgaaaccccgtctctactgaaaatacaaaaaaattagccagcyrtgatggtgtgygcctgtaatcccwgctacttgggaggctgaggcacgagaattgcttgaacccgggaggctgaggttacagtcagccaagatcgtgccactgcactccaacctgggtgatagagtgagactctgtctcaaaaaaacaaaaaaattatttagtctgacgttagcatttctcctcaagctcccttacggytgtttgcatagcaaatctactatccttttgctttgacctatttgtatcttwgtttctaaagtatgtatgtctctcacaggcagcatatagtcaaagcttaaaaaaaaaatccagtctaacgatctctgccttttgattggcatgttcattctattcccattcaatgttattattgctgtggttggatttccatctatcagttcacaatttgttttctatgttttatgcctttttgttcttctgttcatcttttactaccttcttttgtattaagtattttctagtgtagcatttaaattccctttttctttttaagtgtatattttaaagttattttgttagtgtttgctccagggattacaatatgcattttaatttatcaggatctacttcagattaatactaattttagtaaaatacaggaacttgactccagtataactccatttcctccctccttgcttgtggtttgtagtattattgtcgtatatgttcatctatatatgttataaactcaacaacatggtgttataattattgtttcacacaatcttatttcttttcaattcagtaagacaagtaaggagaaaaacacttttcaagtcttttatattacactgtatatttatcactgactttactcttgatttcttcctgtatattcaagytattgtctggtgacctttccttgctccagtatatataataacttcattgcctccttgctcctttatgctrttattgtcatatatattatatatgtttatgctgtgagcccatcagctaagtcagcttagcaaggtctcaagatacaaagtcaatgaataaatcaggctgggtgtggtggctcacacctgcaatcccagcactttgggaggccaagataggtagatcactygaggccaggagtttgagagcagcctggcccacatggcaagactccatctttacaaaaatacaaaaaaaaaaaaaaagttgagtgtggtggtrygcctgtaatcccacctacttgggaggctgaggcatgagaattgcttgaacccaggagggagaggttgcagtgactggagatcacaccactgcactccagactgggcaacagggcaagacwcagtctaaaaaaaaaaaaaaaagaaaaaagaaaaacaagaataaatcaattatttttctataatacttgccacaatcaattgaaccatgaaaaattttaaataccatttacagtagcatcataaaacatgaaatatttagagaataatttaccaaattaggagaaatgtctatacaattaaaactgcaatataaaccaggcaccatggctcatgcctgtaatcccagcactttgggaggtcaaggtggccagatcacttgagcccagaagtttgagaccagcctgggtgacatagtgagaccctgtctctacaaaaaaaaaaaaaaattagctgggcatggtggcatgcacctgtagcccctgctactcaggaggctgaggtgagaggatgacttgagcccagtaggcagagattgcagtgcattccagcctgggctacacagcaagaccctgacaaaaaaaaaaaaaaaaagaaaaagaaggtcacaaaaaaacagaaaactgcaaaatattgatgacaaaaattaaagaagacataaataaatggagaaatataccatgctcatggattggaagacttacattgctaaactgtcacttctccccagatggatctacagagtccacataatctcacttaaaacyccagaagaaatttttgtaaagttgacagctgattctaaaatkttacatagtaatcagaataggttgatattaggatagacagatagttcaatggaatagaatgcagagtttagaaatagacctacacagaaatagtcmattgattttttaakagttgctttttgataagggtgctaaggtaatgtgatagagaaaggaaagtattttcaattcaaatggctgaaatgactggatatccattgagggaagaaagggactttagcctttcacacaatacacaaaaattatggaattctgaagaaaataagagaaaatgttcatgaacttggggtaggcaaaaatttaatagatgagscaaaaaaaaaaaaaggcccaaaccataaaaatggtttcatttttataaggataaattagagtttataaaaattaacacttcccttcaaaagaaaaattaaggaaaaatgaataaataagccaccgactgaragaaaatatttgttttctaagaagtattttgtttttcattttatgggttcatagtaggtgtatatatttatggggtccctgagatattgtggttcagtcatacaatggaaaattcacatcatggagaactggtatccatcctcttgagcaattatcctttgtgttacaaacaatccaactatactcttttagttatttttattctttttttttttttttttttgagatggagtctcgctctgtcacccaggctggagtgtggtggcgccatctcaactcactgcaacctccgcctcccaggtttaagtgattctcctgcctcagtttcctgagtagctgggactacaggcacccaccaccacgccyggctagtttttgtatttttaaactttttttttcttttttctttttcttcttttttttttttttgagatggagtctcgctctgtcgcccgggctggagtgcagtggtgcaatctcggctcactgcaacctccgtctcccaggttcaggagattctcctgcctcagcctcccaagtagctgggattacaggcatgcgccaccacacccagctaattttttgtatttttagtagaggcaggatttcaccgtgttggtcaggctagactcgaatgcctgacctcgtgatccacccacctcggcctcccaaagtgctggggttacgggcgtgagccaccacgcctggccttagtttttgtatttttagtagagatgaggtttcaccatgttggccaggctggtcttgaactcctgatctcaggtgatccacctgcctcggcctcccaaagtgctgagattacaggcatgagccactgtgcccgacctctcttttagttatttttaaatgtgcaattaaattattattgactatagtctccctgttatgctatcaaatactgggtcttattcattctttctatttatttgtacacattaaccatccctacataccctctcacccctgccactacccttccaagtctctgcgaaccatccttctattctctatctccatgagtttaattgtttcgatgttttgatactacagataagtgagaacatgcagtgtctgtctctctgtgcctggcgagaaaatatttgtaatatttgtatttggcaaaggacttgtatccaaaatatagaaataaattctgctcaataataaaaagagaaacaacttaatgagacccagtgtctacaaaaagtagaataattagccgggcatgttggtgcatgtctgtagtcccacctaatcaggaggctgagggggaaagatcacttaagctcaggagttcgaggttgcagcgagctgtgatcgtgccactgcactccagcctgggtgacagagtaagatcctgtctaaaaaaaataaaaatagagggccaggtgaggtggcttatgcctgtaatcccagcacattgggaggctgaggcaggtggattgcttaagcccaggagttcaagaccagcctgggcaacatggtgaaaccccatctctaccaaaaccacaaaaaatcagctagatgtggtgcatgcctatagtctcagctactcaaaaggctgaggtgggaggatcacctgagcccaggaagtcgaggctgtagtgagccatgatcatgccaccacactccagcctgggcaactggagtgggactgtgccccccaaaaatatatataagtaaataaataaataaataaataataaaatgagctaaagatctggacaggcttcataagaagcaagcaaatggccaataaatacatgaaaagatgatttacctccttagtcattggacacacttagataccactcctcatccactagcatggctaaaggataaaagagtgaccatcaagtgttggcaaggactgtggttctcgtacattcctggcgggaatggaaaattcagtcaccactttggaacacagtttggcagtttcttacaaagttaaacatacacttaccatatgacccatcttttccattccttggtatttactcaagggaaatgaaaacacaggtccacaaatacctgcacatgagtgtttacagaagctttgttgctagtggccccgaacagtgaaaaaaccacrgtgtctgtcaataggagacagaataaatgaattgtggcggattaacaatggcgtgcttctcagaaatgaaaaagaacgaacgattgatacacgtgacaatataggtgaatcttcaaaacagcatgcggtgtgatgcrgccagacataaaagagcatgtatcagaggattccgtgtatgggaaacgccagggaatcagatccatggttgtcagggtcaggagggaccttactggggtgattacatgtgtacatacattgtgtgaaactcatcaaaaccgtatacctaaagtgggcacattttattggatgtaagttatccctcaaattaaattaattttcaaagttttaaaaaatggaaccatttttgccacattgaaggaaaattatttccaccaagatttccctacagccaaacgatctaccaactacaaaaatggaaaaaataatttaggacatrtaaagttcaaatgttttgcctcccacgtttckgtttcaagaagctattcgagataaatcgctccgtggtcacaggacttagaaaggtggaggtaaacacacacaagcattataagataagaagtaacagatgaattagttgaaagggactgatttcgggggaaggaataggaactgggccaggagatagacgcctttcaggcttgcccttgtgaaaacgatagtcccctcttacctgcgggggataggttccgagatccccagtggatgtctgaaaccacagatagtaccaaaccctacagagagtatgttttctcctgtacacacatacctatgatagggtttaatttataaattaggcaccgggtgggattaacaaccataattaatagtaaaatagaacaattataacaatatactgtccgaggcgggtggatcacttgaagtcaggagatcgagaccagcctggccaacatggtgaaacctgtctctactaaaaatacaaaaaattagccaggcgtrgtggtgggcgcctgtaaacccagctactcgggaggctgaggcaggagaattgcttgaacccgggaggcggaggctgtagtgagccgaaggtgcccctttgcactccagcctgggcaacgagcaaaactccatctcaaaaacaacaacaaaacaacaacaacaacaaaaacaatatactgtaataaaggttacgtgaatgtggtctctctaaaaaaaaatgtgtatatatcttagtttgtgggttttttgttgttgtagttttgtttattattaagagacagggtcttgctctgttacccaggctggagtgcagtggtgtgatcatggcttactgcagccttcacctcctaggctcaagtgatccttccacctcagcctcctgggaccagaggcatgcaccactatgcccagctaattgttttttktttttttttcttgatagaaatgagttctcactaygttgcccaggctggtctagaactcctggcttccagcaattctgctggctcagcctcccaaagtcctgggattataggcacgagccacgatgcctgtcctcaaaatattttactgtactgtactcacctattattggcctttggttgaccatgggtaactgaaactccagcaagcgaaggtgtggataagggmactactgtacgtgactttaatatacataaaatcaccttaaagacaatgattgtttccagaacatgagcctctgagacagcagggagatactaggggaagttggtggctcctctccctggcaggaactggtctgggctcctggctcagcctggccatgaggctgtcctggcctccctcggtgggttcgacagtgacctcgacgtgctcatttcagtgtggttcattccggtctcccaggggaagggggtgctgagtggaaggaggtcamtgggaagccggggtggctctcagagtctgcaggagcagtcgggctgatgagctgggaggagcagaccgcctccctcttctctgagtgggaggagggccagatctggactgggtttggagatgctcaggtggggctcagagcatcacctgtggggcagagggaccatcttggcagatgaaggcccrtcgcagggtgtgatrcctgaattacraggygggacaggtaaagtggggcaggtgagagaaggagggtgagtgatgtgatttttctactcctgttttccaggaaaaccaaaatgccayrcacttcgacctatgatccttttcctaataatgcttgtcttggtcttgtttgggtaagacacatttgaccatcgaggctggcctggtttggggagaagtgaccacagcagccaatcagacccatggggcctccctgagctccccaagtatcacagttatcagggtcctaaggacagttattgcctgcgtccagctctggcggagggtgtgcttacttgctcccttattttagcctcacctgggcaacaggctcatctcactcccatttaaaattttcctaagtgtggagtctggggctgggagagcaagccccttgcccacaattgcgtggctgggggtggggaaggcaattctgggtcccaagctgttagtcgcttccagacacagaaggtcccagaaccaagagtgaagtcayctgtcasctctactggggcatctctggacacggyctggaaacactccctgacgtggcctcagggactgcactgaycaaggcactggtggcggggggtgagggagctggggctctggagctccagcaggtgcccatacgtgagcaatatcccagggaccaccctcctgcccacctccmggtgtgggacgtggcgaggcgcctgagctttgctgagaacttgccctacctgcctcgaggccttgcagcttcaccgggaactcttgtgctcacgctgctggccrcaccatgcactttttggaggaagggaccaacaggcagtcttcgttctgtgtcctgagtcttggcacacttcctttctgcagttacrggktcctaagccccagaagtctaatgccaggaagcctggaacgggggttctggtgagtgcagggaagagcaggtggagcatccatgctggccggggtgctggctgtgggcgggggtcccactctgggaactccccctccccttcctgggcccgctctctatgctctgcccagtgtagacatgctcaactctgtggccttgaagggtcacctggatacctctggagtcagccttgacctcccttctgacctccagtcyccaactccaggcttacccagagttcccatgcatggtctctgctcccccatccccacccctcctccaccagccatcctcaactctccctttgctctcacccctacactgggttcccaaatcctgccagccctgctcttcagcagctcgcgtgcccactggcctccctgccttcgacgtcctgctccagggctccggtggggctgccctcatctctgtgacagcctcagacttgtctccccatccccatcagccctgtcccccttcttctcacagyagctggagtgatctttccagaacataaggtaggaggctctccatgwtctgatcctgccttcctgacctccccagcctcatctctccctcctctgcyctcgccctctgtgctccagccaacgtggcctgtcactcgtccacctgccatactgtcctgactccaggcctttgcctgtgctatggcctctgttgggaccactcttgtctctcccctgctgtgtctgctaattcccactcgtgtcagtgatccatggctgcagaacacaccactccatccatggaaaacaatcacaatcattgattactatctctccctgggcttcctggggtggactgggctcagctgggtggttcactttggggcctcagcagtcatgggcagacagtggctggggtcactgcaaagacttccctgcatctctggcagttgatgctggctgtcatctgagacacctacccagggcctctccctggggcctgggctcctgctyagcttggttgggaggctccaagaccaacatcccaagaaagatgagacagaagccagatcacctttttgggcctggcttcagaagtcacccagcrtcacttctgctgcatttatttcttagaaacacagaatatcagaccccatctcttgatgggagggggcctcatggtttgtagacatgttctgaaactccactctgcccggccttggcttcgacgtgtctggtgaatgtgtgggctgtgaggctcccygaacgtagacctcagactgcaacgytggccgttacagggtctggcacacgggcccacgycaggcccatcgccacagtgatggttgttctgtgactgtttctggtggcctctgctccacactccaggctgacgctgtgycccttccactgggaccctcgggtggcttccatgcacttgtgccctaaatcctgctcctagactaaacttcatctcctgtgttctcattctgcagcatggctgttagggaacctgaccatctgcagcrygtctcgttgccaaggtataatgtcagtgcctcccttcagtgsctcccatgtcacagaattgtcctgcagccctggcacatgtgtgccatgtgggagctggggcaggtcctctttcctcctgtggctcygagggagggggccgctccttccccagtctctaccctgacttggccctcrtcctgcagccactcagagagcacgatggagctggagcttcagttttgaccaratgcgtgtcgccggcttttgtgtgtgtgtgtgtgtgatggagtctcgctctgtcgcccaggctggagtgcattggcaccatctctgcccactgcaacctctgcctcctgggctcaagtgattctcctgcctcagcctcctgagtagctgggattacaggcgcccaccaccacacctggctaatttttgtatttttagcagagacagcgtttcaccatgttggccaggctagtcttgaactcctgacttcaaatgatccgcccgcctcagcctcccaaagtgctgggattacaggcatgagccccggcacctggccttcaaattggcttttaaagaagatgaccagctggtctgttctgtctggggccttggagggctgtttcccaggatgtgggcctttatcagtgctgacctaggcaatcaaggccaagctggccacactgcttttgattttttttaaattgtgatgaaatacgcttaacataaaatttgccatcttagtcattttggagtgttcagtagckttaagtccattcacattgctgtgcagccatcaccaccatccatctccagaactcttttcatcttgccaacctgaagctctgtccccataaaatagcaactccattttccctcccccagctcaccattccatggtctgttgttatgagtctgctactccaactaccttttataagtggagtcaatggtacctgtgtttttatgtcgggctcaaatcactgagcgtgatgtcctcacggtccatccaggttgtaccaagtgtcagaatttccttcctgttttctgctgactccctgcttttaaaggccatcttggacattcaaattgtggccattactgacagttaaaatggccccggctcatgtctcctgagcctctacaatcctttaggtggggacagtactgcggcccacacgtccccacaggctgcgtgtgacacytgacagtgctttgtgccactgtggagcaggtgtcactctcccacttctcagagaggaagccgggctctggaagccagcagcccacaaggaggcccagcaggcttcgggcccaggtggggaggtctgcacatctcagggcctttccctgggaacaaccagggacagaggccacacacccagcctcctctctgcccacagtgaattgagacacaaccccttacgtccctcccagccttaagtcaagtggaaagcaatggcccctgaggtcacttagtccctcttgccagtttrtaagtgctgaatcagagactctgagcttyggccctttcccgagktcccgggattatgagctgacacagcccccaagcaaccacagtgattccagcctgggagtgtggccttggcgggagggtcaatgcccagtcatggttcagcggctgtgcacacccctgcttacctgcatcccacgctttccatgcaaactcacgtggcggcgctttgygcttgcaggatggtctacccccagycaaaggtgctgacaccgtggtgagtaaagttactgacactgaaactgaacgcagctcaaggggctgttctgaaggtattagagggcggtttccttgatgtaaatctcagttggggctgcttcgttctctcctctcagattctcctgacatctgaattcagaggcccacatggctgtcctctttccctttgctttcwctgacttgcgtctcttgtttcctgtccctttgttstccaaagcccctgcaaaggcctgataggtacctcctacctggggaggggcagcrggggttgggtgctggggagggtttgttcctatctctttgycagcaaagctcagcttgctgtgtgttcccrcaggtccaatgttgagggagggctgggaatgatttgcccggttggagtcgcatttgcctctggttggtttcccggggaagggcggctgcctctggaagggtggtcagaggaggmagaagctgagtggagtttccaggtgggggcggccgtgtgccagaggcrcatgtgggtggcaccctgccagctccatrtgrccgcacgcctctctccatgtgcagtaggaagkatgtcctcgtggtgaccccttggctggctcccattgtctgggagggcacrttcaacatcgacatcctcaaygagcagttcaggctccagaacaccaccattgggttaactgtgtttgccatcaagaagtaagtcagtgaggtggccgagggtagagacccaggcagtgkcgagtgactgtggacattgaggtctctccttgtgttcaagacagagwggggtggcggccagccttgtcctcccagagggtagatgggaaaggtcattcatgcagcatcttactgagctcaygtgggctcgtgggctygtgggctcrccaggtcggtaaaacccagctccttctccagaggctgcgtctcacccagggatggtggcttctgctgccccctcctctctgtractgtggcyggccgtcatgctgagccaccccctcaatacaaggctccagatgtttcctgctcactgaccagagatagcaggagggggacacctgtttgctgtccttggaccctagaaagaggatgctggcagagccgtggtcacttctctgtcagatgtaggtggggcaggcaargcagttggccccagacaccaaaggaagtggctgacccacaaggccctgggactctgggccaggccagagagggagctagccaggcaaccgcagacacatacttgacttctcggcagctgtgggcagctgggccagcgacagtggcggaggccaggaatgacttactcttaggaataggtgcrgttcaagcctggagggaggaagctctagggtgcagaggcgggtgtgtggaggcctcgcgtgcagcttataatgagggagcacgtggccggcctggccataagaggggcagctgcgtggggaggcgtggctcaggccaggctgagggggagtgagcgggcgccagcctgcggcctgctaccagcctccagccacctgccctcagccctccttagtaagagggggtgctggtggtcccccatcgctgggaagaggatgaagtgagtcgcagcccgaggactcgctcaggacagggcaggagaacgtggtgcatctgctgctctragccttccaatggccgctggcgggcgggtgcaggacgggcctcctgcagcccaggggtgcrcrgccggcggctcccccagcccccgtccgcctgccttgcagatacgtggctttcctgaagctgttcctggagacggcggagaagcacttcatggtgggccaccgtgtccactactatgtcttcaccgaccagcyggccgcggtgccccrcgtgacgctggggaccggtsggcagctgtcagtgctggaggtgsgcgcctacaagcgctggcaggacgtgtccatgcgccgcatggagatgatcagtgacttctgcgagcggygcttcctcagcgaggtggattacctggtgtgcgtggacgtggacakggagwtccgcgaccaygtgggcgtggakatcctgactccrctgttcggcaccctgcacyccrgcttctacggaagcagccgggaggcyttcacctacgagcgccggccccagtcccaggcctacatmccyaaggacgagggcgatttctactacmtggggrsgttcttcggggggtcggtgcaagagrtgcagcggctcaccagggyctgccaccaggccatgatggtcraccaggccaacggcatcgaggccgtgtggcacgacgagagccacctgaacaagtacctrctgcgccacaaacccaccaaggtgctctcccccgagtacttgtgggaccagcagctgctgggctggcccgccgtcctgaggaagctgaggttcactgcggtgcccaagaaccaccaggcggtccbggaacccgtgagcggctgccaggggctctgggagggctgccrgcagccccgtccccctcccgcccttggttttagcagaacgggtaaactctgtttcctttgtccgtcctgttgtgagtaactgaagcctaggccccgtccccacctcaaatcacacacaccccctccccrccacagagacaccattacatacacagacacacacagaaagacacacacagacacaaaatcacacacacaccctccccgccacagagacaccattacatacacagacacacacagaaagacacagacacaaaatcacacacacaccctccccgccacagagacacaccattacatacacagacacgcaatcgcagatacgcccttccggccacagaaacacaccattacacacacatacacagaaagacacacacagacacacaatcacacgcagcccctccccgccacagagacacaccattacatacacagacacacacagaaagacacacacagacacaaaatcacacacacannnnnnnnnnnnnnnnnnnnnnnnnnnnnnnnnnnnnnnnnnnnnnnnnnnnnnnnnnnnnnnnnnnnnnnnnnnnnnnnnnnnnnnnnnnnnnnnnnnnnnnnnnnnnnnnnnnnnnnnnnnnnnnnnnnnnnnnnnnnnnnnnnnnnnnnnnnnnnnnnnnnnnnnnnnnnnnnnnnnnnnnnnnnnnnnnnnnnnnnnnnnnnnnnnnnnnnnnnnnnnnnnnnnnnnnnnnnnnnnnnnnnnnnnnnnnnnnnnnnnnnnnnnnnnnnnnnnnnnnnnnnnnnnnnnnnnnnnnnnnnnnnnnnnnnnnnnnnnnnnnnnnnnnnnnnnnnnnnnnnnnnnnnnnnnnnnnnnnnnnnnnnnnnnnnnnnnnnnnnnnnnnnnnnnnnnnnnnnnnnnnnnnnnnnnnnnnnnnnnnnnnnnnnnnnnnnnnnnnnnnnnnnnnnnnnnnnnnnnnnnnnnnnnnnnnnnnnnnnnnnnnnnnnnnnnnnnnnnnnnnnnnnnnnnnnnnnnnnnnnnnnnnnnnnnnnnnnnnnnnnnnnnnnnnnnnnnnnnnnnnnnnnnnnnnnnnnnnnnnnnnnnnnnnnnnnnnnnnnnnnnnnnnnnnnnnnnnnnnnnnnnnnnnnnnnnnnnnnnnnnnnnnnnnnnnnnnnnnnnnnnnnnnnnnnnnnnnnnnnnnnnnnnnnnnnnnnnnnnnnnnnnnnnnnnnnnnnnnnnnnnnnnnnnnnnnnnnnnnnnnnnnnnnnnnnnnnnnnnnnnnnnnnnnnnnnnnnnnnnnnnnnnnnnnnnnnnnnnnnnnnnnnnnnnnnnnnnnnnnnnnnnnnnnnnnnnnnnnnnnnnnnnnnnnnnnnnnnnnnnnnnnnnnnnnnnnnnnnnnnnnnnnnnnnnnnnnnnnnnnnnnnnnnnnnnnnnnnnnnnnnnnnnnnnnnnnnnnnnnnnnnnnnnnnnnnnnnnnnnnnnnnnnnnnnnnnnnnnnnnnnnnnnnnnnnnnnnnnnnnnnnnnnnnnnnnnnnnnnnnnnnnnnnnnnnnnnnnnnnnnnnnnnnnnnnnnnnnnnnnnnnnnnnnnnnnnnnnnnnnnnngcagcccaaattcagcgcctggggcataagttcctggaggggtggccaccttcagcccccacggtaaggtcctgaggaaccttccccttagacaagggatcatggaggaggtctcttccggagcctggagggaggcctcaagtggtccttccacctcggcatcccaaagtgctaggattataagcatgagccactgcacctggccccaacatcatttattgaacagactgtcgtttccacattgtgtttcttggcatttctgtcaaaaatcagttgacygtaaatgcatggattcacttccgggctctctattctgtttcattggtctgtttgtttttatgccaataccatgatgttttgattattatagctttatagtatatcttgaagttaggtagtgtattgtctccagctttgttctttttgcttaagattgctttggctatttaggggtctttgtggccattactgacagttaaaatggccctggctcatgtctcctgggcctctacagtactttaggtggggaagtactgtggcccacatgtcccaacaggctgtgtgtggcacctgacagtgctttgtgccactgtggagcaggtgttactccctcatacgaattttaggattattttatttatttcagtgaaaaatgtcaatgaaattttgatagggattgcattgaatctgtagattgtttggggttgtatggacattttaacaatattaattcttccaattcatgaacatgggatgtcttttttttggcacctgatctcagatatgggacagctttctaattatttgtatcttcaatttctttcacaaatgttttatagttttcagcatacagatctttcacttccttggttggatttatttgcaagtattttttgtagctattgtaaatgacattgttttcttgatttctttgttagggtatagaaatgctacagattgttgtatgttaattttatatcctgcaactttactgatttcatttattctaacatcttattggtggaatctttagggttttctataagatcatgtcatctgtaaacagggacaatttaagttcttcctttccaatttggataccttttatttcttcctcttgcctaattattttggctgagggccaacttgttgggtttgttgttgttggtttttgtctgtgtcttttggtgtttcgtgttgctggcttttccagcacacagtcgcagatatatgaggcagaaagaaaacccagggaacgcctgtcatgtcattcctcaggtcccaaggtccctacatggtctgccttcttctctccaccttttagtgtttggcatacatacgtttatgtatgtagttatatatgtatgtgtaatacccagggaaatatacagggattttaactgtccttagtgtagggcgtggggacaggtgcatctattctaccttgcctggaagtggaaaaatcttcaagaaatcaatttatcaccaactggcatgacagaactcctggtttnnnnnnnnnnnnnnnnnnnnnnnnnnnnnnnnnnnnnnnnnnnnnnnnnnnnnnnnnnnnnnnnnnnnnnnnnnnnnnnnnnnnnnnnnnnnnnnnnnnnnnnnnnnnnnnnnnnnnnnnnnnnnnnnnnnnnnnnnnnnnnnnnnnnnnnnnnnnnnnnnnnnnnnnnnnnnnnnnnnnnnnnnnnnnnnnnnnnnnnnnnnnnnnnnnnnnnnnnnnntggttcttcctgactccaaaagccaggcgccaccccatgctccttcccagcagaagctggttttcaccgggtcaggaggacaggatggctattcctgaccgttgtacagcagtgccacatctcctagtttccagaacatttaatgtgttgctgtggaggcctggcagctctgaagtagccccttgcgcccaggacaaaccgggcctggaggggtggggtggggtaagctgaagcttccagtatcccacgtgggcattctgttgctgagggcaaccgcccctccctgcaagggaggggaaggagcaggcaggcacacccktcctccctccacatttcactggagttgacctgtgtcctactgtggttgcacctggaccagcccagagggactggagtgactcttcccgcaggtagggcacagccagcctgggcacagggcctcactgcaatccctgcgccccgcctccctgggggatttccaggggttgtcctgctgcttggtgagctgggggtgtgggggaccacagatgaggcaggcgcctaaattgcttgggcggagtccggctgctctctccctccaggccctttcctgtgtcctcgggcccctcgggtccctgcaccaggccagcagcaatcgggtgtcagaggttcaagtccaggctgactcctsggacgcaccgactttgcccaggagggctggggagagggcagccccaaagtgtcatctttgattattctttgtccccaaagccagccttgggcatgtgcccagcacagggagagctgctgcctccgtgggcttgagtcatttttgcttccttgcccctctctgctctgtttggtttaaaaaacaaaaaccaacacccatgggtgaggcgaggcgaggcgaggcttgccttgatccacccgcttcctcccctgcagcctcgggccccatcctcccgcgtggccgcactaggggtgctgggggcggagtggggaccagacctgagtgggttctgggttcagcttcgcagcaggagcagctggggcatcatcagttgggcaggtgacccaggatctgaagcaggaatcttccaggtggaggtggggccgcccctctgcttgccacagctgccttctgctctgggggcagcactggctgagaatccagtgaagtaaggcctttgaaatggttttgattgtaaaagtaatgtttatgtttagccattcctttttttattttttattttttgagacgggtctccctctgtcacccaggctggagtgcagtcgtgaaatgtgggctcactgcaacctccacctcccaggttcaagtgattctcctgcctcagcctcctgagtagttgggattacaagtgcctgccaccacacctgactaagttttgtattttttagtagagatggagtttcaccatgttggccaggctggtctcaaactcatatcctcaagtgatccaccctcctcgtcctcccaaagtgctgggattttgccatgagccaccacgctcagccatgtttagccatttttaaaaggtgtgaacagataattaagtctattagcaacattagaaaatttaagttaaaatttaaatgactctagcaagaattagcctttaggtgccctgggtccccctccccacckccccccaccccgccgccttctgagaagcgttttgtaatttttcttatttataaaatgggtttgattcaaaactgacttttcctcttcacagtctcacaggtccttccccaggtccaagaggctcttctgtgtcctgatgacaagtagctgcctagccgtggtggcacctcctatcacatgttaagggacccctccccagggccacacctggcagaaggtggcttatgatgttcgcagcttgaaagtagtgtaaaccaaagataaaattctaagcccactcccccagccatcggaatggacccctcctcttggccagggcactccaaagttaacctgaaaaaccggttcaggctgtgaagagaaggtggagtggacatgcctcatttatgtcctcctcccttttggaattcagcaaagctgaccagcatgaacattaacacagaccttaagtctgattagtggcatttacaatctatactctctgaagcgtgctacctggagkcttcctttgcatgataaaactttggtctccacaaccccttatcataacctagacactcctttctagtgataataactctttcaaccaattgccaataaaaaaattttgaatctacctataacctggaacctccccgctccaccttcgagttgtcctacctttctggacagaagcaatgtggatcttgcatgtatttgattgatgtctcatgtctccctaaaatgtatacaattaggctgtgcccagatcaccctgggcacatgttctcaggccctcctgaggtctctgtctcgggccattggtcactcagattcggctcagaataaatctcttcaaatatttttcagagtttgactctttttgtcgacaataagctcatcagattaaagctgttggaactttaaattacttccagccttgaaagaatgtgattctgacaccctagtcaagcagcaagtcgctgtgaactttgcttctccaattatagattaacgctcttcctttcttgatttgtaaaatgttatgaaagactaaatggcaccagatgtaagaccccttccctttcttagttactgaccttttgttacgaattaacttctttcttttcttgcacccaactcagaccagatggtacaaaagaccccatgcctatcaaattccataagacagtatgttaaatatacttttcccgaagggaacaggatataaccaaacaaattgctgcaactcataagccaatcttatgtggaaaatgtaatcatgctaaacctccttgtattttcccatttaagtgaagcccaaatccctccacctcagagcactgagcccattcctttagagtctgtgttttttgagtggtggtcgtcaaacttagagttcgaataaactctataacattggattttgaacctttcaattatttcaggtggcagaagaaacacacagaccccatctcttcctttggagttctgtactgctcatttcaaagggatttcatcctgccctctgtaaccacccaaggggttcctcctg

SEQ ID NO: 95397 - DNA, 31839 bp, Homo sapiens
  misc_feature (1)...(31839): n = A,T,C or G
aagtaagacagcttgctgaagatttcctgaaagactatattcatataaacattggtgcacttgaactgagtgcaaaccacaacattcttcagattgtggatgtgtgtcatgacgtagaaaaggatgaaaagtaagttttattaactctgttatatttgcttcctaacaactttgctgtaaaattgagggatcattgtttggtgagttgttttaggttatttcagttggtgtgatttcatttagttagcctactaatcctgaaaatttcttgaatccttcaaataatggctgtcaccatttatagctttcctatagaaggaattcatgtgtcccctggttgacttaaggaccaagggtcgaactgctcgataagtggattagcaggcgtttcctctttgacttccagccatgtaaattgaacttaatgttttgctgaccataaatgtgtggccctagcaatggtcttttaaaactcaggatttttcctttctctctcctattattagacttattcgtctaatggaagagatcatgagtgagaaggagaataaaaccattgtttttgtggaaaccaaaagaagatgtgatgagcttaccagaaaaatgaggagagatgggtatgtgtgagctcctccattgaagcagattgattaaaacagcttaggaaagggcaaacttggatcacgagcagtggatttttttcatatctgatagtgaatttaactttttcatttctggcgaaattaaagagatctgtgaccaaaagtggtcaagcactggagtctgaggttttcaatgtgagtttaataacacaacttgtcttttaacttaggtggcctgccatgggtatccatggtgacaagagtcaacaagagcgtgactgggttctaaatggtaaatatttcaaatgaagtatttttcccccttacttaacctagctagaattctgctcagataattgatcatgtatatgccttcctttgtagaattcaaacatggaaaagctcctattctgattgctacagatgtggcctccagagggctaggttagtacaaactcgcattcatggcttggtttcccagaagatctccatttaacttttttaaagaaagtttattgctttctttaacctgcattttttctaagttttttttcacataaaggtgctgtctttgtggcaaggcctaggcatgacaatcggaggactcgagggggatggaggactagtgatcggctggctgcttccagtcgattagagaggtgaaaaagctgaacgtgtgccagtaatcttcaaaaggcagaacatatcacctctgccccgtaaactgttctctccgagggaaaaaatggaagttatcctcacagttcactgccgtggtatttcttctgtcccatgctttgcatgactgccatggtacagccttgtttcaaactgttcactgtgatctgtgggtctttgagtttcagtgagtttgctgaaatgtcgaagaagtagttccaaacttcaatgttcaatgaaatttttgttcaagtttgaaatggagagagcagctttaaaaggtactaagccttttacaaattggtgagtactggcacatgagatctagagcaggagcaacttctcacacatagtaagtgggaaaagaaagtgctttgaaagttcctccctcacctacacagtagtcgtcatgtcgagacctgccagagagagacacattctcaagtgaatcctggcttcttggaagcgcttgcctagacgagacacagtgcataaaaacaacttttgggggacaggtatgttttcttgcagctgcggttgtaaggtcttggcaagacaagcagtgtggccagaattttgaacttctgatgaatgtgtaatgcaaaggaccttgtacatttttttgtttcaaggtcctcaaaatgagcacatgaagaggttgctgtgaaactttaagtggccctactgcgcagaagcattcagatgtcacttgatgatctgtaagggaacttgctgatttgggaatgtgcttagggaacacacattccttttgacagggtctgtcactgggtgggtgatgaattatacagatgacatgtgcttttttttcttttttcaacctcaatggtattcctacaggaaatggataaccattttaactgtattttttgcagcccgtaccttcttgggaatacaattgtctaactttttatttttggtctggctgttgtggtgtgcaaaactccgtacattgctattttgccacactgcaacaccttacagatgtggaagatgtgaaatttgtcatcaattatgactaccctaactcctcagaggattatattcatcgaattggaagaactgctcgcagtaccaaaacaggcacagcatacactttctttacacctaataacataaagcaagtgagcgaccttatctctgtgcttcgtgaagctaatcaagcaattaatcccaagttgcttcagttggtcgaagacagaggttcaggtaaggatgactgataggaaatgttggtagttacgagtcacatcgttgtctacaaatccatttaaatggtattggagggtgagtaaaaccttgaatgtgaaaacttaagctgaaaaattgtaaaaacatttcacgcctaccatgaatagatctgtttctttctgtccacaatgatttgtgtcatagacataattgatcaatttgcaattgttttcttgacaggtcgttccaggggtagaggaggcatgaaggatgaccgtcgggacagatactctgcgggcaaaaggggtggatttaatacctttagagacagggaaaattatgacagaggttactctagcctgcttaaaagagattttggggcaaaaactcagaatggtgtttacagtgctgcaaattacaccaatgggagctttggaagtaattttgtgtctgctggtatacagaccagttttaggactggtaatccaacagggacttaccagaatggttatgatagcactcagcaatacggaagtaatgttccaaatatgcacaatggtatgaaccaacaggcatatgcatatcctgctactgcagctgcacctatgattggttatccaatgccaacaggatattcccaataagactttagaagtatatgtaaatgtctgtttttcataattgctctttatattgtgtgttatctgacaagatagttatttaagaaacatgggaattgcagaaatgactgcagtgcagcagtaattatggtgcactttttcgctatttaagttggatatttctctacattcctgaaacaatttttaggttttttttgtactagaaaatgcaggcagtgttttcacaaaagtaaatgtacagtgatttgaaatacaataaatgaaggcaatgcatggccttccaataaaaaatatttgaagactgaattaagtggaaattgtactttattttatataatgtcatgtaaaactttgcttaagatggtctggttttttttttgtttttgtttggttttttttttccatgaaaacaaatgactgttcctttttatttaatttgggaggcagggggaatcagaaggcccttctttataatgagctattcatattgcaggagtcagaatgaattgatacaggtgaatttttagttacaggctaaattgcataaaagctttgtcagcttccagcatcaggggagtcatttaatagcctttttccttatttgctagtatggttaaatgagaaaatagtaaaatagatacaaagtcatctatatagtgtgagaacgtgggtgactttttcaaagtttataatttaaaaagctccaaataactggctttttcaagagacttatactcatgctcttggctatactgtgaattactgaaatgttgaacaaacctgtgaaagacatacattagccctttaagatggccaggagctaagcttgagtctcctttactgaatttcgttcttagtgcaggttacttgtagattctagtcttcacaggctccctggggctcttaactagtcacactgggagtcatgaatgtctttccaataattcagggaattctagagatcctcaaactgtaaggtctattcatactcaacacaaggaaaaaacctcattaaaattaatgactaatcaggaggcaacgtaaccaaaagcacagtgaatgaaagttttcatggtaggttcaacatgggtttattgctagaaagatccaggggatagctttaggtttaacttcggctcaccaacgtaactttctaatcatttatttcagtaatagctagaagtgggtctgaatgttttcccagagtctgatacgtgtttttttttgccagaagagaggtcttcaggagacttcatttaaattctgattattaaactgaggctttaattgatgttaatgccttatgtcaaatgtaaagttagaatttgctagggctgggatagggagtgatatttctaggacttagacattgaaaactaattcagcctgtagtaacctggatggttttcaatggcatggttagtcaaattcatggttttaaacttagaagcagctttcgggggagagggtaggttggagcatttattacatattttactgtttaatgtcttaaccgtgggccttttaatttgtaaacactgaaatgattgttgggctgtggaaaacatttacctatttaccttggaagttttaaaagacagtccactttttagcatgtgtgttgtgtccagcctgtggtcgtcttaactaataaatgtgatttttctccccattctctctttttatttatttgcgtataggccttttacctggtgtgagttcctgaatgtggaaaacacctggcagtagtacccagctttgcagttaattactatctagctggcctttttttaaacccttgtatacacttgtaaagaagaactatttcctgaacctggtacagcactttactaatgataaaactttactcctgaattacattaactcaattgctaagctgttacccctcttaatcaggtagtagtttggtagtctcacagtgaaatgtagattgttcctttttccctgaacctctttaaaggttttcgtaactgaggctggtataagaaatcatggactttggaatcaaacttcctcagtctgggtataccacttttccactttctgggtaggtcttaaggtctcgacctatttaaatagaaactgcaaaatcagaaacctgcaatttaatcatgagtctcttaataataacagtcacaagtctcattgttttgatgaacccatagaaggggcccctggaagaaattgcacgtacgtggttttctctgacaccaggagggtttaagacatgtcagggccccttggtttatttctagtgcattcccaggtgaggcagatgctgctggctggggactgccctttggaagccactgcaatatttaaagtgaccataccactaccctagtcacgaagcctatcgcccccctccccggaagcttaagcgtcaagacaacggctctggggttaggcctaggccacctggcggcagcatttgcctagttaagaaggcctgggcttacaaatcaccgtaaaggactaaaactgtttaaagggaaaccaaatgccaaatttagtccaagtgcttgattgaggtgtatatagaaggtgatttggataatactgaagtattttaattttctggactgcaaaacagtggcagaaggaagtgactcaagtggctacaccacggttataaataggtgggaataacctttactggtgcttacgaggaaagaaaaaagtcaatctgaagggaggggcgcgacgcgaacggcaagctagcagagaaccatccgagccggcgtccgccatggtgggcgggggacggctgcggccggaacgcagacatgcgcttccggggtggggcctgccgcccgcaagcacgctcacctccgttgcgcctgcgccgtggcctcyccggattctgttaacggtagtggtggcttgttgggatccgttgagtgatgggagagtgtgctctttaacttcggagagagatgcgctctcgtgtagccgtcagggcctgccataaggtctgcaggtgcctgttgtctgggtttgggggtcgagtagatgcggggcagccggagctgttgacggaaaggagtagccccaaaggagggcatgtgaagtcgcacgcggagctcgaggggaacggcgagcacccagaagcccccgggtctggagagggaagcgaggcgctgttagagatctgtcagagaaggcatttcctaagtggaagcaagcagcagcttagccgggattctcttctgagtgggtgccaycccggcttcggacccttgggcgtagagttgcggaagaacctggccgcagaatggtggacctcggtggtggtgttcagggagcaggtattcccggtggacgccctccaccacaaaccaggccctttgctacccggggacagtgccttcaggttagtttctgcagaaactctacgcgaaatcttgcaagacaaagagctgagtaaggaacagctagtarcatttcttgagaacgtattaaaaacttctgggaaactacgggagaaccttcttcacggtatgcttcacgatttcatgcttcaaaacaggtgtcgggtggaaaggcgaggcagtcttgctggatcttggggattgcaactggccctgtattcccatgcaaggaagttagytagttctcatctttttgaagtagtcggatatattaacagtgctctaccctggagaaaactggtccatggaatcattgctgttccttaaacaatctgtccgaaggacctgggaacgctctcaatttcacggggcaacttctgaacacagtgctgtcatttagtgcaatgtagtctaagtgcataaggaactacacagacattttgaacttttcttagatttattctaagtaaaaatgttgaaattataattctgaaactatttcatgtatatcataggataaatcaaggccaggcgcagtggctcacgcctgtaatcccagcattttgcaaggcagaggcgggtggatcacctgaggtcaggagttcgagactagcctggccaacatggtgaaaccccgtctctactaaaaagacaaaaattagccggccgtgacggcgagcgcctgtaatcccagctacttgggaggctgaggcaggagaatcgcttgaacccaggaggcagaggttgcagtgagccgagatcacgccactgcactccagcttgggtgacaagagcaaaactccgtcttaaaaaaaaaaaattcaaatagttgggttagttgttattaggaaccaagatattcattgtaaaagaagagataatatgtaaaagaaggtacgtataaactaatgttaaatatggattggtaaattaaatatgaattggtaaattaaaattgaatatgggtctcactctgtcacccagactcgagtgcagtggtgtgatcatggctcactgcagcctcgacctcgggctcaagtgaacctcccacctcagcctcccaagtagctggactacaggcacatgccaccacacccagctaatttttgtgttttttgtagagatgaggttttgccatgttgtccaggctggtcttgaactcctgagcttaagcaatccgcccatcttggccccccaaagtgctgggattacaggtgtgagccacagtgcccagcctcatgatttttaaaaatatatttcctaactttcttcgtttaaagttcctagaagcaatgaccctcagtagcaatgagcacacctagtgcccagatcctggttcctttttttttttttttttgagacagagtctcgctctgccgcccaggctggagtgcagtggcacaatctcggctcactgcaagctccatctcccaggttcacgccattctcctgcctcagcctcccgagtagctgggactagactacaggcacttgccaccacgcctggctaattttttgtatttttagtagagacggggtttcaccttgttagccaggatggtctctatctcctgaccttgtgatccgcccgcctcggcctcccaaagtgctgggattacaggcgtgagccactgcgcccggcctccagatcttggtttctaagatgaaccagtactgggagaaatggctgattccgggtctggggttagggaaagtacaaggtgagtttgaaacactttatggtgctaaaaagcaaagaattgcttgaagactaatgggtcatataaaaaggtcacagatgctggcttgaggagggttgtcactggccacatctaggacaaattgaacattaagatacatattaatggtaatggatcataacacattgactaaaatctaagagtcaatagtattaatcaaaaacaaataattgaccctagaggtcgggggcggggggaagaggtagagaaagcttatgtttttacagaagctatggaataaatgtagaaggaaagatacattagaaaattcaccatttcatgatattgcaaaccccgatatcattgattcaagcaacagtcatcaatggattctaaaatactgggtgaaatactgttggggagcaggatattattggggagtggatatttactaccttaaccaagtaatcaaatttggtgtcttcagtagtggaataatttgataacatgttcctcatgttatgatgcaataagatacacacatctactatgtagtattttgctaaaaatgattagccgaaattaaatcataaggaaacaatcagacaaatcccaaatgtgagacaatctatgactaacctggactcacatcaaaagtcagtgtcattaatagcaaaattaagggggaaaggaggcaagggaaatgttctagattcaaatggatgaaagaaacctactcagaatgcagtacatgaatcttaactggaaagagaacagtaaaagatatttggggtgaaaattggaacaactaaaatatcaccatatgttagattatattgtggtattatggttaactttttatggtgttataatggtatataggaaatatttttatttttagaagatgtatgcggcagtatttgggagtgaacaagaaaaaaatgtggcaaaatgttgataattgatgaatctaggtaaagggtatacaagtgttcattgtatatggatgtttattattttttcaactttcttatagatttgaaaatctttgnnnnnnnnnnnnnnnnnnnngcaaatgataccactctcttcttcagataacatgttattctccataagtttcttcctgttgaccttttgatgcaaaccaggcttcccatagctgtcttaggcagcaactagttggctgatttaatacttcctgacagttcatgtaaacaacaggtccagttgtctcagacaaattaaccaaataagattcaacagtaatatttttaattaagttatggtgttgaggcaatcagacccttacaatctttaaagtgtctttttttgttcaattttaaaactatgaggccgggtgcagtggctcactcctgtaatcccagcactttgggaggccgagttgggcggatcacgaggtcaggagatcgcgaccaacctggctaacacggtgaaaccccgtctctactaaaaatacagaaaaaattagccgggcgtggtggcgggcgcctgtagtcccagctactcgggagggtgaggcaggagaatggcatgaacccgggaggcggaggttgcaatgagccgagaccctgccactgcactccagcctgggcgacagagcgagactccatctcaaaaaaaaaagaaaatcttcaaactaaaaactcagggtgaaactacctagaattaagtggtgatctgtctttttttgtttttttttaagacagggtttcactctgttgcccaggctggagcacagtggcaccatcccagctcactgcaaccttggcctcccagactaaagtgatccacctcccagctttccaagtagctgggactacaaggcacacaccaccatgcctggcttatttttgtatatttttagagatggggttttgctgtgttgcccagtctggtctcagaactcctgagctcaagcaatctgcccacctcgacctcccaaagtgctgggattataggcgtgagccaccaagcttagccaacatctgtctttatgctgtgttaacgttattactactattaatgtgtctattgacaaaaatgatttgggtttgtggactagatgtatacaatgattgatttatcttttgacaggtgccttggaacactatgttaattgcctggatctggtaaacaagaggctaccttatggccttgctcagattggagtgtgttttcatcctgtttttgacactaagcagatacgaaatggtgttaaaaggtataaaaagtggcaaataacttggccttgtatttaaatagtcaaaaaccagtcatttccacttgggataaattatataattttcagataagctaacttcctgatacgttttatatctaaagtattggtgagaagactgaagcttcgttagtatggtttactcctccgagaacttcaaaccagtggcttgatttctggttacgtcatcgactccagtggtggagaaaggtactgcaataattacctttaatttaatagttaatacataaattgtcttaatgtgtcagtggtaattcttctgacatacaagaaattatatttgatgtatgtagctattaatatattatacaaatacaaaaactctttgtaacaattttcattgttctagattacaaagttactttggtaaaaacatttgttgggctcagatgtgtttgttaattagcctttctgtgtaaggtaaaattcaaagccctcacctagcattcctggctgatgtagagtttgacccttgaccattgtcacagcttcagcttttgctacctacctccatgaactttccatattagtcaaaatggctctgtaattgatgatcaagttttagtactcactgaaaaaaaaagagttgaagtaagcatttttgtcttgccatgtgttatgttaccatttcccgactcaaacatccccaaatacccatttaaactgtatgaaataatcacgagtcatcaagaacttcgcagaagggtaagaatgaggactatgtgatactttcttctttatcccactttagtcatggttaacttcccctcttcattggccataaaagtctggataacatcaacagttttttctctgtagttctttcctactaaaaaacaatatgttaagcaatatactcagtattttcactttttattttattttatttttgttgtctgtttttggttttttttttgttttttttttttcacaagtaccagtcatcttttatttggaggttaattcccattaggatatgaaaggattcagcaacaatcgagattktgttgcttatggaggggttgcagccaagaaggttgctgggggagtgcagagcatgtcttcttcagtggtacttgcatagccgctcgtgcttgagctccttgtaggaaaggcrgtagatgaagagcatgtaccctgccagcaccatggtaaaccccgagatgctccccttcttcacgttgatgtacytgttgtagtaccagtagtaacctctttgaaaygctccatcaaggccactagggctgaagtcccacatcaagatccagcttggcagctcccctagtttgacctccagaagtttcttgtccttcactggtacaactgactccatcttggtttttttagagacatagtctcactcttttgcccgggctggactgccgttgcacaatcacagctcactgcaacttcttttattatttgtagagatgaagtcttgctctgttacccaggctggtctcgaagtcctaagctcaagygatccccctgcctcagcctcccaaagagctggcataacaggcgtgagccactgtgcctggccagtattttcactttttaaaaattaaatttcagcaacctgtggtcccarctactctgaatcctgaggcaggaggattgcttgaggccagcagtaggaggcagcagtgagctatgattgtacctgtgactagccactgcactctaacctgggcaacagaatgagacacatctcaaaaaaaaatgtaaattagaataaactttaaaatttgtattcgggacttgactagtttcgcacatttgctgaataaaaagtatcggacaatttaaattcttacagataattatgggagttaaattagtgtttatttaaatatgttaagacaaacttaaattttcttttccagtttgccatgagtccatctaacttcagcagcagtgactgtcaggatgaagaaggccggaaaggaaacaaactttactacaattttccctggggaaaggagttaatagaaaccctgtggaacctaggagatcacgaacttttacacatgtatcctggcaatgtgtctaaattacatgtatgttttacctggagctcctatgtattttttacccagattctctataatcatttccgaaccatttgagaataaggtgcaaacgtggtgtcttaacacttcattgtgtatttttcagatgcagagacactcacctacataactacaatccagtcatcaaaatcaggaaattaacagtaatccactattgccacagagccctacaaattgaactgattatctcaataatggcatttataggtccaagatcttgtctttcatgtagttgtcatatgcctttacactccttcaaatgaacaattcctcttgtcttgcgtgaccttgacatttttgaagagtacagtctagttaatctgtagaatatgccttggctgggatctgtctgctgtttccacgtgatttatgtatttttgtcgggagtactacagaagtggtagtactgagaagctctcttctcagtgtgtcatatgaggagtgttactggtgatgttaacttttatcatttagttaagatggtttctactagatttctccagtgtaaagctaataaatagtttgtatttattaattaacggccaggcgcagtggctcacgcctgtaatcccagcactttgtgaggccgaagtgggaggatcatgaggtcaagagattgagaccatcctggccaatgtggtgaaaccccatctctactaaaaatacaaaaattagctggatgtggtggcttgcccttatagtctcagctacttgggaggctgaggcaggagaatcgcttgaacccgggaggtggaggttgcgatgagccaagatcgtgccactgcactgcagcctggcgacagaacgagactctgtctcaaaaaaaaaaaacaaaaaaattaactagtaattaataagtgttgtgggcagatactttaagatgatgcagacaatttctttgtcaccaaattttgccttactggttgcagcatccattgatgattcttgcccagatcagttactaatgtgaggtttgccaaatggtgatttttttttttctttatttgagacaggatctcactctatcactcaggctgaaacacagtggtatggtgatagctcactgcaacctcaaactcttgagctcaagcaatcctgcctcagcctcccaagtagctaggactacaagcatgtatcaccatgccckactratggtttaatatttgtagagacggggtctagctttgttgcccgggctggtctcgaactcctgggatgaaacaatccccctgcctcagcctcccaaaatgcttggattataagaatgagtcaccatgtttggccatgtcaccaaattttgccttactggttgcagcatcccttgatgattcttgctcaaatcagttactacgatgaggtttgccaatggtgtttttttccccttcccttttttttttttttaaaaaaaaacaaattccatcattccttctagatttactggtcagcaatatactgtagagcttttccttctcctccattttttttttaaattggtatttcacagattactttctcagggggttacagtgtgttactgtcattatttattttgatggtcaaattgtcctagacttggccagtgtccttttgacatatttccatcattgtcttgacgagcacttccttaccttttgtagcaatatattgttccaggatcatcagtgagccaagactgtgctgctgcactccagcctgtgcaacaggatgagaccatgtctcaaaaaaaaaaaaaaagaaaaagaaaaaatatatagcaaaaacataggagtttatatataatgagtagaaagtagattaatttttatttttttattttttgagacagcatctcactctgttgcccaggctggagtgcagtgtcgcgattcccaggttcaagcagttcttctgcctcagcctcctgagtagctaggactataggtgtgcgccaccacgcccggttaatttttgtatttttagtagagacagggtttcaccatattgaccaggctggaatttttaaatatgaataactaatgaaaaactagaaggcttattaactggtgaacattttcctttaactccaccaccatcacacttcattttggggtactcagctctcaaatgaaacttattggttattatcatagttaacgaacagctcaaccttgtgactagggatttaaagatgatttttgtattgtggctattagtgtcttattttgttcttttttttcttttgtatgaagaatggggtctcgctatgttgcccagtctggtcttgaattcctgggctcaagctgttctcctgcctctgcctttctgagtgctaagattacaggtgtgaactaccatgcccagattattttgttcttttattggtatcattttcactaatgaagagttttcctattgcagaaatttttctcttccatgacattgttccttttctgtttccagagttcacaaaattatttatcattagttgaacatgttataaaatattaagtagaatttctgtcatttagtatgctttcttgaaatgtttctgaggccatttctttctttttttaaaattatttaatagagatggggtctcgctgtgttgctcaggctggtcttgaactcctgggctcaagcaatcctcctgccttagcctcccaaagtgctgggattataggcgtaaaccactgcacccagcctcttaggccattttgtatctgtttttagttgattttatggttaatgtccaaatatattttttagagaacagtgaagcagaccaataaaggctgaagaacagttaggatagaaaagaatttattctggatagtgtgagaaatcagatattgttggaagagttgccaccagatatcctgacattgttggatatccaattttcaaaaaattagaaaacaataaacaatcttttttgtttgttttaaatagggatgggatcttgccatgttgcccaggctagtctcaaactcctgggctcaagtgatcctcctgccctggcctcccaaagtgctaggattacaggagtgagtcactgtgcccagcctaaagcattcttcataaagattcagatttagattttgtttgattcaaagcgcaccacagaatctttcagtacttgagtttgtctttttttttttttttttttttttgagatggtgtctcactctgtcacccaggctggagtatagtggcacaatgtctgctcactgcagcctccacctcctgggttcaagtgattctcatgcctcagcctgctgagtagctgggattacaagcatgcaccaccatgcccagctaatttttgtctttttagtagaggtggggttttaccatgttggccaggctggtctcgaactcctgaactcaagtgattcgtccaccatggcctcccgatgtgctgggattacaggcatgagccactgctcccagcccagtttatcttattaactatcagttcgacgataactgtgtgaaatacaactggtagaatagagtcccaggtatcagaaagtttactgcctttgagggcaaattcttgtgaatctttaaagtatcatatgcaattcaaataggtttaaaatgtcagtacatatatgtattaatgaagactgtggttgatcatgaataattaacagaagctgaggatttaaatttgtggggttttctctcttttttttttgttctgtgactctagctaaaggtggttatttaagtatttttaaaaattacatgaatatccaggtgaacaatgatttacaaaaaaagaaagatgaaagtggaactgtttttatccaaaacttaagaaatttctaggattgaaatttttaagaagtttgaaatgattcctcttcagtttagagaagaagtaagtctgtttatcaatacttaattcatatcatgtactatgtgtagtttgttttcataattatggctttaatgcaaaaagtaagtttttgaaagatttcttttttatgaaaataactttacgtttcagaaaattatactccaaacccctttccctaaagcacaccatttttttccctaaggcctcttttgaataatcagcaaacaatttttacttaaaagtgttacctttcgaggtagggcgcagtggctcacgcctgtaatcccagcactttgggaggctgaggtgggctgatcacctgaggtgaggagtttgagaacaacctggccaacatggtgaaaccccgtccctactaaaaatagaaaaaaattagccagacatggtggtgtgtgcctgtagtcctagctactcaggagactgaggcaagagaatcacttgaacccgggtggcagaggttggcaatgaggtgagatcatgccattgcactccagcctgggtgacagagcgagactctgtctgtattaaaaaaaaaaaaagtgttacctttctgaatactaactctgagctcggaagcattaaagaaatagtctgtagggctattgaaaaaattgatgcctaagtccctctccagttgagttcgttcagaatctctgggatagagcccaaccaagcaccatagttttaaaattcacatttgggcctcgctgatgaaacactgagctcagtgagagcagagaatgcatctttatcgtcttcgtgggcccagtgcctaccacaggcctggtacagagtgggtgctttgtaaaatgaaaytttacttttgtattctgattgtgtaagtctaaaatatgtactcaggaggctgaggcaggagaatcacttgaacctgggaggcagaggttgcagggagctgagatcatgccactgcactccagcctggccaggtgacagagtgagactccgtctcaaaaacaaacaaacaaaaaaagttctgtgaaatgattatttttcttctgtttttctgtgaagggccgagatggacgaaaaaatgtggttccttgtgttctctctgtaaatggggacctagaccgaggcatgctggcctacctctatgattctttccagctgacagagaactcctttacaagaaagaaaaatcttcatagaaaggtgctgttgatatttcagagatagacttgggaaactaaaaatatgggtttgtttrttcttaatgttagtgtgctcggtttctaacataaactctaaataataaatttagtgcatgtagtctaagtatttttcagtttttttagaatctggccacaggaataagaatcaggttctcacagaatagaacaaggcatccctaataagtaatcccaaaggcatttctgtttaattgtgaacagacagctatctctatgactcctagcccctgaacctttccactgtgggcttccatttgtatcagaagctgaagcattggtacataggaggaagaaagacccggatcagggagacctgtgctattgacctctctgccccaggtgtctggcttctggtcttgtgccacatggctggttcctggatcagaggagctagatgtgggcctggaaaggctgattttagtgcatgaacatgcacttggagcatgtttatgggtcaaagaaaatcgagaggagaagttgaagttataggagagaaaagaaatgattaatggggcaagatgaaggaaaccggaggggtcaggatgggatcaagagcccaagtagaagaatgtatcttgaaaaggagatatttgaaacagcagggaagaagaaaaaggatagtgagatataaaaaggctactgggctttttggtctttgaaggacattttactgatgccctctattttctcagggagttaggaggcactattagtttaaatgtggaagagtgggggtttaaatggcacgagtggggaatagtcatataccctttgaacataaaaggaagctgccccaaatcaaaagttttaacaaataatgttgagtgttcagctgggattgggaaccatgagtttgtaggaaaccactcttcttagttaagtgatttattatacagtgttcatttagcctgctataaccatagagaagtctgattatagaattattctggggaatggggtttataaatggtttgtagctaacaaaaaaaggaatcctttctttttcttacactccacttccaaaccatcagcaaatcctgtttgactctaacttcaaaacgtatcctgagtctgaccacttcctagcctgtctactgctaccaccctgctataagccaccgccactcctcctcccctgatagagtggccctgttaaaaggtgcatgttgtgttgctcctttgctcagaacactccaggaaagcttctcatctcactcaggaaaaaccgaagccctctttttgatctgctgttctccacctcactcagtctgctccagcagcactgaccttgctatttctagaacatgctggagatgctgccagctcagagccctgtcatttgtattccccattgcctagagtgctctttcttcatcatccatgtctcgtccccccaccttctttcgagtgtttgctcaagtgtcaccatagggagagaaccttttctgaccaccttaaagttgctgaaaacctcccccagcctgcctcttgccagcatgttccatcttcttccttttttagcacctaccaccttcacatatattatttacttatttttattgtctgtttctccctgccacgagagacggagatttttacccctagcacctggaactgttcctggtatcagaggcattaaaatgtttgttggatggactaatgaatgagaagagaaggctgggctgaatggctcacgcctataatcccagcactttgggaagccaaggtgggtggatcattcaggtcaggagttcgagaccagtctgtctgggcaacatggcaaaacttcatctctacaaaaaaatactaaaactagctgggcgtggtggcgtgcacctgtagtccctgctacttaggaggctgaagtgggaggatggcttgagcccagaggtgggggttgcagtgaggcagtgagtggagcattctagcctgggcaacagagccagaccctttaaaaaaaaaaaaaaagcaaatttcatttaaaaatttttttcattcaaaaaaatatatataaaaagagaagaacagtaggttttgacaagagagagaaagttgaaatggtaagccacgtggcccaggctggtagggtccaaagtgatgctgaaagaagcattttgactgagggagttgtcagaaaatgggagggtctcaagttaatttgtttttttttttttttgagacaggatctcactctgtcgcccagactagagtgcagtggcacgatcttggctcactgcagccttgacctcccgggtcaagcattcttcccacctcagccgcctgagtagctgggactacaggtatgcgccatacctagctaatttttttgtatttttttggtagagagaagttttcaccgtgttgcccaggctggtctcaaactcctgagctcaaggaatccacctgcctcagcctcccaaagtgctggaattataggcatgtaccaccatgcctggccaaattaatttctttctgccaaacatctaagtggagaaatctggggggcagctgaatatgttactacatggtgtttktatgacctcagctaacttctgttttcacacagaaaattataactgttaagaaactgtttgttaatacttgtgttatatttaaacttgtgttatatttaaacaaactatgctttttcccctttcctgtcttctccctcccccatttaattgccttaggtacttaaacttcacccttgtttagcccctattaaggttgctttggatgtaggaagaggccccacattggaactaagacaggtgagttaaatgagtttaaatgtcattttaattacagattgagtattatccaaaaacgctttggaccaggaccattttggatctcggatttttttggtatatttgcatctctaatccaaaaatccaaaatcttaaatgttctgatgagcatttcctttgaactcaaggtttcaggttttggagcattttggatttcggattttctgattagggatgctcaacctaacccttactctaagtaaacttgatagcttgccatttaaaattttattttgattcatttgctttttaaaatgttttaggtcgggcgtggtggctcacgcctgtaatcccagcactttgggaggccaaagcgggtggatcacgaggtcaagagatcgagaccatcctggccaatatggtgaaaccccatctactaaaaatacaaaaattagctgggcgtggtggcacgcacctgtagtcccagatactcaggaggctaaggcaggagaatcacttgaacctaggaggcagaggttgcagtgagctgagatagcaccactgcactccagcctgggcgacagagactccgtctcaaaaaaaaaaaaaaaagtttttaatttgcctggccaatatggcaaaacctggtctctactgaaaatacaaaaattagccgagcataatggtatgtgcctgtaattccagctattcaggaggctaaggcacaagaatcacttgaacctgggaggtggaggttgcagtgagccgagatcgcagcactgcactccagcctgggtgacagagcaagaccctgcttcagaaaaaaaaaaaaaaaaaaaaaaagctttaattaaataatgaactgtgggtaagtactgtgattatatataattttgaagtgtgttaaagaagctgaatacagttcattgggtttgctgttcatgcccattcatagtttcactttttagtgagtagacatagtaattaaaatatttgtacacatgttagtgaatgtgacttatttctttcccctttgaactttttatttatttatttatttattttgagacggagtcttgctctgttacccaggctggagtgcagtggcacgatctcggctcactgcaacctctgcctcccaggttcaagcaattctcctgcctcagcctccctagtagatgggattacaggtacacaccgccacacctggctaattttttagtatttttagtagagacagggtttcaccatgttggccaggctggtctccaactcctgacctcaagtgatccgcccacctcggcctcccaacgtgctgggattacaggcgtgagccaccgtgcgcagcctttcccctttgaacttaacacttttggtaactgactatattcagatattctagatctataattttattttgatttttctaatttgttctaatgattaaatactcttaagaaaggccatgggggatggctttcatttcgttccagagactccttcagcagtcgtcatttctgtctgggtgattgagacccagcccagacctgaatgcggacactaaaaagatttaaagactttgagagtcccccagctttctgaccctggcttttgtggagaggtctgggaagatgggagatagtgagctcaaagaaggagaagataatggcgtatgtcccacattttctcccagggtatggcagcctccctaatacccttataagctaggaagctcctaggatgctgtagctcagtcaccatttagtaatgtctggagagatttgtggttgtcctaagagtgggagggtgctgcaggcctctcctggaggccaggaatgctgctaaacaccctgggtcagcagtgcaagggtgaggaaccctgctctggactgttggtgctagactgttaaggggtttttaaattttgctttgttttgcttccctattgcttgtaaagaaaacagttaagtttactgtgtcatttattcatcgttacttctgtatttccagtcaagcttttgtctccagcattccagtgaaatgggttgatcagtctcttcttgaaacattttccggggtttgcttctggaataccactctcctttttctcatcctttttctttcctggctcttctgcctcttcctgacttggtggtataacctagggctcaggtctcacctctcagatgagggctctgagttcatacagccctttggatctcctggtttttttctgacagaatctgttttggttttgtttgtgttttgaatgatactaagggtaataaaaattcttatttgatatacaaatttctcagaagattggcatttagtattcagctttgctatgcttaattacttcattttcagaagaagtatacgatttataaagtatatgatatggaagttataaacattaacatcacataattaaagaaacatacccattttagagattgaagagggtgatttgtggcttcacaaaaatagaataatcactctagctaccattatttctttcatatttgaagtttttctatttctttctaggtttgtcaagggctatttaatgagttactagaaaatgggatttctgtgtggcctggttatttggaaactatgcagtcytcattggaacaactttattcgaagtaagaattgtattttcattaaagagtgtakttaytcaagagtttttgattatgtttatgaattacagaaacaaatctcttctaaatttatatataaaatataattttaaattattcctcagtttcccttttacagaactatgtgyatttagttaattgcctcagcagggaacagtattcagcaagtatgtttgagcacatgctgtatgtagttccaagacttaatgtcatgaagtatgtatacctcagcttatccacttatggatgaaagtatgtatgtagagagcatgtgttgaatcaagactgaaggaatatgagtggaatgcctttctttgctggcattgtggtccattctgagactgagtggaagggaattctattctggagggatggtctgttctagtcttctaagggattggcacctctgttcacccaattgctcaagacagagaaactggctatcatccttaactcctccctcttcctcattctctacatccagtctatcatcaaatgctgtcagcttgcttcctaaatgtatctcatccatctctgtcttcgctgccactacccaagttagagtcaccaatatctcttgcctggattattgaaatcatctcctaattgagctctctgtgtctagtctcaccccatgctatttcattaattgttgtttttaaataatccattcttgttattttttttaagctttttgtgttgaatatgtatcttttgggtgaaaagttgtgaaccattgtgttttgatcttcagttctctgaacatttgttaaaatacaccttccaggctgggcgcagtggctcacacctgtaatcccagcactttgggaggttgaggcgggcagatcacctgaggtcaggagttcaagaccagcctggccaacatagcaaaaccccgtctctactaaaaatacaaaaaattacctggccatggtggcttgtgcctgtagtcctagctacttgggaggctgaggcaggagaattgcttgaacccaggaggcggaggttgcagtgagctgagatcaagccactgcactccatcctgggtgacagagcgagactccttctcaaaaaaaaaaaaaaaaaacacctttcagatgatgtccaaagaaaagtagttttctataattagagcatctaatggttttattatgtgtaaaatgaaggggcagcacttgaactttcttgtcctctcaggttctcaattcttatcctttgagccatgtggacattgtcaagttgcagttgttctttatatggtaaaggttttattgtcccaggatatttttatgaaattattattaaacacgtactatgttttattcactttgctatagtggtgaacaacacagaaaaatgtatcattctttttttttaagacagagtctcgcactgtcgcccgggctggtgcaatggcgtgatctcggcttagtgcaacctctgcctcccgtgttcaagcgattctcctgcctcagcctcccgagtagctgggattacatgcgcctgccaccacgcccagctaattttttgtagttttggtagagatggggtttcactatgttggccaggctggtctcgaactcctgacctcatgatccgcccatctcagcctcccaaagtgctgggattacaggcatgagtcaccacgcccagccatactattcttgttaagcttatattctagtaggacaaaatagacaataaataaacagagaaataaaaagtttctgatggagtcctacaaaggaaataaacagtaatgagatagtgtgacttggtaagcatacagaaggtcagccgtgcatctatctgtttggttattgctgaactagaagctataagctagctactcaataaaggaaacatgattttggtataatttgttataccaaattgcatctttattataatattgtttattgtaagagacttcagtctaaaataattgttcttggattgcatccaagaaccaaaaggctgaggttattatgcggttcttctgtgatatcaccccaaatgatgtgttgaggtaccagtgtttattctcagattttattttcttttatgacttttcagctctagcaataagttagaaactgtctgaaaatattactttaaatacaattcagaaactttaaaaatgttgggtttttttggtccacccttaagccctgagtctgtgactcttgagagtgcatgaacactgaattacagctggcaacgtggaggaatttattatttacatttgtgctcatgtgtctgtttaactacttttttcttaggtatgatgaaatgagtattctcttcacagttttggttactgaaactactttggagaatggattaatacatctgagaagcagagacaccacaatgaaggaaatgatgcatatatccaaattaaaagactttttgattaagtatatatcatcagctaagaatgtatagatttttatatttgtataataaatattcttctctcctaatttggttgtcttatgttcacttagatttatttctagcccctttgcacttayaaagtggacatttgtggtgcttgctttcattcagtgtttatattttttatgtctttcattgtatcaggaatatgttcagctacaagaaacaaaaatctactatactggattaagcaaattggggtttgtttttcttacatacaagaactctagcgggtagactgtccaaagctagtattactgtttctatagttagggacccaggcacttcccttctgttctgccatgtttagtacgctggtgtttatcattgttgcttcgggatcttaggtggctgctgtatttccagcctaattatcattctagttaggagaaaagttaaagagacaagagctagtcagccaacactcttcccttttaaattagggaagtaaaaacttttccagacatcccagtcgggagatgtctttacatctctttggtcagaactaaatcacatgataatttctaggcaaatcaccatccaagggaatgaaaatgatctgatttagatcaaacgcaatttatcccttgaggctgcaatagtatcttactctctcagaaatgggctttgttaccaggaaggaaaaggtctttatggaatctgccacatctatactgtcagatatcaaaaattaacctaaaactaaacttttaaaacttagagtatttacggatttttgaaaagcaactaaaatatatgttagatgtcatatattgtagtttgtttcctgtctaatatctatgtttataagaaatcttttaacttttatgtgttgatatgattgtgtaaaatatcccattgttaccaacttgacaaaaattccaactgatagtgcctgtaaaatatttcaaaagtttgactgacttaattgattttacttggtaggtttttctctttttttttttattttaattttaattttttttgtagagacagggtctcactatgttggctaagctgatctttcactccgagcctcaagtagtcctcctgccttgacctcctaaaatgatgggataacaattttgagccactgcacctagccttgttttggttattttatgcttttttttattatggagaattttaaaagcagacatataattgtactaattctatgtagtgatcatctagcaccaacaacaatcaacctttggccagtcccacctcatccactaataccacccttccatattatatcagtaatttatttatttacatttatttattaatttaagagacagggtctcactatgtggcccaggctggtctcaaactcctaggctcaagtgatcctcctgtctcagcctcccaaaatatggggattacaggcatgaaccacctcacctggcctccttgaatattatttcaaggcagatagcagctaccatttaatctggaaatatttaaggatcttttgttaataaccacactattatcacattaaaaaaataacactacatgatatcaaggaattatttacaattttgttgggtgtgataatggtagtatgtttatatttttctttttaaaaaaatccttgtctgacagatacatacatttatggtaattgagacttgctttataattctcctgtttaaaacaaacttttttaagtggtgggagatgaaataagaatagcactgagttggccagtggctgacgcttgtaatcccaaccctttgggaggctgaggcaggtggattacctgcggtcaggagtttgagaccagcctggccaacatggtgaaactactaaaaatacaaaaaattagctgggcgtggtggtgggcgcctgtaatcccagctacttgggaggctgaggcaggagaatcgcttgaacccaggaggcagaggttgcagtgagccaagatcgcgccattgtactccagcctgggtgacacagtgagacgctgtctcaaaaaaaaaaaaaaaaaaaaaaaggaagtggtagtagtgtctgtttgtttcttttttggggtggccagcaaccattgattaatacctcaagtggtgagttcattaaagcttgcaaaatggtgatattctatcttccttctttgttggctagagtactttttttgttgtttttttttttttttgagttggagtttcactcttgttgcccaggctggagtacagtggcgcaaactcagctcactgcaacctccgcctccgaggttcaagtgattctcctgcttcagcctttccaagtagctgggattacaggcatgcgccaccatgccctgctaattttgtatttttagtagagatggggtttctccatgttggtcaggctggtcttgaactcccgacctcaggtgatccgcccgcctcggcctcccaaagtgctgggattacaggcatgagccaccgcacccggccgtttgctagagtacttctatgaagaaaagcttctcaccgagtatttgcttacctagaggtatgggaaaggtaggataaatgctggattatttaaagtaattattccttttgatgctcaaattgtcccatctttggccaatgggaacctcaagttggcctcaagtctttttttttttttttcttgagacagtcttgctctgtcacacagtctggagtgcagtggtgcgatcttggcctactgcaacctctgcctcccgggttaaagcctccctgcctcagcctcctgagtagctgggattacaggcgcctgctaccacacgtggttaattttttgtatttttagtaaagtttcaccatattggccaggctggtcttgaactcctgacctcaggtgatctgcccacctcagcctcccaaagtgttggaattacaagtgtgagccactgtgcctggccagcctcaagtctttttgacacaccttactagtctttgataatttccttctaataactactgtagagattgtatattccaaggagctctggggttttttttattggaaaaaagtggacaccatactttggatactaggaatgctcattgatagaaggcagtctttgtttctaggcctttccagtattaagagctagcaaatataggagagtgtgtatttcctccctgaaaaaaaaattggccagatgtggtggctcatacctgtaatcccaatactttgggaggctgagacaggaggatcacttgagtcctggagttcgagaccagcctaggcaacatagaccacatctctaaaaaaaaaagctttgaaaattagccagtcatagtggctcaggcctatagtcccagctacttgggaagctgatgggtgtggacggcttgagcccggggagtcaaagccgcagggagcttggatcacaccactgtactcctgcctgggcaacagagcaagaccctgtctcaaaaaaaataaaaaataaggccgggcacggtggctcacgcctgtaatcccagcactttgggagactgaggtgggtggatcatttgaggtcaagagttcaagatcagcctggccaacacggtgaaaccccgtttcttctacaaatacaaaaattaactgggcatggtggcaggcgcctgtaatcccagctacttgggagtttgaagcaggagaattgcttggacctgggaggcagagattgcagtgagccaagatcatgccactgcactccagcctgggcaacagggtgagactccatctccaaaataataataataataacaaatgaaaaataaattatgagttcacaccaatattttccactcaaattcaggactgcagagggtctggggtttgtatgtctgttttaatcagttttattaagatacaatttacatacaataaatttacctcttttaaatgtacaaattgatgagtattgacaaatgtataaccatctccacaaaggcaatgtagaaaattttcatcaccccttaaagtccttttacacttttttttgagactgcctcagtagtaaccactgctaaatttatcagagaactgcacacctggattgtattttgacagaacttccttccaacccaattgcttttaataatttttttatgataaatttttacccaaaatgttatagaatttatttacaaagaaatttcgtaagttgtatttctcctactggtgtggtattatgctaaggaaacaggtctggagtcatgaaatccttaggtgtctaatttttctaacctgtaagtttctgtgctactgcagatctcagttactgtctctggtggtgggtgtgtgctgcggaagagtcagaggtaaggcactagtccatttccttccaggacagttgagaaagaaggaaatgaactccagtcatcacaaatccactgttgatgattcctctggccaggtctcccctttaaatccttagggagaagcaacactgagaaaagataacttcttcttttttttttttttttgagacggagccttcctctgtcgcccaggctggagtgcagtggcgcgatctgggctcactgcaagctccgcctcccgggttcacacaattcttctgcctcagcctcccgagtagctgggactacaggtgcccgccacctcgcccggccaatgtttttgaattttttagtagagacggggtttcatcgtgttagccaggatggtcttgatctcctgaccttgtgatccacccgcctcggcctcccaaagtgctgggattacaggcgtgagccaccacgcccggccaaaagacaacttctttagttgtaatcccccatccctgagagtagaagaggcagaaggccaaaaagtcgaccacacatgtttgcagctcctcatcccagcaagatttctgtgctgccctggtgttaccctgcagatgccaccttttcccagttttctactggattattggtctttctcttaatgatttgtaaaagctcataatattatgaaacttcatacaatatctgagacctgggctcaaaatacagtcatgcttcacctaacagtggaggtcactgtttgaacagcatagagtgtactcacacaaacctagatggcatagcctgctacacgcctagggtgtgtgggatagtctattcttcctagggataaacctgtacagcatgctactgaacactaggcaattgtagcacaatggtaagtatttgtgtatctaaatgtgtctaaacatagaaaaggtacagtaaaaacacggtattatagttttttgggaccccattttatatttggtccatgaatgactgaaatgttattatgcaacacatcatggtgttttctccctagttattcttttttttttttttttttttttttttttttttgaaatggagtcttgctctgtcgcccaggctggaatgcagtggcgcgatcttggctcactgcaacctccacctcccaggttcaagcaattctcatgcctcagcctccccagtagcagggactacaggtatgtgccaccacaccaactaatttttgtatttttagtagagacggggtttcaccgtgttggacaggctggtctcaaactcccaacctcaggtgatccacctgccccatgggattacagacgtgagccactgcgcccggcccctagttattctttggatttagtttatgatttctaaatgtaatttttaaatgtttcatctaattaaatgatttatctaattaaatttaacaatcctttatgttttctgggttgtgagtcatacctataaaagtcctccccacttcaagattatttttaaatcccctgcatattcttctagctcttctgtgactacatctatcagaattaattttgttgtaaagaatgaggtaggagtccaacttttttaatgtgattctcaagtttttacaatatgttgaataatccatcttttccccattgatttaagatgccatatttatcctatactaagttcctgtacatatttagaactacatctggactttccgttccattgttctacttgttcaatcacatacaaatatgtttgtagagacagggtttcgccaagttgcccaggctagtcttgaactcctgggctcaagcaatccttctgccttggcctcccagggtattgggattataggcgtgagccaccacacccacccctattgttgccattgttctagttgctgtgatagaggaaatgttgggaggtggtgtatctgccacctctgtgtcctgtgtcatatccctgggccttccctctgacccagcagcatctgagggtctactcactttgcactgatagtgtc

SEQ ID NO: 95398 - DNA, 129483 bp, Homo sapiens
  misc_feature (1)...(129483): n = A,T,C or G
aggccaaggcggatggatcacaaggtctggagttcaagaccagcctggccgagatggtgaaacctgatctctactaaaaatacaaaaattatttgggcacggtggtgggcgcctgtaatcccagctactcaggaggctgaggcagggaattgcttgaacccggaaggtggagcttacagtgagccaagatttcgccactgcgctccagcctgggcaacagagcaagactctgtctgaaaaaaaaaaaaagagagaggaaaaaaaaaagaagcagcagcctcccccaggtctcccatcacgttctgaaatcctaacttctattacctaatacaaggctacaaattatgttagtcgggtggttgggaacaaagcgtgtgccataaaaataaggtaaatgtgaatgtgtacatcagtttgctaagttttttgccactgtctggcctcttaaattgtggtagcagctattgttcacattgatatattacattgatattgatattgttcacgtcatatatatttgtagtacaaggaagcatttctaaaggaccttgttcattgctttgcacaaaatagccacttaatatttgttgaatgaattgctggcactatctctggtgttttaatttttatttatttatgtatttatttttgatatggagtctcactctgtcaaccaggctggagtgcagtggcaccatctcggctcactcaacctccacctcctaggttcaagagattctcctgcctcagcctcccaagtagctggggatacatgcatgcgccaccacgcctggctaatttttttgtattttttttttttttttttagtacagacgtagtttcaccatgttggtcaggctggtctcgaactcctgacctcaaatgatccgcccgcctcagcctcccaaaagtgctggaattacaggcatgagccactgtgcctggcctatctctggtatttttagtacgatgtcaagaacttcatatattttttggatcactttaattgtaaggtcgtatccagactgatgaaatgctcttggaggtaactatcctgagaagcaacttcactgatgcattaaaagcagtgactggcatggaataaggattaaagtatattaatcctaaacatgtaaaattgcattaatgttataacaacctaaagcaaaactaataaatcacataaaaaactctcacgttattttccttagtagtttacattgtgctagatacttttgcatgtacatgcttacaacttttcttctgtttttaaactttgcattacatataaattctaccatattatatgatcctcataaaaatcgtcggttaaatggctgcataaaaaaccatgcggttggccgggcgcaggggctcacgcctgtaatcctagcactttgggaggccgaggtgggcggatcatgaaatcaagagattgagaccatcttggccaacatggtgaaaccctgtctctactaaaaacacaaaaaattagctgggcattgtggcgcgcgcctgtagtcccagctactcggaggctgaggtaggagaatcgcttgaacctgggaggcggaggttgcagtgagccgagatggcgccactgcactccagcctggcgacagagggagactccgtctcaaaaaacaaacaacaacaacaacaacaacaaaaccccaaaagaccatgcagtttatggatcattatgctgttccctcatttcttttttgttattaatggaatttagcaaagaacatcttctgtactattacttatttttcaataatagggccgggcgcggtggctcacgcctgttatcctagcactttgggacacctaggcaggcggatcacctgaggtcaagagtttgagaccagcctggccaacatggtgaaaccccacctctactaaaaatacaaacattagctgggggtggtggcaggtgcctataatcccagctactccggaggctgaggcaggagaatcacgtgaacttggaaggcagaggttgcaatgagccaaggtcgcaccactgcactccagcctgggtgacagagtgagactccaactcaaaaaataaaataaaataaaataaaataaaataaaataaaataaaataaaataaaataaaaatggtggctgaatgaatctcatagtaatattttgatatgtaaagaatggtcctgctgggcacagtggctcacgcctgtaatcccagcactttgggaggccgaggagggtggatcacaaggtcaggagttcgagaccagcctgaccagcatggggaaacccccgtctctactaaaaaaaaaaaaaaaaatacaaaaattagccaggtgtggtggtgggtgcctgtaatcccagctactcaggaggctgcggcaggagaatcacttgaacccaggaggtggaggttgcagtgagccgagattgcaccactgcactccagcctgggcaacagagtgagactccgtctaaaaaaaaaaaaagaatggttctgttttcatgtccaatgctattttcctttcctcaaagacttttacacctgaatgtatataattgattttacctaagattcccatcccttaattttccgtcttatctttcccaagttccggctattaatttggtaattccctacatgttgtcattataatgtatatatatccccctttggggacataaacatatccccaagggaagagaaacacataaacttttttgtttttttaaactttctaacccaatcgtctctgaaatctgagcctggactagatgaggccactcacttaagagaggccttcaaaatgactttcctattatgagtattctgtttttgagtgcatttgttttttgaggtagggtcttactctgttgcccaggctggagtgcaatggcataatcatggctcactgcagcctcaacctcctgggctccagtgatcctcccaccttggtctcccgaagtgtggggattacaggtgttagccaccacgctctgcccctgttctatgttttcatttattttacttcattttaaacatttagttacttttaaataaatgtttacagtcaatgtcaatatttaagatggcaaggaaaacaataaaatgaacatccatgtacctgcttaaaaaaatcattaccagtacattgattttctttttatttttgtgatagtctcagtatgctgcccaggatggaatgcagtggcactggaatgcagtggtgtgatcacggctcactgcaaccttgacctccacaggctcaggtgatcctatctcagcctcctgagtagctgggcctataggtgcaggccaccactcctggctaatgttttgtagatacggggttttgccatgttgcccaggctggtttcaaactcctgggctcaagtgactcctttgcctcggcctcccaaagtgctaggattacaggcatgagtcaccatgcccagcccttgaatggttttagtgttattcttatctgaatatttgttttaaacaacaggatttaaccttacaagaaagcctaaatacaaacctctgcacgttaaccctatatacatttttctatgctgtcacttacattttttaatttactgctttcaacttcaaaacaagcagtctcccccaggtctcccatgacgttctgaaatcctaacttctattacctaatacaaggctacaaattatgttagttgggtggttgggaacaaagcgtgctgtaaaaataaggcaaatgtgtatgtgtacattagtttgctaagttttttgccactgtctgccctcttaaattgtggtagcagctattgttcacattgatttctatatatttgtagtacaaggaagcatttctaaaggaccttgttcattgctttgcacaaaatggccacttaatatttgttgaatgaattgctggcactatctctggtattttaatttttatttatttatgtatttatttttgatatggagtctcgctctgtcacccaggctgaagtgcagtggcgtgatctcggctcactgcaacctcccgtgttcaagcgattctcttgcctcagcctccctaattgctgggaccacaggcatgcgccaccaggcccggctaatttttttgtatttttttttagtacagacggggtttcaccatgttggccaggctggtctcaaactcctgacctcaaatgatccgcccacctcggcctcccaaagtgttggaattacaggcgtgagccactgtgcccggcctatctgtggtatttttagtgtgatgtctagaacttcatatacttttttggattacttttaattgtagggctgtatccaaactgattaaatgttctcgcaggtaactatctggagaagtgagttcactgatgtattaaaagaaatgactggcatggaataaggattaaaatatattaatccaaaacatttaaaattgcattaatgttataatagcctaaagcaaaactaacgaatcacataaaaaatcccccacgctattgtccttagtagtttacattgtgctagatactttcgcatgtatatgcatacaacttctattctgtttttaaactttgcattacatatacattcttccatattatatgatcttcataaaaatagttacatggctgcataaaaaaccatgcggttcctggactattatgctattccctcattccccttttgttattaatggaatatagcaaagaacatcttctgtacgattatttgtcaagaatagggccggtgcggtggctcaggtctgtaatcccagcactttgggaggccgaggcgggctgatcgcttgaggtcaggagttcgtgaccagcctgggcaacatgggaaaacctaaacgtctctactaaacatgtctctactaaaaatacaaaaattagtggggcgtagtggtgcacactgtggtctcagctactccagaggctcaggtgggaggatcacctgagccccggaagttgagactgcagtgagccgtgttcgcaccactgcactccagcctgggcgacagagggagaccctgtctaaaaacaaaaaaataaaaaataaatttctagcagtacagttacaatgtcaaaggataaggtacacattttttaaaaacttttctctttctcctcctgagataacgaaatacagtagcgtatgaacaactcttcatacattactctccaaggtttatcttgttaatcctttaagacgtatcatctccccatccttggctgcacctgaaaagagcgggagtcggcaggtaacctgatctcctccaccaggtgagtcccggatggaggtgtcaactacaagaccaggagcagagcattcctggggttttgctggaaccatcggcgtgggaatgctttctcttccctcgcccgaaagacgccaagttcccggcaggcagcggactcggttctaaccttcctcgccccagcctctcggagcgccctgcacgcagtgggcgtctaataaaatgcagttggccctgcttggacaaaagttctcccttaagtggcccggacagtaaacccctccaggtgccacagagctgccgcgcccgccgccgctttgctccctgcctgctccctcccagcgttccgcgtgggaccctcggcggcagctcacaccctccctgactgccggtgcccgccagggcaccctgcgcgcgcccgccggccccgccccggccccgccccgccccgccggccccgcctcccgtctcctccccgccccccggagccgacgagtggcggcggcggccccaggtcccgggtccctcaaacaaaaagggcgggtggaggaggaagcgcccgagcccagagttctgctccggcgcccccgagcaccgcccgcttcagccgaccagccccgtcggctactgggcctcgccgagacgagaggagggaaaggcctcggcggccgcgaggaggcggcgggggcgcgggcggaggcggcgcgggcggccgcggctgccgctttgttgtgcggcccgggccgaggaaggagaagtgggaggaggggggagctcggcgtcccgctccctccgcggctcatggcgacgactctcggcacatccgggaccctccggccgtggcggccgaggcgccggctgctcgggccccagccccggccgctgtggtgactccgccgcgcctcgccgtcgcccccgtgccgcccgccgcccccgccgcccccgccgccggggacatgtctaaccccggaggccggaggaacgggcccgtcaagctgcgcctgacaggtgagggggggcggcgggccgggctgggcagccgcggggtgggcgagctggcggggggtgcctgtggccttgggaagggccagggtcgcgatcaatgatgagttgggggtcggaggaatgggaaggcctagttcagggagagtaattggaaaaccacttgctctggtttggacattgtttccaaagccgaggatgactcggggcggggggtggtgttttgtggaggggagaatacaccggttcgcatcgcaggcggatttcaggtcggaaagtcttggtcaaggagccagacgctgcctcccggggctcggggaacagcccctgggctaccgcccaggtgagatcgtgaaggggatgaagagctcccgtggcgaggactattgaatccggttgctgactgcgcgcagtaaacactccttaaagatggagcgcttaacgggagggtgtgcgtgtgtgttcccgggttgttaccttgcacacacccagttatgcccgcatgaaaaacctttactccccgccgccggccaccgctgcccgggccacacaccttaaactcatgtctctgaggtgaggagacaggttgacttttccggtgtgcctgtctgatccgacggcttgggctcattgtacactgtgttttggaagtgtctgattgtagggtggcatgtttggggttgttccttttaggccgcagaacttgtgtctaacttctaacgccagacctgctttaaaaacacacttttttggggggggtgcattgctaagtatgtgctcatacaaactttcgagcaaactttctgttactctccccaccctccccattcctttttcgaaatggaaaagaatgtccggaggggttgccagatagaagactacacttacaaagtgtttatgattccaggtgcatgaaatctttaacattacaggtacgttttgcttacagtgccatttttggtattcttacatggacatgccacccccgttttaggagaacttttatttggtttgtaaaggaattggaatcacggcgttatcctaccttcaccatttacccctgataaattgtccacgtttgtattcgggtgagtggtgagaaagataattttccgtagaggatttgtgtgtgcgtgcacgtgtacggataaactgtaattatgtttgcccacactagactttgagatttatttggactaattttgtagttaaatgcctgtgtgtcacatcccagtccactggctgaacttgctggatgaaaacttgcagtgaatttggtatttgagaatttagcttgaatgtatgttggctgcaatttaaataatatattactttcatggcagttttcctttccctagggaaaattgcagggaatcattaactgagtgattcttaatggaaaacctggattggaggatacttgtattccaccccctcccccctcattcagtgtccttacattgggaggagtcagtggaaacctttataggggatctttgttgctttagagtttatctgttgctgttgctgtctgtagtcagtgatcgtggaaagaacatgtgatcccaggtgtgcagaaagcatcagaaataggctgtttccatttaccctcctctgggctatgtagagaaaatgagggaaaaaatagggtttttgattttctgcagataaggttagttgaggtttttagtatgacttaatagatcttaaagtgtttatctgtggtttccgtactgcctatgatacattataagaatttataattaaagtttattaagaggaaagattatgcttatattttaggggaagggggaatattgarctacatttatagtgattttgtttcaggtttttctgaggaattttaaataccctgtgtcctcttaatagtaaaaacagtttgaggtatctgagtttcttacaactatttgtctctgaatagttttctcttaaaatttgacaaatattaaaaacattgtccttccttctttggttacagtggagtctcttctgttttgccaggaaagttaacatattttttyttccatttttgttcatcatttayaaattagatggtatakattttagcaaatagatctcaagagctggattcaattagcagctttttaggacataaacattaaagggttagatggaaaagattgttttgactgactggataaatgacagggctgtgtttgatgtgcgtccaggaattggtctggagctggtgcccaacttctcagtccatcttgagaagccaaataaaatayttaacctaggcctcattttgtttaaaaaaaaaaaaaaaaaaagttgattctttgtgaagaccttaagaaatgtttggcatacctttagactaagtgtttaacagttcatttagatctgggttgcctaatagaggaaaaaaaatcacttaaaaaaagacagatcccacagtgaatttatatttggtttacaatacacttgggctataaggtgttttaaaattattgttctttgctttaagttaataccatattagtattttaaatttatagagtacctttgatttcaagatgctgtataaactttagttacttgataataactttattgkggaattgcccctttgctgaaaggtataaacatttcttacatggtgatgcacacactcacacacacacactcacacactcatacacactctctctgaagaagaggaaatatttaagccatgagatctctgcccacaattgatattaaacctttccacatattattcttaaaaccacaatcagtgaactgtttggtatttgtcaatgctaagaaggtggggctaatttaataatttgatcccaaattttagattcctcaggcagttgggggttagartctgatttcatccatcaagctacttctgttctttatgacacattaacatatgatcattgaaatgggctgtatggtaacactatcaacttcaactactgtttctataacattgattacaaaatgtataatgtctatatcattatacttatatctgatacaggcttttctttcaatggtttggatagaaaaatattctttacagtaaaaactttgggataattttttataccattattgtttctgaaaaccaaaggctggaaaaagcagtttagtgtaatttctaatattttaaattcttaggtatggagaagcagaataagattactcctccagaacatttgtttcagacctttttatacatttaatgtttttgtatgctgcttctcatgttattaatttcaaagcccttggcaataaggaggttaaccttgtctataatgtaaggaagtttaactttaaaaatttccctttagatatgctagcgtcttaatcttgtttcactacatattttatcgattcaaggctttaaaaattgtagcttaattctatttcacaggtttttaagtatgcctatacatcataatgactttatttatttattttttgagttggagtttcactcttgactggagttgaagggcttgatctcggcccactgcaacctccacctcccgggttcaagtgattctcctgcctcagcctcccgagtaggtgggattacaggcgcccaccaccacgcctggctggttttttttgtatttttagtagagacgggttttgccacgttggccaggctggtctcaaactctggacctcaggtgatccgcccgccttagccttccagtgtgctgggattacaggcatgagccacggcacccggcccataatgactttatatactagaggtgttagtgatttgaatgtccccaatttgttttattttcttggtttctgaggaggaagccagtgtagttgagctccttccttttcttttaaattctgtcttctagtctgaccctcttcaggcaggcagtagaacatgccaaggtcctttttgtagtttggtattcgtaataaagtctgtgtattttagtcatcacttttacttttttcttgttggttgagctattactatcacaacatactaacatctcatttaacataactcagttttaaagataaatgaagggtcatgcttaggcatacaagatttttattttagccttttttttttttgaggcagaatctcattctgttgcccacactggagtgcagtggcaacagcgtgcagtgagcaatcccggcttactgcagccttgacctcccggctcaggtgattttcccaccttggcttcccaactggctgggactacaggtccatgccactgtgactggctgatttttttaccttttttttttttttccagtacagatggggtttctccaggttgcccaggctggtcttgaacttctgtgctcaggagatcctcctgcctcagccttccaaagtgctgggattacaggtgtgagccaccatgcctggcctatttgagccttttttggtgagagtcttaaagacgtaatatgtcctcctcttttcaaatagaccatacttagtagaacttaatgttttattcatgactcagtataattatgaatgccctcgcccctagcaatacttgcccatcttttaaggctcaactcaaagattactgttatccctagaactttccctgacctgagttgaactgtcctctatgactctaagaagctcttctagtaccagacctaacccactggtaggcgtttattgttcctatgctttaagtgccatgaagccagcatccttgtgtgagtatggattaagacctttttggcattttatttaatgaatgctggagagctataaatacttccgaatagttctgcatgtgttctttatggctaatgcattgggtatgagtggcaagaggtgaggctctagacagggaccaacctagtttggaccttactgtagtttgccaagatgttcattttttttaaggtggggggaaccattgcaggattttaagctttaatatatttgctgtttagacacaatctgggagcagtatggaggatggactggaatgggaaccatgaagactggttttaggataactggttaagcagattcaacagcaaccatcgttcagatttttttgtttgaatgtttatttccaaattttttattacaaataattgctgtaaacatcttggtgtaggtaactttgattttttttttaaggattctttttttttaggatgcttccataaaaatagtgttactgagttcaagtgtgtggatatttttaaggtttcatgagtaatttttcctttaggctgcttcttacaagagttggacctatttagagcagcagtaaataaagatgtccctttttactattctgttataagtataagctaattgcattttacattttttgctaatttcatggcatgtgccatttaaacattcgtgaagcagaatattttcctgtctgtttactaatgatatttattttcattgacttgtttggccttgtcctagttatgttagagccttagtgtttttcttattgatctacctgagacttacaaatatattaacctgttgtcatatttgctacaaacatttccatgatgaattatttgtcttttaatattgttcattgtttggacatgtagaaatgtgttatcttaggagtcaaaatctgtccaacttttgttttgtttttcctattctatacttggaagaacttattctccaagaagtttgataaataagtacattatatttaatgtttttaaaaaatggtttaataaactatttcccctgcaattgctatttagccatcttgtcattatttattaaccaattcttcctttccacagtgatgtagtatcttttcagttatattagttatagagtcagatatagctcttgttcagtgccatactgttttttttattgtagctttataatttagtttagtattctcactaggccagttttttaaagagacggagtctcactctgtcactcaggctagagtacagtggcgtgatcttggctcactggagcctctgacccctgggttcaagtgattctcctgcctcaacctccctagtagctgggattacaggtgcatgccaccactcccagctaatttttttttgtattttttttgggtggagatgggtttacaccatgttggtcagattggtctcgaactcctgacctcaagtgatctgcccaccttggcctcccaatttcttttcatttgttttggtagtcttatttttttcttccacataaatattaaacttgttaagtttaataagaagtttcattggggccgggcatggtggctcacggttgtaatccttggactttggggaggctgaggatggtggatcatctaaggtcaggagtttgagaccagcctggccaacatggtgaaaccctgtctctactaataatacaaaaattagttgagtgtggtggcacatacttgtaatcctagctactggggaggctgagtcacaagaatcgcttgaacctgggaggtggaggttgcaggcgagatcatgccactgcactccagcctgggcgacagagtgaaactgtgtctccaaaaaaaaaaaaaaaaaaaaaaaaaagacatttcattgggattgtcattagaattgctttactttgggaaaaagaagtatctaagtttatttagttttctcacccaggaacatgatatgttttttacatttatttaagctttggcccatattgttcaggatagctttataattttcttcctgtgtttgaatttaatttcagataatttatatttgtgtgatttacgttgtgttttctaatcctagttattgcttgtatttaggaatgcagttatatgtattttgcttgattagaagaattttggctgggtgtggtgactcacgcctgttatcccagcactttgggaggccaagatgggaggatcacttgagcccaggagttcgagaccagcctgggcaacatagtgagacctcatctctatatttatttatttattattattattttttgatactgagttttgctcttgttgcccaggctggagtgcgatggcgccatctcggctcactgcaacctctgcctgcctgggttcaagcgattactcctgcctcagcctacctgaatagctgggattataggcatgtgccaccgcgcccggctaattactgtatttttagtagagatggggtnnnnnnnnnnnnnnnnnnnntctcaaactcctgacctcaggtgatccgcttgcctcggcctcccaaagtgctgggattacaggcatgagccaccgcacccagctgatggctggttttctaggtgtcagtgtttggtacttgttacagttgaatgttaacacttaaaatttttcttttctctcggatttctctccaacatataagtagttgaacaaagtgagaaattttatttcattaaaaattttttaaatacgagcagtcttctgaacaagaatagtttcagaccaactctgttttagaatagcttctgatggcattggctaccttttttaaaaccacatttgatattatattaaaaagtgtcaacagataatctgaagtttggcagtttggtttggttttgtacaaaaattggtagcagacataaagtttaaatttttaaataaacctcgatgattcatttttagggaggaattaccacgtggatgattgcaatcatgcaatgttcttcccatttcttcccaaaaagtttcttcccaaaacattttctcttacctctttgtagccagttgtcttcttcaataccgagaacttgtcaaccactgatctgttttcggtcactataattttgccttttctaggattttgagtaaatggaatcatactgtctgcagtcttttgggtgaggcttcttttagcgtaatgcttttgagatccattcatgctgggtatcagtactttgttccttttcattcctgaggaatactgcattgtacaccaatttgtttatccatttataaatatctgcagacatttgttgtttccagtttttggccattacgaataaacatttgagtacatggctctttgtgaacatgtttttcttgcccttgggtaaatgagtgggattgttgcatcatacagaaagtatgcattttaactttttaaaaatctgctgggcggattgcttgagcccaggagtttgagaccagcctgggcaacatggcaaaactccgtctctacaaaaaatacagaaattggtcgggtgtggcctgtgcctgtagtatcagctacctgagaagctgatggaggattgattgggcctgggaagttaaggctgcggtgctgtgctcacaccactgcattctagtgtgggtgactctgtctcaaaaaaaaaattttttttttttcaaagttgtaccattttgcatttctaccagcattgtatgagtttcagtagttcctcatcctagtcagcacttgatactgtctttgattttagccattctaattggtaggtacagatatttcatggtactttaatttttacttccttaataacctacagttttaagcacattttaatggacttatttattgtccatataatctttggtgaatatccaaatcttttgttcatgttttaaaattggattgttttcttattgagttttgagaattctttatgtattctggatataagccttttatgagatatatactttgcaaatattttctcccggactgtagctcccccaccgccccccaaaagatgtcccaaagagaagaagttttgaatgctgatgaaacctgtttatcagtgtttttcttttgtggttcatgttttttgagtcctaagtctttttctaacccagagttctaaagattttctctgtgttttcttctgcattatttataattttaactcatacatttaaacttattttcaagttaattttttaatatgctgtgagaagtaagtgtcatgatttttttttcatatggatattctatttttgtagccctatttgttgaaaatacttttgtttcctccattgaattgtcttggcaccttggtagaaaatcagttgacaggccaggtgcggttgctcatgcctattctttgggaggccgaggcaggaggctcacatgaggtcaggagttctagaccagcctggccaacatggcaaaaccccgtctctactaaaaataaaaaattagccaggtgtgtggcaggtgcctgtcatcccagctactcgggaggctgaggcaagagaatcacttgaacccaggaggtggaggttgcagtgagctgagattgtgccactgcactccagcctgggcgacagagcgagattctgtctcaaaacaaacaaacaaacaaatcagttgacagtatacatagaattctatttctggactctcctgtgttttctttatgattctaccctttaagtttatttgttttaacactatgctgtcttgattactatagctttaaaataaagcagctttcaaacaaattgagtctttgatttaggatcttgtagtgctttggagcggctgtttaatttgttcagccaataagtatttatcatttttgatctgtgacagatattatttttattacgtggtgccataaatgcagatataagaaattargaaaagcctagattgggccctgtagttttcctttcagaatttctattatgaaccttacattttaaaattattagtctttttcatctcttactgatgtgatgaaagaggattgcaacaaccatgacttaacgtaagtgtctgtttaccagctatcagtcatgtttttggaaaaaggtgggatataaagaataaacatatctaaaatgtgaccatagaaaagaaaggaggtgattggtgtgttaagtgtgggttggattatgagtatttatcgtttttgcttgtattattatttttgtgacagggtctctgtcacccaggctgcagtgcagtggcacaatcagagctcactgcgatcttgaactgggctcaagtgatcctcccgcctcagccttctgaatagctgggttacaaacatccatcaccgtgcccagctaatttttttattttttgtagacatggggcctcactgtgttacccaggctggtcttgaactcctggcctcaagtgatcccctgccttggctttccaaagtgctgggattacaggtctgagccattgctgcgcctggcctgtttttgcttgcattattttatgtgtatattttttcttttcttttcttctctttttttttttttctgaggtagggtcttgctctgtcgcccaggctggaatgcagtggcacgatcttggctcactgcaacctccacctcctgggttcaagcagttcttctgccttggcctctggagtagctgggactacaggcgcgcgccaccatgcccgtgtaatttttatatttttagtagagacagggtttcaccatgttgccaggctggtcttgaactcctgacatcaaatgatccacccgcctcagcctcccaaagtgtgggattacaggcgtgagccaccgcgcccagctttatgtgtatattttttctccaaggcaaaagaaaggaagaaacttaattttattaaaatgtaagcatatatatatacacaaaaatatatatatttctgagacagccttgctatgtcgcccaggctggagtgcaatggcgcgatctcagctcactgcaacctccgcctcctgggttcaagtgattctcctgcttcaccctcccaagtagctgggattacaggcacccgccaccatgtatttttagtagagacagggttttgctgtgttggccaggctgttcttgaattcctgacctcaggtgatcagcctacctcggcctcccaaagtgctgggattacagacgtgagccgccgcgcccagccagcagatttttttttttttaaccaccgtgcattcctaggcactgtcacaaagcagaaatccataatgtagatctcattttctatgtaagatatacttggtaattttgtttttttgagacacagtctcactgtattgcccaggcacgatctccactcactgcaacctcagcctctcaggttcaagcaattctcctgcctcagcctccccagtagctgggattacaggtgcctgccactacacccagctaattttgtatttttagtaggcatgaggtttcaccatgttggtcaggctggtcacgaactcctgacctcaagtgatccgcccacctcggcctcccaaagtgctgggattacaggcatgagccactgtgcctggtcattttatgagaggtagtcagaatgttgtggagagtatagaattggaggcagaaaatgtgagttcgtatcctagttatgccatgtataagctttgtgcatctaagcaaatcacttattttctctgtgcttgtgcctttagttataaatgcatgcttaaaatgacagcgttaaaaccaggtgtgaaaataccaaaaaaaaaaacaaaaaacaaaaaacccgtgtgatggtgtgtgcctgtaatccctgctgtctaggaggctgagactggaggattgcttgagctcaggagttcgagaccagcctgggcaacatagtgagacatggtctcaaaaaaaaaaaaaaaaggcaagtcttatttattttagcaatatgatggaataatgtacatgaaagatactgttcaaggtgtaaagttttttgtaaacgtactttgtcatttttgaccacggattttgttttaaagaaattggtgaaaaccgattatattttataagagcaggtacgacattaataatgattaatatatatttatttaaatgatacatgtcttttaaagtaagcattttggattgaaatcctagctaggcaagaaaaaaaaggcataaatgtcttgtatcagcatatcatgaagtattcatataatgaaatataattaggtatttatgtttcaatattttaatcaaatattttcaatattttatttttgagatggtgtctcgctctgtcactcaggctggtgtgcagtggtgcaatctcagctcactgcaacttctgcctccctggcttaagcagttctcccacctcagccttcccagtagctgggactacaggcacgcaccaccatgcctggctaattttttgtatttttagtagagacagggtttcaccatgttggccaggttgtttctcaaactccttatcttaagtgatacgcccgttgcagcctcccaaagtgctgggattacaggcatgagccactgcacccggcctcaatattttaaatatttaaaaatatatttttataaaccatttttatcttaatatggcagccatttaaccgattaactatacttctctgttccttccatcccccaatgtttggtaagaagtagaagatggctcaggattttggagttggattgtagattggggagctgtttggatgaactctttatgacttgataaattcctctgtagcatgctggcgctttcaaaagtagcctgtagcgtcacctcttgccagtagatgggggtatttctgcactgatagatgtcagggtatgtaaaaacctgtaaaactgaaacccaaagtctaaatgagtgtgcttggaataaatggtgttgaagagttagaaactgaaaatttgactccaatgtgtaatgaaaaatcatactttagtgtgagctttcttatgtaaactctttaaatgctacatgttgtaggagtagatagtagagttgcaaacattagtaattctgtttttatttttgtgatttttgtgtcatcaggctttacatgtaactttcttcctccagtgaagaagaaaacactgattggttggtaagattattcagaattgtatgaatctaataccataaataaggttgatagagattttttacagttgaacttggggaattttgtagagaaagaaggatggaaaaaaaactataaggaaaagtaaaacggcatttgatagattcaaaataccatctctaacatagtgctgcatatgtagtacttcaataaattgtgtgtgtgtgtgtgttttgttttttgtttttgtttttgtttgaaacagggtctcactctgtcgctcaggcttatggctcactatagccttgaccacctgggctcaagtaatcctcctgcctctgcctcctgagtagctgagactataggtatgtggcaccatgctggtgtaatttttaaattttttgtagaaatggagtctcattatgttgcccaggctggtctcaaactcctggcttcaaacagtcctccagtcttgacctcccagaatgctggagttacatgtgtgagccatttgtgaattaaagaatgatgaaattgaaaacaggctttcgtgatctcagggacctcagttgaaacaaataagatctctctttgtgatgtcattattgaattaactaacatttataccttagtaatttcaacatcattaagttataaagatataggactgaagtgttcatttgttaatatttgacttgatggatagaactgttttaccacactgcaaattttgctgcttaacaaaatgaagatcactaacattcactggaataaaatctgttgctggattatcatctaagaaaagtcacatgtaagtagtctgtcaatgttaggaagataatttaacatttttttttagagttctatggttttaagatattctcatttattgtctcatttaattactattgagatcctgtttttttttttttttttttttttttttttttttaagaaatagggtctcactgtgttgcccaggctggagtgcagtggcatgatcgtagctcacttacagcctggaactcctaggctcaagcagtcttcctgcttcagcctcctgagtagctaggacaatagttgctcaccactgtgcctggctaattaaraaaaaaagtttttaaggactgggtctcactgttgcccaggatggtcttgaactctgggtttcaagcagtcctctcacctcagcctccctggtagctggaattacagacatgagccactgtgtctaccaaggtgtctttgtaggtaatctgaaccagtgaaagtgaaatgagcaccttttatctgacgaaatttgttccctaaatctttttttttttttttttagacagagtcttactctgtcacccgggctgaagtgcaatggcatgatctcggctcaccgcaacctccccctcctgggttcaagcgatttgccttcatcagcctccggagtaactgggattacaggtgcctgccaccaccatgcttggctaattgttgtatttttagtagagacagggtttcaccatgttggccaggctggtctcaagctcctgacctcaggtccgcccgcttcagcctcccagagtgctgggattacgggtgtgaaccaccgtacccggcctctattccagttctttagaaatgaggatagatgtaccaaaagttcattgtgataaaatttgaagcttcatatattttagttttctctttcccagtttcttctgatttttttttctttttttttcagtttcttctgatttccagcttagttaacccctaattgtattttttctagcaaggaagaagactaagaataatgatgaaatatgctcatatttacatattcattcagtaaacatttgctgggagtcttacatgcacctaacactgagatgtaggctctaggattttaagaagaggttaagacctttatcttgctttcagggaacttgcaggtaaccaaacagataagacttgatggatgaaataaccacagtcagtgctagagttaatggtgtatgcagtaagggtgaaataaaataatgaaagcccataggtatttctaagggggctttctagattctacgattgatctttcatattttctaccttccactttacaaagaaaggcacattagccagacatcccaaatagtacattgtggtgagaggccttccacaccaccagagagacaaatcagaatgttggtgagaaggcagtgatatcaatgactgggtagcatcttttcataagtcaggcatatttctctctgtagttttcaacaaaattgaaggacttgatcaagttttagctggtcattaaaaataatttttatagggccaggagtggtggctcatgcctgtaatcccagcactttgggaggctgaagggatggatcgcttgagctcatgaattcgagaccagcctgggcaacatggtgaaactccatctctacaaaaactacaaaaattagcctggtgtgtggtgcatacctctagtcccaactacttgggaggctgaggtgggaggatggctcgagcccagcaggcagaggttgcagtgagccgagatggtgccactgcactccagcctgggcgatagagccagaccttgtctcaatttaaaaaaaaaaaaaaagaaagaaaaaaaaaaagaaaaattccagtggctcatgcctataatcccagcactttgggaggctgaggcgggcagatcacttgaggtcaggagttcaataccagcctggccaatgtggtgaaactctgtctctaccaaaaatacaaaaattagttgggcatggtggtgtgcgcctataatcccagctactcgggaggctgagacatgagaattgcttgaacctggagatggaggttgcagtgagctgagatggcaccactgcactccagcctaggcaacagagcgggactccatctcaaaaaaaaaaaaaattataagaaatagtgaagtcaaatgccatttcccagaaagttttttaaaattatagatcttggtaattttttttggcatctaactcaaagaatttaatggcattgctgtaacaaaacttctttcattacctacttatttatgtgaataggttttcttagcatttatatgtataaaatgaaaaatgggattagaatttatgttgtaccctcattccagcaataagtaatagtcattaatagacacatgaagtaattgaaagtaagaaaaccccatccatctcattaagagatgcatgtccacctgggtgtggtggcatatgtctgtaatcccagctactcataaggctgaggcaggagggttgttaagcctaggcgtttgagaccagcctggcaacatagcgataccctgtcttgaatttaaaaacaaacaaaaaggagacatgcatgtccaattattctcttccttgtcttcctccccacttttctatttttcttaattatttttttagggacaagttctcactgtgttgcccaggctgatgtgtactagtgttcacaggtgtgaacataacacactgcagccttaaactcatgggctcaacctatcctcctgcctcaacctccagagaagctgggactacagctgtacaccactgtacctgatacccctctccctttttgagtaagtggtttgtttaatcagaatccggaagaggtctacacattgtattgggttggtatgtctcttaattatcgtttaaactatagctttctcttttcttcctctgaattttctttttcttcaaatttatttattatagaaaacagatttattaaatatatcagcatctcaaaactctttatcatttggccctagccttcccatcataccactgtgttctaccactctgaactccttgtcttttcttaaatttcataatctcttgtatctccaagtttttgacagtgctgttgccttagatgatgctgttacccatcttcctccttccccacctagtcttcctgtcgaatctactcagcactttgttttgttttttttttttgagacagtcttgctcttgttatccaggctgaagtgcagtggtgtgatctcggctcactgcaacctctgccttctgggttgaagcggctcctgcctcagcctcttgagtagctggaattacaggcgcctgccaccatgcctggctaatttttgtgtatatgtatatttttagtagagayagggtttcaccatgagacagcttcccaagtagctgggatcacaggcacgccaccatgcccagctaatttttgtctttttggtagagttggagtttcgccatgttggccaggctggtctcaaactcctgatcttaggtgatccgcccgtctcagcctcccaaagtgctgtgattacaggcgtgagccaccatgcctggctactcagcatttttttttttttcttttttttttgagacagagtcttgctcttgtcacctaggctggagtgcagtggtttgatcatggcttactgcagcctggaccacccaggctcaagcattcctcctgcctcagcctcctgagtagttgggactataggtatgtgccaccatacttggctaattttttttttttttttctatttttagtagagatgaggttctgatgtgttgccaaggctggtctcaaactcctgagctcaattagatcttcctgccttaacctcctaaattgttgggagtacaggcatgagccaccaagcttggtgctccagttttaagacatagctgaggctgggcgcggtggcttatgcctgaaatcccagcgctttgaaggctgaggcaggtggattgcctgagcaacatggtgaaactccgtctctacaaaaactgcaaaaattagcctggtgtgtggtgcgtacctgtagtcccaactacttgggaggctgaggtgggaggatggtttgagcccagcaggcagaggttgcagtgagccaagattgtgccactgcactccaggagtttgagaccagcctgggcgatatggtgaaacmccatctccactaaaaatataaaaattagccaggcttggtggcgcgcacctataatccagctacttaggaggctgaggcaggagaatcgcctgaacccaggaggcagaggctgcagtgagccgagatcacaccactgcactccagcctgggccacagattgagactcagtctcaaaaaacaaacaaacaaaaaacgtagctgaagcatcatctcctctgagaattcttcccaggcttccccagactgagttaggtgtccctctctattagtatcctgataggaaacaagtaacactcttaattaggtcaaagagtgtaatgaagcaggtatttacaatggtatgggaagggttacgggaatccagcaaggaatagtgcagcacctagggactagcaatgataggaagttgcaccatatttggcccagcaagggcaaagggagagagtagttgtgggagtccagagagaccctggttgttgcttctcatttattgaacccgatttaaagccagagaacaaagagcccagtttatgtagtacatgacggcagcctcctagggcacagggtaaaggatggagaatagatctggaggattaaatagaaaacaaaacatctagcacacccttatttattctcctgtactactttagcataattctcattgtattaatatattgatttaaaattcaatttaggccgggtgcagtggctcatgcctgtaatctcagcactttgggaggccagcgcaggtgggtggcttgaactcaggagttcgagaccagcctggacaacatggcaaaactccgactctaccaaaaaaacaaaaattagctgggtatggtgacgtgcctgtgatcccagctacttgggaagctgagatgggagggtcactggagcccaggaagttgaggctgcagtgaaccgtgatggcgccactgtactccagcccaggtgatagagcgagaacctatctcaaagtaaaaaataaagggtaaaattcaacttaagcctggataacagggtgaaactccgtctctacaaaacatacaaaaaaattagccaggcgtggtggtgcatgcctgtagtcccagccaccagggaggctgaggtgggaggatctcttgagcctgggaggtcgaagctgcagtgagccatgagtgtgccactgcactgcaactggggcgacagaggaagaccctgtctcaaaaaataaataaataaataaataaaattcaacttaaaattggttggttgatgttttctccatagcactgtgaacttctttatagctatagactcattcatactaatatttgcctacacacagtgcttaatagatatgtgttaattaaatgaatgaaagttttaaaaagggatggctgataaacataatttaaaagatctgtctgtccttcttagtggtaatgtgtgataattcttggttcaaaagagtaaacttaatttttgctttgtttggcagttttgatgcttctgcaataaatggctcactcatttttgtttcaggagaggccagggattaatttaggccataataaataactactacatttagtaggattatatagtgcaaggctctcagttgactactcagtggcctgataagtatatttatccattctcttttgctatagaagaatcatgatgcaggtaaagaatctgtagagattataaggccaattatgctgactttagggaggatgtaccttgctttctgtgagttacagtaatattacatagcttttccagatcccttagatacttggaagctggaaaatcgacctgcattgctagccaaacaaattcttctcctcctcccaattattcacatgaattatcacatatttgctagaaagggcttattagaattgctgcataaaaaatgaccctagggccgggcgtgatggctcacgcctgtaatcccagcacttcgggaggctgagtcgggcagattgcctgagctcaggagtttgagaccagcctgtgcaacatggtgaaaccctgtttctactaaaatacaaaaaattaggcaggcatggcggcatgcacctgtaattccagctactcgggaggctgaggcaggagaattgcttgaatccaggaggtggaggttgcagtgagccgagattgtgccattgcattccagctggagtgagactaatagttttatcatctcatggtttctgtgggtcagggatttggcaaggggcttaattgggtcattttggcccagagtctattgtgtgtttattcagatggtggctggaactggaattgctggggggtggctgggcatatctctcacttcaggtcatgtcagagcctccatgtggtctgtctacatgggctggtttatggcagctttacggcagctacactgctaacatgactgactcagggcaccagcaggaattgtccaaggaacaaagtgaaagttacatctccttttctgacttagcctaggaggtcctacctgcattctattggttacaaaacaagttagttacaggctattctagattcaaggagagggaacatgaactcccatatcttgatagaagaagtttcaaagaatttgcagccatttaaaaaattgtcacaggtggtggcagtggcagcaggtgctgctactttttgttttttttggggggttggactatttattctttgatatattaatctaatagataaaaattttcagcttttataatttattttatgttctacctttgaatttccaggaattttattacagagcacttaacaaatggcataaaaattttcagcagcttctagaagagttatgatagcttattaaagtataaaatccataaattattttgataaaggattataaaggtcatagagaagcagattggtaaaaaagcagatactatctgaataaaataatttatatgaatatgtgaatttaattctttaattctctgaaatgtttttttttggaatgatttttgtattgaaaaaatattataattcagggttaagaataaaatgatgttagtgcttccctatagggtctgcattgtttttcttttttttcttttttctttttttttttttgagatggagtctcactctgttgccaagctggagtgctgtggcatgatctcggcttactgcaatctccgactccctggttcagatgattctcctgcctcagccttctgagtagctgggatcacaggcacccgccaccatgcccagctaatttttgtatttttagtacagacggggtttcaccatgttggccaggatggtcttggtctcctgacctcgtgatctgcctgccttggcctcccaaagtgctgggattataggtgtgagccactgtgcccggcctcattgtttttctttaacccgtctataatccattctccacagtatagcttcatgaattaaaaaagaaaaaagtaaattggatgattttacttccttgctttaaccctccagtgtctttccattatactttgaatgaaatagacactatttatccaagaccttatataatctgcccctgttgactgggctttcctttgctcattatgctttagtcacgtggattttcttttaatttcttgaaaaggccaatctcttccacctcagagtctttgtatatattctttcttttgaaggaattttctttctcttgtttcttcttatttttctgtgtcagttgtattatctcaaagagttcctaagtagtctgtctaaagtagtctctactctcattatgctacctccataatatcctgttaacttctgagaactgaacacaatttcttttaatattcatttatttacctgtttactgtctttttaaaaataaacttttgattttagaatacttttagatgtatagaaaaacctgtaagtctaaagataagaaaaatctgtaaatctaaagatctgtaaatctgaagatagtatagaattcctgtatttccataaccagttttccctattaactaaactaatcttacattagtatggtatatttgttataattaatgaaccaatattggtacacttttattaactaaaatccatatttattccgattagtttttacctaatgctgctcattgttttttaatccctattagatggggagcacccacagggcagggattgtgtgtgtgtttcatttacctaatgtgatgccaaacagtaacgggtacttgggaagtatttcttgagtgactactggaaagaagtcttagagtttatagtctgacttaaacttccccattttaggtgagaaaattgcttagggaggcatatgtgtcttctccaagtcccatgggtaattcatggtatagctggtattagacaccacatcttatgatatccagttgctattatctctttgaaactaatgaaccttaattttcttttttttttgagtcagagtctcgctctgtcgcccagactggagtgcagtggtgcgatctcaatttactgcaacctccgcctcccgggttcaagtgattctcctgcctcagcctcccaagtagctgggattacagatgtgcaccaccaggcttggctaatttttgtatttttagtagagacagggttttcccatgttggtcaggccggtctggaactcctgacctcaagtgatccactcacctcagcctcccaaagtgctgggattacaggtgtgactcaccacgcccagcctgaagcttaattttcaagacccaatctgagggtctgggagggaccctagcaatgtgttcacttggttaatttttaaaaagttttattggtatataatatatgaatgagaaaattcataaatattataagtgtgtagtttaagatttttcacaaactgaacacacatatataactagcatccagatcaagaaacagaacattgccagtatgtggtcacatatctttgaagaatttgcaaatgtaagttatctaaaccacagtcagctaaaattgccgtctttttacctgacttcccctttgttacactcttccttatgttgggtggcattggaatggctgtgggcacttttggggtctggctatggggaaattgacttggagagatatttagttggattttagcaggatatgtttacatggttcatagcctctttgtgtatagtcaaggtattactagccatcccagtatgggaatggtttctaggaatactctatgtctgttgtgctaactcatggggcattgtgacataaacgtgcatagctagaggttgtctagcaatatgaatgtgtcctatggcatctggcacccaaagtgtgtggttagtagaggaaaaacaaggtttgatgtcaaaagccagtctggggaaaattctttaagattttgtagctttaatgaaagagacttgttaagaattttcccaggtttgaccatagtcctaaaagttgatataacattatttattgatgatgttcctgtgctaaaagaaaacttttctaagccatcaataacaacaggctgagcgtggtggcttacgcctgtaatcccagcactttgggaggctgaggcaggcagatcacttgaggtcaggagtttgagaccagcctgcccaacatgacgaaacactgtctctaataaaaatacaaaaattggtcaggcgcagtggctcatgcctgtaatcccagcactttgagaaactgaggtgagtggatcacttgaggtcaggagttcaagaccagcctggccaccatggtgaaaccccatctctattagaaatacaaaaattagtcgggcttggtggcacatgcctgtaatcctagctacttgggaggctgaggtaggagaatcacttgaacccaggaggtggaggttgcagtgagccgccaagatcgtgccactgcactccagcctgggcaacagagtgagactctgtcaaaaaaaaaaaaaaaaaaaagaaaaaggaaaaaaaaaaaactcatgggaaagtgtggtactggtgtaaggattgagatatagatcaatggaatagaatagaaagtccagaaagaaaattatacatttgtggtcagttgattttttttttttttttttttgactagggcgccaaaaccattcaatggggaaagattagtctttttaaaaaatggcattgggaccgggttctgtggctcacacctgtaatcccagcactttggaaggccaaggtgggtggatcatttgaagtcagtagtttgagaccagcacggtccacatggtgaaaccctgtctctactaaaaatacaaaaattagccaggcatggtggcacacgactgtagtctcagctactggggaggcagaggtgggagaatcgcctgaacctgggaggcagcagttacagtgagccaagatcgcactattacactccagcctgggcaacagaatgagactccgtctcaagaaaataataataataataatgtgttggaccaactggatttccacatgcaaaagaatgaagttgaacctctacctcatgccatatataaaaattaactcaaagtggattaaagactaaatgtaacaatgcaagccataagactcttagatggatggctgggtgtggtggctcacacctgtaatcctggcactttgggaggtcgagacgagtggttgtttgaggccaggagttcgggaccagtctggccaacatgatgaaaccccgtctctactaaaaatacaaaaattagccaggaatggtggcaggcacctgtaatctcacttacttgggaggctgaggcaagagaatcgcttgaacctgggaggcggagattgtagtgagccgagaccgtgccactgcactccagcctgggtgacagacaagactgtgtctcaaaaaaaaaaaaaaatctcttagatagaaacacaagactttggattggattctgtcaatttaaacaaaaatcttatttatttatttttgtaaagatgaggtctcactctgttgcccagactggtctcgaactcctgggctcaagagatcctcttgtctcggcctgccaaagtgacaggattacaggtattagccactgcacccagcctagactctatcaaaattaaaaacgtttgtgtccaaaaggacactaataagaaagctaaaagataactcatagaatgagagaaaatatttataaattatacctgataagggtctagtatacagaatatataaagaactctttttttttttttctttttttgaggcggagtcttgctctgtcgcctaggcaggagtgcagcagcatgatcttagctcactgcaacctccacctcctgggttcaagtgattcttctgcctcagcctcctgagtagctgggactacaggtgcacaccaccatgcccagctaatttttttttttttttttttttttttttgaggcagagtctggccctgatgtccaggctgagtgcagtggcatgcaatctcgtctcactcaacctccacctcctgggttcaagcgattctcctgcctcagcctcccgcgtagccgggattacaggtgtgtgccaccacgtccagctaatgtttatatttttagtagagatggagttttgccatgttggccaggctggtcttgaactcctgatctcaggtgatccaccaacctcagcctcccaaagtgctgggattacaggtgtgagccaccgcacccggccttaaggaactcttaaaactcaacaataaaaggacaaacaatccagttaaaaaatgggcagctagccagatgtgttggcacatgcctatagtctcagctacttgagaggctgaggtgggaggatcccctgagaacagcctgggcagcatagtgagaccacatttcaaaaaaaagggcaaagggtttgaatagacagttctccagagaagatatatcagtggccaaaaagcacatgaaaagatgcccaatatcatgaatcattagggaaatgaaaatgaaaaccacaatgggatactacttcacgaccactagaagggctataataatgggaaaataacaaatgttagcaaagatgtggagaaattggaaccctcatacattgttggtgggaatgtaaagtagttcaaccactctgctaaacagtttgtggcagtttttcagaaaaattaaacatagttactacatgactcagcaattccattcctaggtacatacataagagaactgaaaacatatgttcacacaaaatcttgtgcatagtagcattattcataacagccaaaatagttgggtggaaacaactcagatgtctgtcaactgaatggataaacaaaatatggcatatctatacaatggaatattattcagccataaaagggaataaagtgctgatgatgtatgctatagtatggatgagctcaaaaaattaggttgattgaaagaagccagacacaaaaagccatattgtttaattccacttggcaaatccatagacagaaggtagattttcaggttgctaggggatgggggagggaagatggggagtgactgctaacaggtagtatgggggttgttttggggtgatggaaatgttctggaattagatattggtgatggttgtacagcactgtgactatgctaaaaattattgaattatacagtttaacttggtgattttcatgttatgtgacttttattatttatttatttattttgagacctagtctcgctctgtcgcccaggccagagtgcagtggtgtgatctcggctcaccgcaacctccacctccctggttcaagcaattctcgtgcctcagcctcccaagtacctgggattacagctgtgcaccaccacgcccagctaatttttgtatttttaatagagatggaatttcaccatgttggccaggctggtcatgaacttctggcctcaagcgatccactcaccctggcctcccaaagtgctgagattacaggtgtgagccaccatgcctggccttatgtgacttttatctggaaacaaatgggaaaaaaacttgtcataacaaatattattattattattattaggttatgatgtttgtggcttttgccagtttgttaaaatttatgatttattttctcattctaaattgaatattggctgtcaatacccaattctgtgctcttaaaatggagcctccaaactctgtaaactccaggcttcatgaaatctgaatgcacccaggatatgtattagcatcagataaaaatcattcaaggactgtgtcttctttttaagcttgaattgaacaaatatgtttatttctgctctgtccccaagccccattcacagtgagtaagagaatgaaaacagcataaatctgcaagagcagaaagaacaggagacagtaaataagtggtataaaaaaacttcagggaaatggaaggtggttggagtagattaattagctgagaaagtggaatataaaatatctacagaggcggataccaattccttgcatgattctagccagttcatatcacctatctctaggaagactcaggaattgaaggtgccaggtatctctgagggtgcaagcaagatgtgaagctgaaagcaggaaatggtttaaagtcagtggaaagttctatacatgcctcatcctaggcaagcagatgagtgttcttacccaacctcacaaaaaagtcaaagatttatcttgtggagaaagccagactgcctatagacccaggaatacctggtgctgtggaaggtggtaaagaaatgcccagctgaaaatgaggggatttgccacatctttaaatggtgaaactcccagcccccttgtattacttagctccaagaatgctagcagccagttattctctttttgtttttgttttttgttttgaaacagtctcactgtcgcccaggctggagtgcagtggtgggatctcggctcactgcaacctccagcttctgggttcaagctatttttgtgcctcagcctcccaagtagctgggattacaggcgcgcaccaccacacctggctaatttttgtattttagtagagacagtttcgccatgttggccatgctggtctcaagctcctgacctcaggtgatctgcccacctcggcctcctaaagtgttgggatgacaggcatgagccaccacactcagcctatataaattttatgtttttacagtaactttgtatggagagtataaaactcttcacaacatttttttggggggtggggggctaatctcttggtagttgcctgtgtttataagttacctctaaagtttagaattgaaagttgtttggtgttttcagcatattattgaaggctcagaattgtagggaccagaattattactgattctctaatgcctctaatcaactgaagttgtaagataattcatgttatgtgaaaaacaaaccaatgatgctagttgaatcctggaatttaaacttgcaacaaagtgaatatgacatatttaatggttattcttactatattgtattgtaaatatatggtaaagggatttatgtatttatttttacccagctaataaacattttcacctgggatggaatgataccggtgtgggtatggagggtttaagtggaaagggagtgttctttctctgtttttatactctgctttctctttgaagttgttctttcctctatttgattttgagggaccctgattgactcccagtacctggatatagaagaatctataggtagagatctgtttttttgttttgttttgtttttgaaacagggtcttgctttgtcacccaggatggagtacagtgatatgatcatggctcactgcagcctcggcctcctgggctcaagccatcctcccacttcagcctcccaagtagctgggactataggtgcgtgccaccacgcctggctaatttttgtgtttttatagagacagggtctcctcaggttgcccaggctggcctcgaacttctgggctcaagctatctccctgccttggcctcccaaagtgctgagattacagacttgagccaccacatgcagcctctaccttctgttataacaataaatactgtgtatccctatttgcaaagttttaagaaactctttacctaagtcatctcacttaatcctcaaaataatactctgaagtaggcgagtacaaatactatcatattgtcatcagaaaacactgatctcagagaggttaagtcatttgtccaagggctcacagcccttctcttaagcgtgggaagctggaatttgaaaccagatgtgttttattcctgtctctaagctctgtgttacactgtcttcctaaattgtttaggtctcttgacagaagtctggaggcctttgaacagtttttttccccaagacttgtctcattttccccttcagctgaaaagagaatataggaagcatttgtaacttccttaagaccaggttttaggtcaaataggctgactatgtgttttgaattaagagaagtttttgtttgtttgtttcctgcccatctctctttcccacagctgccctgagtataagtcaattggaaatggatttggtttaatagacacacatttcctgggagggttgatgttaggagtgtgtaggggcatggtcagttattaaccatgtggtgtggattgcacgacactttggccagtctagctccggacatctgagctaatgtataaatttgtgattgatgtggcaagtcaaaatttctggagattaaaatttagctttgcttcctcccacccacccctttttaaaaagaggtggtggcttatgcctgtaatcccagcactttgggaggtcgaggtgggcagatcatttgaggtcaggagtttgagaccagcctggtcaacatagtgaaaccccgtctctactaaaaatacaaaaattagctgggtgtggtagtgagcgattgtaatcccagctacttgggaggctgaggcaggagaattgcttgaacccgggaggcagaggttggcagtgagccgagatcgcaacattgtactcagcgtgggcgagtgtgcctctgtccacccccccccccccccccccgcaaaaaaagagagtcttagaataatactagggtggtgggtggttaatagatgttgagaggcagatatgatagcaaagtgcagttttgctgaccccatgttgctgatcctgtctggtgtttaatgagctaatccatataacgtgcataagcaccatgtctgagaagtagtaaatgctcaatgcatattaattattgtgtaaatatttcttacatccaataaaaagtgtgaaaatgagggcagaggtggaattagggtcatgtcaaatttctgttttttgtttgtttcatggtgttttgttttttgggagggggtgtttaagtgcattttatgttctgagagaggagattttaggagctgggctggttttcaaagatgaccagtcaaggtgtgttcctcacctgtgaaggttagttaattctcctctctggactctggaactttgtcctattaagtactctttttatcttctttcagaatttaaatatccacatgtgtctctcatctttaaagtcctttcttagcccatttccttcaacccctgcatttcttcattttaggtctgacctttacaaagagtagtctgctcttgtgatgtgtatccttgttttcatctctctgtctctctctctctgtctctctctctctctctctctctctctctctctctctctctctctnnnnnnnnnnnnnnnnnnnnccccaaagaggacattccaggaagaagaaactatgttgttagagatgagagtgaggggtataaaatgcatagaaacactttcatctggaaacaagcattttaattgtagggaatatgctaagttacctccattcctccctccctctccaccccacctcacccccgtccctctctccctttttttgacctgagtagctgggactacaggcacacgccaccacacccggctaatttgtaaattttttgtagagatggggtcttgccatgttgcccaggctggtcttgcactcctggactcaagtgatcctcctgcgttggcctcccagagtgctgggattacagcatgagccactacacatgaccttcacctttcatttatgcactaacccagcctttgcccactactcttatgaagctgctcttagggaggatactagtgctctaactgatgaaacagacttttctgacttgaccttaccactgcatttgactaatagttgcttttcaaggactccctagagataattgagtgctggttgaaaagtagggccttcaaggatatgttttaagttctccgcaatgatataaaggacagcccttagctggagccttcaagaagtttgtataggaacttgttcttatccttatcagttcagctaatgagaggcaaattctgagaggcaaaattcttataattttctaaggatagttataaaacctttttctgctaaaattgtttcaactctgggtggactgtcatttgtccccttgcccccagtagttgtccccagtagagcctttaaatataaggttttaggtttcacaatattatagttctgccttactgcttacccctaacctgttgcgccagtttgggtgtgatggcaggaactaatttcttgtgttttggccagttagctctctgcacacttgcagagtaacaggttctttttcttttgtggcatttaatttgagtaagaccttatatttttagaaattcccagttagctggtaatctctcaaatgaagtggttttttacttgatgagggcatgaagacttttaaaaatcagaagcctcttataaataaatatcttctaggatttttgctaaccacttaatttgtattaactttttttttttctttctgagacggagtcttgctctgttgcccaggctggagtacagtggtgcgatctcagctcaccacaacctccgcctcccaggttcaagcgattctcctgcctcagcctcctgagtagctgggactacaggcgtgcaccaccatgcctggctaatttttgtatttttagtagagacagggtttcactgtgttggccaggctcgtttcgaactcctgaccttgtgatctgcccacctcgacctcccaaagtcctgggattacaggcgtgagccactgtgcccggcctcctttctcagttcttaaaggatgattacttttctagtacctgaattatttatggattcaacatccccccaggacagttctttcctctaccagtcataggaggtattgttagactttgaatgagttgtttaatttgaagagacatatggtttttaaaaaatttgtttagagttcttggacaatattctgttgtaattcatgtagataatttatttgccaatccactgacattcttcccactaatctatttctggttttaatccattaaaggaggctgaaaaggccatttagctctgcctctaggtctataaaaatattgcctaaaagtttctaaaatcttctgattacaaatgactgcttgcaatttaggattttggtgtaatctactttggtaagaaagacttcggggatggtgtgaagcagatacttttccttctacttgttttatcttagagacagggtctctctctgttgtccagggtggagtgcagtggtgtgatcacagctcactgcagcctcaaacttctgggctcaggctatccttttgccttagccttccaggtagctgggactacaggcaagcgccaccatgcctggctaattaaaaaaattttttttatagagacagggtctcactatgttgttcaagctggtctcaaactcctgggctaaagggatcctcccgccctgacctaccaaagtgctgggattataggtgtacacacacttttcttaaactttcttctgattagtgatacctgatctgcattagggttccaacctgttttttggaaccatcttcgaccttcttagggaaactagtagtctgtaagtttgtgaggttctggtgggcatgggagtattagatatgtaaaagttttctaaactcagaaaacttttggtctttttagtgggtttagggattttgcctggggctggagtttaaaaacaacagcctggctttcttttgaagggtgggggtaagtccttaatggaaattgtggggttgtctgtcccatactacatgggtgctcagtaacaggggaggagatagaactgtgatatctaaggcaggaagatgtgagggagccctgtgatgatcaattgtgagagtagtgtgaggtcctcatctgaagagtcagaacattaggattctagcagatgagttaaaggctgagctttcaaggcaggaagtcacggagaaagagctgccctttctttacctcttgttagagaatccttcaaggaagttaattttgagttattgagccattggttgtcttagtgttagagtttaagaatgtagactattgctttgggggttttacctcctttggttctaaggcattgtgggagtgtaagccctcgttgaaattgcaagttccccaaagtggccgcggtaatttagaaactattcttggtataattttgccatagtacttattagacatgtatatgaatttggactataatgaataacataaaagattcaggagtcctgacaggatttgactcttttacttaacagacccccataacaaataccaaaaaggagatttatttcactatttgatagaaaatgtatacatagaatacttagtcagttgaggcagacccagtagtctaggacctccagcctttgaatctggtccaaacgtttgagttttctgagtattctcttaggacacaggtggactaacaatggaacatacacagaatagacccactctttttgtatcactcaaagaagagaccaaatttcctctccatgtctacccacaagaaaccagaaggcttcaaacaaacttgcgagacagcagaacaaactcataaagtcagcggaatcaccatcagaaggtgatggaaaccagggcttactatgttctcaggtgttggtggcttgttggcttcatcggatggctcagtcatatgatctgtgtgggacttccaaactgttaaagtacaaagactgttggagaccaaagattgtgtactgagtgaaaaaactttattgccaagcaggaagcctaatccagcacaaagtctaagcgcgctgtcagggatggagatcctttaaagccaaaagatcatgaactgtccttttccatattagaaaagccaaatttttgagtgttcttgattggttggtggtgatatctgggtttgttggatggtaagcagggaactggctggagatggtctatagcatacatgtggtatgaaattataacatctaactgcctctgttttgtatgtgatatacctgagttaggattatgtcacctgcttacatctgcattggccgcagcagactaggtgtccagattagggtttgtcagagtttagtagtcatttggatatgaggatgtggatattaggggagaggtctgcgtgtagttcagtagctatatactttgaaaagtggtctaatggagaaaactgtcagcttgactgggttttaatctgtttctcaactcatctaaaggtgttctaattatctaacaatgtttagcaaagtgtctcaaaacttaatggcttaaggccagatgcagtggctaacgcctgtaatcccagcactttgggaggctgaggtgggcggatcacttgaggtcaggagttcgagaccagcctggccaataagacgaaaccccatctctactaaaaataacaaaaattagctgggcgtggtggcacatgcctgtaatcccagctactcgggaggctgaggcaggagaatcacttgaacccgggaggtggaggttgcagtgagccaagattgtgtcattgtactccagcctgggcaacaggagcaagactccatctcaaaaaaaaaaaaaaaaaaaaggaaaaaaacttagtggcttaaaacaacatttattttgtttgtgaatctgtaatttgtacagggcttggcaggatcagcttgtcctcactcagtatcagttgcggtggcttaaagactggagcctatcatatttgtacatcagctttaatctagaggtttttgtttgttttttttttttaggggaatacgtgcatgtccttcatgtgatagtttaatgttattcctaagtgtttttctgttaaatctagatatagattttgtctattttatagttataatttcatcaattttttaatgacaaagtgagattgtgttcaggtaagttttgttttgttttgttttgtttttttgatggaatcttgctctgtcgagcaggctggagtacagtggcacaatctcggctcactgcaacctctgcctcttaggttcaagcgattcccttgcctcagcctcctgagtatctgggactacaggtgcctgccaccacgcctggctaatttttgtatttttagtagagatgggattttgccatgttggccaagctggtcttgaactcctgacctcaaatgatccgcctgcctcagcctcccaaagtgctgggattacaagtgtgaggcactgcgcctggcccaggtaagtttttaaaacagaatcttcctgctctatgttaattagtaacttgaatgaaatagcctgtgcttcttaaaaaattcaagatgaatgtgtaaaataacttacaagtaaaagttccaagtatatttggaaaacatggctatatatgaccctgcatggacatgtatgacccttcatgaatatgtataatcctatgttttttgttttttttttttttttgagaccgtgtctcactctgtcacccagcctggagtgtagtggcatgatctcggctcaccacaacctccgcctcccaagttcaagtgatcctcatgcctcagccacccgagtagctgggattacaggtgcacaccaccatgtcttgctcatttttttgtatttttagtagagatggggtttcggtctcgaactcctgacctcaagtgatccgcctgcctcggcttcccaaggtgctgggattataggcataagccaccaggcccagcccctatgttgttctttaatgaggttcttaatgtagaatcatttggaagagtatgtggatgagcttttgagtttctgtaaaccctttaaagtgtgtgtattgtctaagtacatagtttttcttaaattttcaaaggagcgctttaccatcaccatctcattcccctaaaagtagagagccattatttaaggccgtggttttcaaagtctggtgctgagaccagcaacattggcatcactgggaattgagtcatggggccccatatagacctactgaattaggaactctggagttaggactcagcggtgtattttaacaggccctctaggaagagataagatacgtgctaaagtttgagaaccatgaggaccatgactttaaggtgatagagtagacatacaccaaccaataccagttctacatatgtgggctcataatctacactatgttaatttgctagtgtcataaaacagagatctgtgttgaatacaaaattgtatattagaagcatgttcatgtgttcttatctgcatagcaattttttgaacacatgtcatttttgttaatatttaagattaggactaacatttgaaaacattttaacttgtaaaatgttaatgatttggggatttaacacatttgcatttttgcttaagtgtgctttttggcatatgacagtgctttggtaagcactgcagattccctttatcttcagacatttttggttgcaagtaacaggaaagcgacccattcagactaacttaagcaaaaagagaaattattgggaggatatagttttggcacccaaaggggaaggtgtgtggcctggctttggagagacaggatccagaaactggaaagcctcagaaactgagattgttattaccagtggccccctagagtcaggagaaccatctttctaaatgcttatgcttccttctctgtagaggcactggctgtgaatgctagtttcccaagagagaggatctgactggctcatactggatgtggtagctgcttattatccaattagcagtggccagtgggtcaggatcacatactgcaaatgtggccacagatcacttatcctctatggctcatactctctataaatgatattttattgaggcaatactattttctttccccctcccctctccttccctcccctcccctgtcttgctctgttgcccaggctggagtgcagtggcatgaacacacagctcaatgcagcctcaacctcctgtgttcaaacgatcctcctgcctcagcctcctgagtggctgggactacaggcatttgccaccacaccttgctaattttaaaaagttttttgtagagatgaggtctcaccatgttgcccaggctggtcttgaactcctgggctcaagcagtcctccagcctcagcctcttgagtagctgggtctacaggcatttgccaccaaaccttgctagtttttaatttttttaattttttttttttttttttgtagaggcctggcatggtggcgtgcgcctgtaatcccagctacttgggaggctgaggcaggagaatggctggaacctgggaggcggaggctgcagtgagccgagattacaccagtccactccagtttggatgacagagcaagactccatctcaaaaaaaaatttttttttatagagatgaggtttcaccatgttgcccaggctggtcttgaactcctgggctcaagcagtcctcccgcctcagcctcccaaagtggtgggattacaggcattggccactgtgcctgacctaaggcagtataatttatagcattttgatatcgtattaaggttgaaggaggactctattgtaggattatcagacttgctttttagtcagtagtgtgtcatttgttgtagctttatttttgcatgcggtaactttctctgaaaaacaagccatcacaaattagtgaatattgtaattatatcataaagttgtttagtagaaccaccccattataattttagcttattttgcatatatatggataagctatggagggaaccatgtcttcacattatcaaatatgtatagacaagacaacttacgtttaacttaagctttttcctgtctacgtatagatttgtcaaggaatattggtagggtttagatgcttttacatacatactaactaggtgttttgagggcattatgtccaacttggtatcagtagatttttgtcagtaatttttcttctgctgctaatgttgataaggatttggcattatgcctttcatttaaactctacatagcaagttaaaaatggtaatttcaatggaactcggaaaaggatgatgtaaatggcaatacgccattatagaaagaatctaggaaatgtgatgtatattcctttgcactggaaattttactggggaatacttaacaaaacttctggcttgcgatggaataaaagggaggagcagtggaaaaaggaagctttttgtttactgtaaaacaatgcagtgaattagacatagtggtgttagaacaggagtctaaacatgagaaatctaggcagattccattggaatgatgagttatgttatgactcaatctggagccaccttctggagtctcagaggttcggtgtttatagtagttattgaatgcctactgtgcacttttttctagactctgggtatacagtggagatcaaagttaagttcttgatatcatggaacttaatgatctagtgaaggtagaccttaggagctgaagggttcattggctcaactgtttatatttgaaaattttgggtctttatggatgtttaaatttggtaattcctagggttgcttggagaaatgactaattctgaggccagggtagggaacttaaatgagcctagagcattttccatcagtaagaaagagctcttcctttcccctcaatgatggaagtatgtcaaaggaacacacgaaccaatggaaagagctcccaatggccaaagctggaaaaatttgagcaataaaataaagtagtattggattataacccaaagtacaaaacaaatgtttgtgagtccatactgatataaatgattagataggggatagacaaatctcccatgcagaataattccaaacaatttatgtagatatcccactcttaaggaggtatagtataactctctagtccttatgtgtgggttttgtatagtgacatccttccaaagagtacagtatagaaagggggaaaaagaggaactttacagtggaaaaacttgacaaacactactttagctaggtcaaggttaatatcaacagtgataaatcatgttgatagtatgtacccttgatatgatgttatgagaatggtacctttacctttgtggtcttcctcccaacaactcataaaccccgtctaatcatgagaagttagacaaatcccagttgaggagcattccacaaaataccttaccaatattttcctcaaaaccatcaaggccataaataacaagtctgagaaacaataggaaagccagagaaactattacagccacaaggagcattaggagacatgactaaatgtattacggtgttctacagtatgtaaaaagtaaggaaatctgaataaaacaccaattttaattaatgtataatattaatgtataataatgtattggttcattaattgtgacaaatgtcccatattaatgttagatgttcatgataggataagtgagtgtggatatgtgggaacactgtactaacttwgtaacttttctgtaaatctgaaactattctaaaataaaaagtttattacatttatgaattccctattaacccaggaattatttcaaaaatatatagttgtatagaagtattttcttataaattatactgctttttatttttatttttttaaatttattatttttattttatttatcacttattttggggacaaggtctcactctgccacccaggctggagtgcagtggtgcgatgatggctcactacagtgcttttttttattattattattattattattattattattattgcgatgatggctcactacagtgctttttattattattattattattatttatttatttatttatttatttattttgagagagagtcttactctgtaacccaggctgagtgtagtggcgtggtcttgctcactgctacctccgcctcccgggtcccggttcaagcaattctcctgcctcagcctcctgagtagctggaattacaggcacgtgccaccatgcccagctaatttttgtatttttagtagagatggggtttcaccatgttggccaggctggtcttgaactcctgacattgtgatccacccacctcggcctcccaaaatgctgggattacaggcatgaaccaccgtgcctggcctattattattttttgagacagagtctcgctctgtcacccaggctagagtgcagtggcatgatctcggctcacagcaacctctgccccctggattcaagcgattctcctgcctcagcctcctgagtagctgggactacaggcacacgccacgacgcctggctaatttttgtatttttagtagagacgggattttgccatgtcggccaggctggtctcaaactcctgacctcaggtgatccacccacctcagcctcccaaagtgctgggattacaggcgtgagccagcacgcccagcctacagtgctttttatagttgcagtcttctttcctatttgtgcttgtggcctgtgttttcaaatggagcgtatttggaaagctaaatacctttgcactttgttttcttagtagatcatcaggtatttgagtgactacagtttttcagagtctggaagaatgcagaagatgtggaagtttacctttgtttacaatgttacagaaacaaggcaaataaaattttagaacattatgggacaatatacttttctattgtgaatgagagagaaggctcagtgagatctgttattagataagtagttgggccctaaggaatgggtacgcagagtacttatgaatagttaaggaagccatcctgatttgaacataaagagttactaggttaggggaaacaaggagtgagctgcatgtatcctttaccttttagtttgcacatccttataactcgtcagtggttttctgaggattttatttgattcaacaagtatttgcatattatgtttaagatattatataataaactgtagaagaggtttatagcttaatgagacagaggtaagacatcacatgaataactttaacaagcaaaatgagaaagcactataataaaacaagtagaatccaagtgttggaggttcacgggaaggaagagatcaaaatcagactgaaaaaggagagtcagaaaaggcttcacagaagtttgatgaatggataagattttgagggccagtggttgggataataacatttaaggtgggaagaacattatgaataaaggcaaaggcagaaaagtcctgggcttatttgagggaagaggatgagcttgtcagtctaggggttaatgagagagaaaacaggaatcattgacactgcttgagtgaaggatttatagaaaaataggatggagcctgaattcacaatgcctaaactcttttcctaggtggcagttaggggtgagccaaaacattcacttacagtttttctgtggatattagataactcacaagctttaggggttaaagaaaacaatctatgtagaagttttttggcacattgtaaaatactctagatgtattatttaaatgtgaacactggaaatggagataagcagaggtatgtgataaccggctataatctggcaactgctttaggtatgtgaggtggtcagggagaggaagagagataaagacattgctttctggatgactggaaacgtggtgcagttcacagcactacggaggtcaaaaagaagagcaggttcactagggaagctgatgaattccattttgaaaaaatataatttgaagtgctggtgaggaatctaaatgggtgtatgagttcggagcttgggaagagagtgaggctagagaaacagattgggactcaattaacagcatttactgaaagcttgctaggtacataagctttgctatgaatggaatgtgtcccccaatattcctatgttgaagcctaatccccaatgtgatggtatttgaaggtgatgcatttgggaggtaatgaggtcatgagggtggagccttcatgaataggattagtgcccctataacaggagacatgggagagattatgggggccatgcaagcatacagggagaaggtgggagtatgcaaaccaggaagacggccctcaccagacattgactctgctggcaccttgatcttggacttctcagcctccattgatttgtgaaaaacaaatgtttgctgtttaagccacctaatctatggtatttgttttggctaaggcaaacgtcttgccaaattatattcttcttctttttttttttttttttttttttttgagacaagagtctcgccgtgtcacccaggcgggagtgcagtggtatgatctcggctcacgggaggctctgcctcccgggttcaggcgattctcctgcctcagcctccagagtagctgggactacaggcacatgccaccatgcctggcaaattttttgtatttttagtagagacggggtttcaccatgttagccaggctggtctcgatctcctgatctcatgatctgcccgcctcggcctcccaaagtgttagtattacaggcatgagccaccgtgcccggccatgttcttttttaatgtgtttgcaacctcgtaggttaattttatgagaaattttagagttgagtaataataatagccagtgtttattgagcacttgctgtgtaccaggtactggtctcatgttctctgtgtttcaatttgtttaatctttaaaacaacaccatgaggtggctcttaktatccttctgtcctcatgtttacagatgagctatctgaagcaaagagaagttaagtagtttttagggtcacaagttcataagggatagcaccaggttcaaacccatgcattctgaccctaattatttaactcttttatagtgcttatagcttaacacactatattacactgcctctataagtgtctctagaaaaagaaggtaaaggaaggaaacttgggagtggccaaaaagtgatgcaagtctttttctacatataaaataatgtttaggcttcattgcaagtatatacttgaactttacaataaggtttccttctctcggcatccttatgaagaaagtaaattgtgtggtttaatttaaatatacaatattcatctcttgaacagccatcagttatgagtgggtctgtttgaatgaaggagtccagtagagaaggtggtggttgagtctccagcagcagcagacaggataatgtttggtctgcacacagcataggtctttaagtcatggtgaatttttgaatggagaacggtacttttgtgtattttcatcctcatataggaataaagaattcacagaaatactggtttaagatatataacaaatcctttcagatggtttctcaaaataatagctttcgtagagtgcctgctatgtaccagatacctagaccaagtgttttacatttatctcatactgaatgtgctgcttggctttagctgagcttttactttatttatttatttattttagaggcggagtctcactatattgcccaggctggtctctaactcttgggctcaagtgattctctcacctcagccttccaaagtgctaggattataggcgtaagccaccgcacccagcccttttttatttttaacatgtgaacttacaccagaagttgattattatgcttgttaagataagctttactttaaaattacctctgatcacgataagtaaaaaaaattataattgtgactagaataaaatctataattctgactagatttctttaaaatctgcatttattatgtcaaagtagatctattattgataaacttgcactcagtgtttagaaagcttatttgtatagtctcatcttgttttattaatgtaaaaagtacgcatgtttgtgagaactttaccaaaatcttcatctttgttgaaaaaaaatttttaagtagttacttaaaagttgtttgatatgagtggactagaaaggtcattttaaatttgttaactgaggctgggcgcagtggctcatgcctgtaattctaacagtctgggagactgaggtaggaggattgcttgagcctgggcaacatggcaagaccccatctctgcaaaaaaattttagacattagcaaggcatggtggtgtgcgcctgtagtcccaggtactcagaggttragatgggaggatctcttgagcccagaaaatttaactggagtctgcagtgagtcgtgtttgcgccactccattccagcctaagtgacagagtgagatcatctcaaaaaaataaaaatataataaattttctgagaaccaattttgccttgttgaaatgtttaaatgctgatactgttcttaggataattacctcagaacctgtatcttttaatacatcatcaaacatactaattagattaactacttgccaggtactgaatatattaagttaaacttaagggcctagtttgttttgcagcatgaatgaaatgaattgcctaaaattccttcattaaatgacaagatatttacttaaaagcagggctaatatgattgttgaggtaaattactrtatctgttgaaagaggagaattctgaatcttttgcagarcacccttctgtaacctagttttcaattaaccgttttgtgaacctgtgtcaccaataattgctttaactggactaagattttttttttttttttttttttttttttttaaacaaggtctcattctgttgcccaggctagagtgcagtggtgtgaacatggcttactgcaggctcaggtgattcttccaccttagcctcctgagtagctgggactacaggcacacaccaccatgccgggctatttttttttctttttttgtatatttttgtagagatggggttttgccctgttgcccagactggtctcgaactcctaggctcaaaccatcagcccgcctagacgtctcaaactgttgggattacaggcatgagccactgtgccagcctagagtaagattctttaaaaggaagtactagcctgagagagtatgtttcactctatatggtagttgagtttgggttctagaattaatctacttgagttggaatctcagctctagttcttttttttttttttttgagacagagtctcgcactgtcgtctgggctggagtacagtggcgcgatctcagctcactgtaacctccgcctcctgggttcaagtggatttttctgccttagcctcctgagtagcagagactgtatacaggcacctgccaccacacatggctgattttttgtatttttagaagagacagggtttcactatgttggccaggctggtctcaaactcctgacctcatgatccgcccacctcagcctcccaaagtgctgggattgcaggcagagccaccgtgcccagccaactctagctcttaaaagcaaaatcactggtaagtctctatgcctgaatctcagtttcctcatctctaaaatgacggtagtactactacttatttcacagggtggttggtgtacacttgcacatagtaaatatttgataaatgttatccaatatgtttatattctttactaaaaatatattttattaaatgtactacatgtaaaaggacttttaatagcatattaagaaaatattttctaagccgggtgtggtggctgacgcctgtaatcccagcactttgggaggtcgaggcaggtggatcacttgaggtcaggaatttgagaccagcctggccaacatggggaaaccctgtctctactaaaaatacagcaattagccgagtgtggtggcgcatgcctgtaatcccagctactcgagaggctgaggcatgagaatcacttgaacctgggaggcagagattgcagtgagctgagatcgcgccattgcactccagcctgggcaacagagcgagactgtcaaaaaaaaaaggaaattattttcttatccatcaataaataaatacatttacataatctttaatggctgtgtaatatttcaacttgctgtttgctatcatttacttaactgatcatttttatgcatatagaattatatgtgatatatttgcttattttaacattttgtaataacaccttgaatgtgaatctgtgtaatactcttgtttcaagcaacaataactaaaacacataaaaaattgtgtagaagttttctgtagcatttaaatttcattttcatttcatgtttaggggttgagatagaggctgtttctcagagcagaaagatgtaaattgctgtcatgtgccactggtcaggaatggtgtacatcagttgatacttctgaagcactgggccacctgctggaatttgtataggaatgttatcctgaatttcggttttattttacaatgataacataagtttaaagcacatgcagagaaatctgtgttcaaaagcatttatgctacttttgagttgcagggacagtattataaaatctttttgtggggtgaaggaagatgggatgtctgagtattttttttttctctcaagcagtctcattccaatcagcagtgtaattggaatgcaactccaatctggaggaggaaggggaatttttggcaaggatatactaagtagttgggagctttattcacattaagcgtagatagccattcattatgaaaacaactcagtaagaacaagcatagcattctctttctacagctgcgatttactctgatactattacctggtttgttgcatatagataactcctttcctaccagaaaaataaattattgacctaaatgaaaatggtagtatttactgccatctgtacttctgcaaatggttttctctaatcgctgcctcaaatgaagtataagatttccataaagtttaaaaccgtatcttgagaaaacaacaataaaaggcatttatgacatggtatttgaattatacctgacctgtgagctctgagagcaaaggactatgtcttatttttctttgtatctgcagaaactgtcatagcacttggcacaaagtgagtgttcaggaaatgttgaatgagagagtgaatgatgtaggagtattcctttctccctaagtatctcaagatgatcacacctgcatctgtgtgaaatgcagaggctttatccaatatggctgatgtcagttcattttgatcatctctgctaatcatttcaaaccatctgtctgaaaaaggagtgagtacaatagctagaacaagctaggttctgggagtgtagacttaagaatgaaatgctttgaaggaatttgagaagggtagtaacatgatgaagtagtataagcagacttaatctagtacaaatatatgggctgtttgagacattgtccctggtggattctgcagcatggtactgtggtggtgtaatgctacatttgtagttagcactaataaaaattgacttgtgcctactaaatatctgtagtccagtataatgttttgctttaacacaaaaattggtgaaaattaattgaattaattcagatacttcagatttttgtgcctttctgtatatataatttcaattccatatatataagcttactaaacattaaagatattgaaatactgattgctgtctaggccaggggtcctcaaccctgggccatgggctgcacagcaggagatgagccagtgaagcatcatctgtatttacaaccacttcccatcgtgtattaccacctgagctcagcctcctctcagatcagcagcggcaatagattctcataggagtgttaaccctactgtgaactgcgcatgcgagggatctaggttgcccctccttataagaatctaatgcctgatgatctgtcactgtctttcttcactcccagatgggactgtctagttgcaggaaaacaagctcagggctcccactgattctacattatggtgagttgtataattattctattatatattacaatgtaataataatagaaataagtgcacaataaatgtaatgagattgaatcattcccaaaacccccttgcctgctcccctctgccccccctccacacacacacacacacacacacacacacacacacacacacacacacacacacacacacacacacacacactggtccgtggaaaacttgtcttccatgaagccaatccctggtgccaaaaaggttggggactgcggtctaggaaaaagtctgtaccccatagcctttgttctggcctcgcccacctaacaagatttctctcctgttactcccttactgcccagcatttctcaacatttttacctattttctttaagaaacatttagaaagcagaaatgaaacttctcccacactgccacccctccctagtcccatgattcctaatcttagttctactttccatagtttctattacaaaagatgatagattaattttctcctaatataaaattataatattgtatatacattctccaggggattctgatacatacctccttagttgagaatttgctgtggtgacataatcaggagtttgtcatattgaaattcatggattctttgagcatttaccaatcttctgtgattagaacagagaatgaaaagagcaatgggctgtggttctagtccccaaggtacattcccaagaaaaaagaacagtgcagtaaaggctccaggatgtgaaaacaatttatttttacagataaataacattaccagttctcaggtcatgttttgacaatcttccttttaaaagttacaaatcagagtttttgcttccagggcagaaagtaatttagtaaagctggctggaactgcttagatccagcatgaagcatagcggtctgaccaatcttgatattatttctttgttttaagttaatcttgtttcttctagaacactaatgttattttccttaatctcttgattactaaaatgtaatttctcctcataagctttgaacttgattttaaagttctttgttcttttgatttttcaattgttctttgaaactgaatgttaaacattctgtgatttttttttaagaattggttaaacacgaccggataagtatgttttaagtaaagagaaatgataaaaataagatttttttgaggggtggagggagggggacagtgtctcactctgttgctcaggctggagtgcagtggtgtgatctcagctaactgcaacctctgccttccaggctcaagtgattctcatgcctcagcctcctgagtagctgagactacatgtgtgtgccaccacacctggctaatttttttttttttttgtatttttagtagagatggggttttgccatgttgcccaggtctcaaactcctggcctcaagtgatctgcccgccttggcctcccaaagtgctggaattacagacatgagccacagtacctggcctaaaataagatttcttaaatcaaaattatgattatgtgaggattggccattgttatatagtataaaaagttatttagattattttagggtctatttcattcattcaacagatatttattgagtacctatcaagtgccaggcgtaatgtgtgcttggtgcaggaagagatgaggcaggcatgattcgtgctgtatggagtttaccacctccgcaattataagcaacattccaaacttaaacgagaacagtaaaatgtgataagtgtttataaaagtatgagcttctgtgaaaatacaagcggggaaagcttgagagaaacatgttctaaaaggcatccttcccttttgagaccaggagatgagtaggtgaagaagcctaggaagaatgtttcaggcagagagaatggcacgtgaaggctgtgggtgagagagatacatttgagaaagtgaaggttagtgtggctggatcttagacttgagggcctggaagggagctgtggtgatgaaaaatgaggtcagagaggtgagcaggagccagggcttgaagggcattgaagccaatataagtttgggccagaagacctttggaatgttttaaggatcttagaaggggaaatggatggaaagacttaattagatttttagctcacttcaggtccagcgtggagaactggaaagaagtgaggctttgaggcaggggaatgttgtaattacctagacagtagatggtggactaaggtgttggcatcggtaatagagagaagtagacagatgaaggatatttccgaggtagaattgctgagaattgtaattgtcaggatgtcaggagggaatacagtgaaggttgctatggagatttctgacttgggtagtggagtggaaaggaaggctatttattgaaaagaaagtcaactggagggaggagcaggtttgcggggaagacgtgatttttggggggaacgcatatttggtttgtggacctggagttcaggagaaaactaaggatcgggttttatgaatttaggtatcatcataaccatagagtaaatggtaaagaccagagagaatatatggaaaagtggctcttcggattttattttttgagagagaggaagagttctgtcaatctattaagctatgaactctctcccaggaaaaatgtggattctctccccagaaaataaacatatatgtaacagtttacgtataattgcaagatttacaaaaatggacactgtgatcctcaggttacagagtgaaataagagaacctagggcaaaaccctgaagaacttcaagttttatagcacagcaagatctggcaaagagaacttagaatgagttttatgccgtgtagaaccaggtgaatgtggtgttaaacagaactggaagagagggtttctagaagagggagtagtcagcagtggcaaatgcccatgagggggtcaagtgccataaagaatgaaaaatgtccattgtatggacttggtaattaggtctccagggctttgtagcagcagttcagaggcaatggtgagggaggaagccagattgcagtggatcagggcattagtgggaggtaaagaagtagagtcaaaaagtgtaggcagttctttttaaaaatgttttaaaattatactttaagttctggggtacatgtgcagaacgtgcagttttgttacataggtatacatgtaccatggtggtttgttgcacccatcaacccatcatctacattaggtatttctcctaatgctatccctccctaacccccaacccgccaacaggccccagtgtgtgatgttcccctccatgtgtccatgtgttctcattgttcaactcccacttataagtgagaacatgtggtgtttggttttctgttcttgtgttagtttgctgagaatgatgctttccggcctcatccatgtccctgcaaaggacatgaactcatccttttttatggctgcatagtattccatggtgtatatgtgccacattttctttatccagtctatcattgatgggcatttgggttggttccaagtctttgctattgtggatagtgccacaataaacatacatgtgcatatgtctttatagtagaatgatttataatcctttgggtatatacccagtaatggaattgctgggtcaaatggtatttctggttctagatccttgaggaattgccacactgtctttcacaatggttgaactaatttacatgcccaccaacagtgtaaaagcattcctatttctccacatcctctccagcatctgttgttttctgactttttaatgattgccattctaactggtgtgagatggtatctcattgtggttttgatttgcatttctctaatgaccagtgatgatgagctttttttcatatgtttgttggctgcataaatgtcttcttttgagaagtgtctgttcataatcctttgcccactttttgatggggtttttttttttgtaaatttaaattctttgtagatttggaatattagccctttgtcagatggatagattgcaaattttttctcccattctgtagggtgcctgttcactctgatgagtttcttttgtgtgcagaagctctttagttagatcccatttgtctattttggcttttgttgccattgcgtttggtgttttagtcatgaagtctttgtgcgtgcctgtgtcctgaatggtattgcctaggttttcttctagggtttttatggttttaagtcttacgtttaagtctttaatgtatctcgagttaatttttgtataaggtgtaaggaaggagtccagtttcagttttctgcatatggctagtcagttttcccaacaccatttattacatagggaatcctttcccccattgcttgtttttgtcaggtttgtcaaagatcagatggttgtagatgtgtggtgttatttctgaggcctctgttctgttacattggtctatatatttgttttggtaccagtaccgtgctgtttttgttactgtaaccttgtagtatagtttgaagtcaggtagtgtgatgcctccagctttgttctttttgcttaggattgtcttggctatgtgggctcttttttggttccatatgaaatttaaagtagtttttttcaattctgtgaagagagtcaatggtagcttgatggggatagcattgaatctataaattactttgggcagtatggccattttcacaatattgattcttcctatccatgaacatggaatgtttttccatttatttgtgtcctctcttatttcgttgagcagtggtttgtagttctctttgaagaggtccttcacatcccttgtaagttgtattcctaggtattttattgtctttatagcaattggctctgtttgtctgttattggtgtataggaatgcttgtgatttttgcacatttattttctttgaagaagtttcattatgagagggaagaggtagatgatggctggctgaagggaggcttgggtaagacttgagtatgtttaaatgttgacaaggtgattagaaaaggggacaagatagaggatatgtataacagctgtgaagatccccgagaacatggtggtttagatatgagatagaggatagtcttagagaggacagtagacattgtcagtggaaggaagggaaaaagaatgaatatgtaggtttggtggcagtgagttggaggagatctcatgttttctctttctctgaagtcggatgtgaaatcatttcacttcatgaatcataggatagtggtttgtttaaaaaaatcatcattacctcattaaaactgaagattgtaatttagatttttgtgtgtgttacatgtgtattgatcctgagtattctgttcaatttatattatgacaaaagtttggggaggagttctctaaatctagtttgtgatttcttattcttagttatggccctagttttcatgattgattgagtttttatgtttttaaaaacaaaactctaagacatggcctaagggactctgcctagtataccagtatcttgtgcttacttaataattttatttatttagtgatgacatctgttttcaaaaggtttttttatgtgaacccttagagtgattagttatatttatttagattcattcccaagtttatgtcaaatgagcttttatacactaaacttccaataactgtaattcatttaaactgttagtagaagtggatagaaataccaaacattacattcataggtattttatgaactaaaatttacatatatgaaaattgatgtttttctttctcttgtatcaagtttgagttaaagaagttttaagtttatgactctataagcagatttatttatttatttatttatttatttatttatttatttatttatttatgacagagtcttgctctgtcgcccaggctggagttcagtggttgcaatcttggctcactagtacagtggtgcaatcttggctcattgcagcctccacctcccaggttcaagtgattctcgcacctcagcctcctgagtagctgggattacaggtgtgcgccactacacccagctaatttttgtatttttactagagacacagtttcatcatgttagccaggctggtctcaaactcctgacctcaagcgatccagccaccttggcctcccaaagtactgggattacagacatgagccactgtgcccagcctgtaagcagtaattttaaaattgatatgtaactcatatactataaaatcctttttttttttttttgagacagtcttgctctgtagcccaggctggagtgcagtggcgcaatcttggctcactgcaacctccctctcccgggttcaagcgattcttctgcctcagtctactgagtagctgggactacaggcgcacgccaccacgcccagctaatttttgtatttttagtagagacggggtgtcaccatattggccaggctggtctcgaactcctgacattgtgatccgcccgcctcggcctcccaaagtgctgggattacgggtgtgagccactgcgcccggccaaaatttatcctctttaaagtgggcaattcaatattttttagtgtgttcacaaggttgagcatccatccgtgtaagtaatttaatgcatattaacttggaaaatgtggatttgggatatctagttttaatatattaactttaaattcttaaaagatatagtagacatatcttgtcatttaactgatgatttaggagaaggtaatttgatttctcccatgaagtttctgtggcatttagatggagaacagaatgttatttaaaaaaaaaaaaaaagaaaaaaaactcatctatatcaggaaagctttatctttatttgtgatcctcttcagtataaaattatttcatccttaaaatagatataacaacctgactttacatatctcctttgaactatttttcctattgccactgagtttctcagagagtagatcttgatggaagataggaattgaatttctaccttattattagaatatcagatttataaactttcttgccctcagctattactggtgatcattgaaagttgcaaccactggttcaactgtcttttatttgctagttcgaaagtttgtggtcatgtttcataccttgctatagttagggtttaactattcactgctgttttccgtgttttaaaatgtaacagtacactcttaacattttaatttttcccatgtattttttgttttttttttttacagtactctgtgcaaaaaacctggtgaaaaaggattttttccgtaagtaaattaactttaaatcttgtgtattgtatgtagatctttgggaacagcgttttcagaattctctggtttrggggtttctctattcagaagtattgtcagtgttattttattatgaatgcttcggttcagagccatttggcatcacattttttttttagaaggttttgtgctttttaggcttagccctttccttttattcacctctcccacgtatttatgagaatgagtgtgtatgcaggtgtgtaaatgcagatgtgtgtaatgtatattgaaggtgtgcatactactagagttctagaaaaggtttaagagattattttgtgaacactttcttccttttgaaaatttcatgggaaactttactcattcaagattcattggaaggtagaaaagtcattgagcctgcttggaatttccagagtgtgggaaagaaatctctgccacatttgatcctagatgctcttacctctcagattccaaagcagatgtttggttcccatatatgccttatatttaccaatctgttgtaatttttttttctggctttatttagtactaagttttatgagaggggattgggaagtacccagcatgtatattacaatctttattctgttgtagctttaagttattggttaaaaatgatataatttttagtgaaaaaaaaaaacttcagccaacaaaattttttatgtaaaacatttgaaattagaatagagatgattcattaaatttttaaattcaagtcacgggctatgtgtgctgtttgatttcatgtgatagtagatgattttcaggggcttgattaaaagaaataagatatatatatatatatatatatatatatatatatatattctttttagagacaggatcttgccctgtcacccaggctatagtagagtggcacagtcatagctcactgcagcctcaaactcctgggctcaagggatcctcctatctcaccctcctgagtgggtggactgcagacacacttcaccacgtccagctaatttatttatttatttatttactattctttgtagaggcaggatcttgctatgttgcccaggctggtctcaaactcctggtctcaagtgatcctcctacctcagcctcccaaagtgctgggattacaggtgtgagccactgtgcccggccaatataatttaaaattatacttaattcattccacttgaaattttattattttgagtttttgtagagcagaacctgaattaaagtttataaaataacatcttataaaactatatagttataaatgtttatggttatctttctgcttatatgagaaagcaaataggataatttggaacataggacgcaaattataagcagtttaaatttatgtaccatgtgccttctcgccagaagcttgtcacagtggaaggtcccaatggccacagaacttcccatctctccctgttgcctccaatcactgttatctgtctcaggctgctgctcacttcctacctcatccctgttgctactaactgaggtgtacttttttttttttaacctttgataaggttgatctaaggtaggatttatactagtgggcttgcaaagtggcaaatagggttggacaaggagaaaagggagggaagtaaggggagcacttttcctttttttttttttagacggagtctcactctgttgcccaggctggagtgcagtggtgtgatctcggctcactgcaaactccacctctcgggttcaagcgattctcctgcctcagcctcctgagtagctgggattacaggtgcacgccaacacgcctgcctaatttttgtatttttagtagagacggagtttcaccatgttggtcaggctggtctcgaatgcctgacctcgtgatcctcctgccttggcctcccacagtgctgggattatagacatgaaccatcgcgcccggctgagaggagcactcttacagctgcttctgcactctccaagacatctgctctggttttgaagataaaatcttcagttttgtctcccagctttccttttcaaatttccttcctctcgagtcccaagacacagcttctctaataaaatatccagatattcttacctcatttttcctaggatatctagaggaatcatatattaatgttttataaacctttgagagctgattgttaacccttatatgatctttgtccttaaattgtaagtgaaagaaagaaggaaatcttttccctttttcatgggtgtaggcagtaaaaattgataaaaattctaagagtgtgaacttgctttagggataagattaggggaaacagtgtgattatctttaaaacttagaatgggagactcttgatggcctggaaagagaaacaggaatggtaatccttagggcttcagaggggagttagccaggaatggaagttacctcccaggttcacactggccaaggtcgcaggtccattctgtggtagatttacatgtatacttatacagatttttgacctgttaagggttgcccacattaatttcagagacagtaattcctaaattcttcaattaaatataaatgaatgtgtgtttattgatcagtgcagttattaatagtaaaatatagttaagtttttgcttgcgattcagttaaaattgtattgaatgagaaaagcaaattttaatacaaagtacgactatagggtgatgaaatagatatatatttttcatcgcaggaaaaaatacactgccatgtgttgtcttttgaagagtaatttgtatgtgaggtaatactgtttattgggcgctatccttgttgagaaaagtttttttaactcatgtttttgaactgttttcaagcttattggcttttaaaaataagtcacttcccctttcccccagaattttagcaggaaaaatttcaaacataaagcaacagataaaataattttatagtaaagacccaccatctagattctaccattaactttatcacatatttacccatttattcattatgtttttttttttttttttcccccgacggagtcttgctctgtcccccggctagagtgcagtggcgtgatctcggctcactgcaacctctgcctcccgtgttcaagcaattctcctgcctcagcctcccgagtagctgggattacaggcatgtgccaccacacccagctaatttttgtatttttagtagagacggggtttcaccatgttggccaggctggtctcgaactcctgacctcatgtgatccgcctgcctcggcctctcaaagtgctaggattacaggcatgagccactgtgccctgccttcattatctgttttatgtgtattttttatatgaaaaggaatgttttcatttagatttgttcttctgcaacattttaaaaaagatttctgtgtaaggtaataaggtgttttatagggggccaaattgaagtcatttaaaaccaagatgggttggctaaatgttgtgtatgttttttttttttcttggcccaattgaaaatgaagctgttttctttggaaggtagcacacttttgagttgaaaatgttattttattattatttgcagcttttcaagtgcatttgtgtagtaaggaggtttttgagctttagctattttacatgtctcagaaatgatgggggagaattgagacaaaaaaaaattttttttttcccttgagacaaagtctgtctctgacacccgggctggagtgcagtggcgcgatctcgactcactgcaacctccgcctcccaggttcaagcaattctgcttctgcctcctgagtagctgggactacaggcatgtgccaccacacccggctaattttttgtatttttagtagagatgtggttgcaccgtgttagccaggatggtcttgaactcgtgacctcgtgatccacccacttcggcctcccaaagtgctgggattacaggcgtgagccactgtgcctggctgagaaattttttaaaatgcagaaagttctctagccactttgtgtttaccactagatgtctcactaacttcagaaaacctgatagtttttgaccacatgggagtaacttggctctcaagttaaatttttggagaataatataatcaggttaagttgaaacctatgtatttttttattaaggtattgaactggtgtttttgtttactgtgttatttaacagaaagggaacataaaaggctgtgactttcctacttaattaaggatctggaagccacattttgtatggaaaaaattgtttttcttttattattttatttttttatttcaataagttttgggggaacagatggtgtttgattacatgaataagtactttagtggtgatttctgagattctggtggacccatcacccaagcagtgtacactgtacccagtgtatagtcttttatcccctgttacccccaccctttcccccagtccccatagtccagtatatcattcttacgcctttgcatcctcatagcttagctcccacatgtgactgagaacatacgatgttaggttttccattcttgagttacttcacttagaataatagtctccaattttatccaggttgctgtgattatttctttttaatggctgagtagtattccatggtgtatgtatgtatatgtggtgtgtgtgtgtgtatatgtaggtgtgtatatatatatatacacacacatataattatatatannnnnnnnnnnnnnnnnnnntaaatatatacatatataattatataatataaacatatatatacacacacacatatacacacacacacacaccacatttctttacccactcgttgattgataggtgtttgggctgcttcagtatttttgcaattgtgagttgtgctgctacaaacctgcgtgtgcaagtatctttttcgtataatgacttctttccctctgggttaatacctagtagtgggattgctagatcaaacagtagatctacttttagttctttaaggaatctccacactgttttccrtagtggttgtactagtttacattactaccagccgtgtaaaagtgttcccttttcactgcatccatgccaacatctgttatttttaaattttttgattatggccattcttgcaggagtgaggtggcatcgcattatagttctgatttgcatttccctgatacttagtgatgctgagcatttttcattatgcttattggcctatcttgttgatatatctttttttgagaattgtctattgatgtccttaacccactttttgatgggattgtttgattttttcttgctgatttgtttgagtactttatagattctggatattagtcctttgtcagctgttgtttttcttaatccttaatctttttttccactgagatagggtcttgctctgtcaaccaggttggagtgcagtggcatgatcatggctcactgcagcctcggcctcccaggctcaagcaatcctcccattttagcctcctgagtagctgagactacagacgtatgccaccatgcttggctaacttttaaattattttgtgggggatggggggtggtcttactatgttgcccaggctggtttcaaactcctgggctcaagtgatcctttcgcctcagcctcccaaagtgctgaaattacaggtgtgagctactgtgtctggccagtccttaattctttttcattttatttttttaaaaaagcaagaaaccagagagacttaattcttcaactagtttaataacacccaaagggaaagtttagaaatgtgatttttttgtttttgctcataaatacacatttatatgtttatttatttaaatagtagagtgaaaataacaagatagagtgaattcttcccaggaggaaatcttcatttattgagggtggaggtaaaaacattcttccattgaacacatttataaatggttaggtgttactgaaatactatgcatagcactcagcttcaagaacaatatagtcaaatagatttaataccctaacttaccaagtttctttgaaacttaacgcctaaattttggtcctcctttattatttggaagcgatagatcacagaatcatagaattggggaactgataggtgatttgtctgtccttgaaacttggcaaattagtatcttaaaaaaattagcattgataccaacatgcaaaatttctccagtcaccaacacttaacgctgttttgttctagtattttcagctgtccacaggaaatctactctatcccaatgtctaacacatgaagtgacatttttgtctctctaacatttttagttccaccttttaaatttttgtcaaaagaatcattttcattattgctttgggctgaaaactgtattgtcatctttgatacaagtttcttattaatttgtattagatctttcagaatagctctcttgtcatttcctttccctttccacatgacttccctcattcagggtcttttcatcctactgttggataattacaacagcttcatatatggtctgcctctagtctttctttctcctagtgggccctgaataccactgatagaaaaatatgactgtagttacagccatgctcaagaacctgaaatggctccctgttatctacctcaatcagtccaagccctgttgcccgacttttaagcctctcttactgggtcagtcatatttccaatagtatttacttttacaccttagcacaagctctttggttagactcttcaaagtcttttaaatattgtattgtcataccctccttggtgctcttccttttgctaggaaagtcctccttctcctgtatgccctttaaagcagcagcccccaaccttcggcacagggaccggtttcatgcaagacagtttttccaaggacatggggagcaggggatgtgttgggatgaaactgttccatctcagatcatcagactttagattctcataaggagcgcacaacctagatcccttgcaagcgcagttcaccatagggttccagctcctatgagcatctaatgctgccgctgatctgacagaaggcggagctcaggctgtaatgcttactctcccaccgctcacttcctgctttgtggtccggttgtaacaggccacgaacctgtaccggcccatggtgcagaggttggagacgcctgccttaaagcccagatgagttccctcctccctcaaagccctttctttactgttcagattcaaaccttttctcctgtttttctgagctcttacttgtactcactgttggaccacgtagtaaataagaggtaaaatacagcatagtggttaagagcatgaagtcgagagccagacatgggtttagaatctacactttagattctggccctgccatttactactctgtgaccttgggctagttaattgacccccttgtgccttggtttcctcatcagtaaaatagggataataacagtgtttacctcgtagggttattgtaaggattaaggataaatgtatttagaatagtacctaacatagtgatataagtgtttgcgttacaatcagtatcactaagcacttgtttattctcaggtatttttggttttgtttttcatgtatagtatttttatttttccaattagatagtaagctcttttaaggcagagtgttacatcttttgtttcagtctgatttttcctggtagttattcagcaaaactcatttgctaatttgatttctctgtagcctgtgttcctgtataaaaacctttaataagctttttctttaaatgagctactgagggagacatttggaaagaaaaagccatgaatggttacaagaattcatgtaaccattcatgaccccattcctcgggtcagagggctggtaacaacctattaaaaacttccacattatgaggtaacctctagattttggtagtttaaactgggactattttgagacagaaacgagaaaaaatatagttttggtatttaatgtagaagtaactttagtctttttttttaaaaaatggactattcatttatagctaaatgttaaacttttttaaaagaatggaataatcttttgtagcaaatggaatgcttgtataattaatcttctatcttaaatgtcaaattattaattttagaaaatcttttttcacaggacttcctgatccatttgctaaggtggtggttgatggatctgggcaatgccattctacagatactgtgaagaatacgcttgatccaaagtggaatcagcattatgacctgtaggtttcaacaattagtttgaaatggaacatatcattaaattatttgatatagtctttgaaaataatcatgggaaatgatctgggtttcatctgtggtataatttggtcatcacaaaaggggtaaagaaaagcccagtgggaatgtgctttggcttatagacaggttttgaaagatgaggtatctctaaaattctatgaagaagaaaatgaaactggctcacagtagagcaatcccccacctcttttttcaattaaataaaggtattaattcaccactttagaccaattataaaaccagaaataaggatttgggttgcactgaataggcttctttttgcctttatatggatggtttctttcttttaaattttattttaaaccattggagtatatgcacctttttaaaaaggcaaatgatacaataaagcttttactggaaaacagcaagttccctgctccattctcattcctgattcccatcctcaaggcaactgctttaataactttggctgtttattctggtattttcatctgtttctagatatgtattttattttatagcatcacagttttctttttttagttttaggtaatttttttttttttttgagacagtcttgctctgtcacccaggttggagtgcagtggcaccatctcggctcactgcaatctctgtctcctgagttcaagcatttctcctgtctcagcctcccgagtagctgggactacaggtgcccaccaccacattcagctaatttttgtatttttagtagagatgggatttcaccatgttggccaggctggtctcgaactcctgacctcaagtgatccgcctgcctcggtctcccaaagtgccgggattacagacatgagccactgcgcccagcctagttttaggtatttttgaatttcctacctagaagatgattcggctttattttttattattaaaaattcttttaaaattagaaacagtctcactctattgctcaggccagagtgcagtggcataatcatagctcagtgtagcctctaactcctggactcaactgatcctcccacctcaccctcctcagtagctggaactacaggtgcatgccaccatgcccagctaattttttttttaaggtaattttttgtagagatggggtcttgctatattgcccagtctggtcttgaattcctgggctcaagattctccctccttggcctcccaaagtatttggattacaagcgtgggctgtgatgcccagcccagtggttcagcttttaaaattggtattcagcatccccattctcatgacacaagcctcttcctttctttagtcttccaatataattatatgaacctttttggttaaaccattgttccatgtttacattattatgattatgtaaatatccatagttgggtcacaggggtacaagaattacattttctttcttgacaacttttgttttttctgaagttagtagctacttttcccatttgtttagttatctatttatctcctagatagaaatgagaagttatatgtcataatcctcagactctcctatagaactaaagatcttttctccatatattcagttctgtcagtattccattggctttttttcttcttggagataaccctcctgggagtctgtgttctctttctttagtcttgtgtgatggttctctaagacccactgcgcagttgtcctgggacttgcctttattgttatgttggcaatttcctttgtctcttctaggtttagtgacttccttttttttttttttttttttttttgtttactctcctgtttcggtgaactttatcttccattgtcattttgagaaataatacaaagatgggaagaaagttgagatcttatcagaagatatactttgacttcttatcttttgatatggtttgaatataggcttctaggtgaaatatcactttacctccaaatgttgaatacattgctccattatcttctaggtttagatccatactgttgagtagaaatataatgtaaggcacagatgggagctcatctataattttaaatttcctagcatccacgttaagataagtaaaaagaaacagatgacattaagcataataaactgggcatagtggcttgcacctgtaatccagctacaacataacgagaccctgtttcttaaaatgaagcataataatatattttatttaattcagtatatcaaaaatactttcaacatgtcagtataaaaatattgagctacttacacatatatgtatatatacatatttactatgtctctaaaaaatcagcggttttctcattttatgttaagaaaaaaaaaaatcagtggtttattttgcagcttgcctcaatttggactagccacacttgaagtcctcaagggtctcgtggttggtgggtaccattttggaaattgtaggtttagagtattgctgatggcatcctgattttgatctttcatgactgttgttttccactggaagtttctttattcctctgtcactgttattttcttttaaaaaaaattgtggccaccctagtgggtatgaagttgtatctggtcatggttttgaggtgcatcatgactaatgatgttgaacatctttcttgtacttattaggttttatcttacaattaatattaattggctgtcagaagcatctcttatgattgtttccaaagtcattttacaaaacccttgcctttaattggctaagtatacaaacaaaatctaataattaaattttagcccaaaatcctgagtacatattttggtctatatggtaacattgtattcacctatagaggtgtccctctctccctttcaacaaaacatcctgaaacttgtttataaatcatgtatttgttagtaagtcaaagttttaatagaagctaatagagccctctatttaactttcaattgcaaaaggaatttactgtttttgttgccatgtatgttatattacatgaggtttcattaaagtgagagcatgtacttctctatgtataagaaaaggtaatattttggattcatttctggcccaggaatatttggacagaatgtttgtgacatgtacgcttaagtaatacaatatatttcataatttttagtaattcagagttaggctatcttccagaaggtctataattagcaatttcttattatgatttaatgtagagcttcccaaccttttcatatcatggtacacataaaaaatatggcacattggactacacagatgaagttgcttaagccagtggtgcgttgccctgaggactgaggtaatcaatatatgtatttcagcatacctgtaaaccaggcttactagttggacaactggtttaacgtaacttttttttttctttttttgagacggagttttgctcttgttgcccaggctggagtgcagtgacgcaatctaggctcaccacaacctccgcctcccgggttcaagtgattctcctgcctcagcctcccaagtagctgggattgcaggtgcatgccaccgtgcctggctaagtttttttgtatttttagtagagacagggtttctccatgttggtcaggctggtctcgaactcctgtcctctggtgatctgcctgcctcggcctcctaaagtgctagaattacaggcgtgagccaccgcgcccggcctaatgtaactttttaaaaaatgttcagcttgggtaattcagctacttaatacttgattctggctctggaattacatgccagtagatacatgccaagatagaactggtaggtgtattcgaaaattggtacatgcatactgaacaatattttaattcagattttttcatttgcaagcaacagagaccaaattcaaattggcttaattttttaaaagggaatgtactgatttgcataattaaaagcctggggtgggcattttttaggcacagctggatcccggggctcaagtgtaccttccatgtcacttatttaaaagctttagtccttacttaaatggtttaggcttttctgtatactaggtgaatttttctgatattgtaatttattgaatgatactttaagatcaaggttgctggaccaaaaatttgacctcttattgtcattgaaatagagctaggattctactgacatgttattttattatctttttgcatgggttgatgccatgttaacaattggctgtggtagagcttttacatacttacaggcatatgcacagacaagtacagtaacgcttttccctgctctgcttgtctgcaggcagtgaagtgaaatctgcaagagtcctgctcgctcaaggcctgcatacaggaaagaagcaggggaaaagcgttacaaacagcttttgttctacagcattttaaaatataacaggtaggtcagatttttggtctgtcagccttgacactatcccttgaaaagtaggtcatgtcatcgacatgtatttaaaatgtgactgtgataaaagtttttaagattctttttcttgcaaagaagttatttaataaactcccttagtgttattagacattagctactaaaatagcctttttactgactagaattatagcccagcttgagagtggcagatgtgataaaaatatactaaaattttcaagatttttaaaaatttaaattcaatcctgtggattaactcaagacatattttgcataatctagccagattctgaagcatattagtaactttagaatataaaaagaacaaaagaaaaattttacgccaactgcctgtaactaccaagttactcatgcagccgttttgttttttaggtatattggaaagtctgattcagttacgatcagtgtatggaatcacaagaagatccataagaaacaaggtgctggatttctcggttgtgttcgtcttctttccaatgccatcaaccgcctcaaagacactggttgtgagtagatacgagtgcttttccaattaaaaaacatatrtgtgtgtgtgtgtatatgtatttgtgcatatacatatatacatgcactatatatgtatcctcaaatatatatttaaaaataatatatatatttgagtatgttggtagggcttcaaacacaacttcttgtgcatgtctgaaacattggtaaaaattcctgatctaaatttattttgtagacttaaaaaaaaaagaaacattttaaatatgtgaaacttacagccaaatcagggctgatgcttcatttccagctaatttaaaagtattaagaaatgattgatatccagaatggcaaaaataaaggtatcaggatgtatatgccttttaaaatttcttagtatccttttctggttttggtggatttgtggatgaaatgcttttatttaggtgattggagtatttaagctggcagttaaagggcaattacgaaggggtaagaatggtataatacataaaactgctgtgacaaaattaaaagttaaagattaaacgttattttgagtgtacaacagctgtattaactacttaactgtagctgagtttatcatcagcctgaggatttagaagattagaccaagatcaggacattagaagtggttttcataatggatttataagttgacttagcataaccaggtgagtcttttggatgggtctttccattggaacataaatgggaattcctttttcaacaggttttttttgtgtgtttgtttctatagaattcttttttatataatgtaaaaaataccgttagtcatcgtcatgggattttagcccagatgcatatgctaaacaaactcacataagatctaaggaaattaataaacaaaaaagagtaaatttagcattgactattaaatatatcaagagattgtctcttttaatgtagtatgataccacagcataggtatatattgaccttgtgaaaaagaaaagggcagaaaattgagctagaagttcttagtccaagatatttaaaggcatctaagaaattcttgtatttctgggctgacagggtaaccaacagtagagaaaagacactgggattggaaaaaatgaattgcatataaaagtaaactgttttattactcagcaaactgaaaacttataggtcaaatgtctgacattatccctagttcaataagtttacagttattgaagacttaatgtgctactgttctaaaccctggctgtataaaggagaaaaaggcatgaatcctgtcctctgagaaggaagggcaaaggcctgctggcaaagggagcatgccgcattggaaggactgaataggagaggaggagttagttgctctgcagaatccactgtatagccagcttagtagcacccatttattttgcaaagggaaaaatgtctgtatttttggttggataagtagggactgtagtttaggggcatggatttttctgtttcttgtgactgcttcattgtattaatttatttgacttttttgatgtgcagtaatattgaatttatcaaatatttattgagcacctacctgatgtaatgttctaccagattggagtggaaaatacaaagactaagatatggtctcctccatttatcaattcacagataagtagacagatggcatacagttgtaaaagcattcagctataagtgctgtaatcaaagtaaaaccagcgtactttaggtgacattgttccttactgtaactttcagggccaggtcagtgttatatctcttttacagatgaggcatctgagagaagaaatgatttgctcctaaatgaatgagtgacagaactgatgcaaacccagattttacagtttattcttggcttcttatgaatacttttttgggtccatgtcatttgaaatggttagttaaaaaatgataatgacaactaacatttgttgaccacttatgtgccaggcactatgctgagagtttggcataattatctgatttaatcctcaaaaaaatatgaggattcacatattgtcatatgtgagaaaaccaaggcttagggataaattccttaagaccaacaattattaagactcagactaaagtggtctaaaagttttggagagaaagtgactgcatgttggcaatgtaatacaccagtgtttggtttttgaaatctgaactctttaaatgataggtttgatttctaatggattgtggaaatttattgtcactctatagatgttagaatctctgataccagctaattttttcgttgctttctttgttgacttcaaatagatcagaggttggatttatgcaaactcgggccaaatgacaatgatacagttagaggacagatagtaggtaagtgtggaatttaaagttacatgaattttggtttcaaactgacctaaagtgtaaaataccttttaaatcaaagtataataactgtagcttcattgtgttggcctgaattaaatgagccaggtaaaatgttacagtgaatccaggatccaggttaacttaatttaaaaaactttaatgtaaaaaaaaaaaaaagttttgtgaagaactgttgatccttcaggatataattctttcaaagtatcctaatatagtagagcactaagttcagactttataaatgttattaaagtttactgaaaataattctcaaactagtttttttagtaagaagagaacattctattgaacttgttttaatgtttaatgctttacagctttaaaatctatgctaattgagaaaaaacagaatgagcaatgktagtgtaacactggaaaaagggagaaattgttaccttactcatgaggcacttagtagccttatatggtatttagggtgtcttgaattgacctggagggaagggcttgatataaaatttgctgagacctttcttaagaattgatagagatttgatcaagatgcctagtatggaaggacactgttcatcttagaggcttcttaaattaaagaagaaaaatgtggccaggcacagtggctaacacctgtaatcccagcactttgggaggctgaggcgggtggatcacctgaagtcaggagttcgagaccagcctggccaacatggtgaaaccccatctctactaaaaatacaaaaaatgagctgggcatggtggcaggtgcctgtaatcccagctactcgggaggctgaggcaggagaatcgcttgaacccaggaggcgaaggttgcagtgagccatgatcacaccattgcactccagctgggtgacaagagcaagaccctgtctcaaaaaaaaaaaaaaagaaaagaaaaattcaataggaatgtcacacttcatgatagaacagaacttagtgagattattttgttatgaacccatcagagaggttttagttactgaaggtactttattttacaaggcagtgaattgggttcatagttagagaaccatcagagtagccacatagcaaagccctattgtggttatcccagggaagtatctataccagcgcaccccaccatttttggtaccaggaaccggtttcatggaatacagtttttccatagaccaggctgggggtggaggtggtttcaggatgattcaagtgcattacatttattgtgcactttattattattacattgtaatacataatgaactaattctacaactcaccatcatgtagaatcagtgggaaccctgagcttgttttcctgcaactagatggtcccatctgtgggtgatgggagacagtgacagatcatcaggcatgagagtctcataaggagctggccttgtgtgtgcggttcacaatagggttcgtgctcctatgagaatctaatgtcgccactgatctgataggaggcagagctcgggtggtaatgctcactcacctgccactcactcctgttgtgcggccgggttcctaacagaccctggaccaataccccacccatccatggcctgggggttggggattcctgatctacactacatcattactgataattcctgtcattcttagattgagaagggagcaaaaaaaaaaaaaaactcaaaaataaattcagtcatacaacactttcacatgtaagtgttccttctgtatttgatttgttatgttacataatgcttgccaactactgtctagtagtaacaatagttttactaggtatgaatttgcatttatataaatagcaaactttgttagacattagaagtatacctactggagtacaccacatagaaaacaaatgttttactcttaaatatgtgtatgcctgtatatatgtatttatttaaagctcttatgtgaatctggtgttcataataggaccattaataaagagagaggcaggctggactcaaacattatgattctttagttttgtcattcaaaaacagaatgagttccagttcgttcagaatgagccctctaacaaataattgtaagtaggtatatatactttttggaaaatggagaaaaggacactagaagactaactttaaaaactgtattcccgggccgggcacagtggctcacgtctgtaatcccagcactttgggaggccaaggtgggtggatcacgaggtcaggagttcgaaaccagcctggccagcatggtgaaaccctgtctttactaaaaaatacaaaaattagctggtgtggcatggtggtgtgtgcctgtagtcccagctactcaggaggctaaggcaggagaatcgctttaacctaggaggtggaggctgtggtgagccaagatctcaccactgcactccagcctgggcaacagagtgagactccatctcaaaaaaacaaaaaaacaaaaaacaaacaaaaaaaactgtattcccctctagtatttttatatacataaatatgtatataaaatgtatatgtctttaattccagtgaacattaactttttactttgctttctttcacttaaccataatcatttttagtatttataatctttgtaattaattatttttaaaggatgaagtatatagatatatcataacttaataattaaaaaatttttttgctattataacattgaaacttgcaaatatttttgtacactttgctgtattcttttttagaaaagaatctcccaaatttagataattgattcaaggagtacaaacttttttccttgtttaaaactgttatgccccagctacattgggaggctgaggtgggaggattgtttgagcgtgggaagtctaatgtatcgttattgttattacttgaatgtataccttttttgtgattttttttagaggagattatactgaatttttaaaaactggtttaaatttatcataaacatcttttttttttttttttttggaccataaacacatttctatagcattgttacttgtttttttttttcctactttgcattaaggcttgcaaaatctgtagcatttttaatgtgtgatagcccatggtgggtatgtaattcatttaaccagttaatagctgtgctattaacatagcattctggagatgtaaattgaagcccatgaaattctttagctttgaatcttactattattctaaacaatgctaatgagaaaatacattgtttctactatgattgtattttggtacgcatttcacttgttttatctatttaaaaactgattgatacagttgtctagtacagttttcatataatgttttgtttacatttgccaagtaggtgttcatagtgttctctcctctaaatgggacttaatatcaaggagctctgtgttgaactgatctttcaaaatgtttacagagctggaagatttcagaattttgagacccttctttgaatgaagggtccttagatgtaatacttgttgtgctgacctattatttaagaagttggatttatagccaagtttgactacacctccttctgtcttttgggagagttaccagaactagaattaaacaatactggagtggcaaagaaggacttcagagatataatttaacgtaactttttcattattcagacagggattatctacaccttaagtatattaagtgttttgttcaaggttacagtgctaaactagttactagagcctgctctagaattcacatctcttccttcttcgttctttgtggtggttttatactacactggataatggtgtcctgttaaaactccatcaatccaagaattgctcttttgctggaataccaggatggccctcttgctagaatacagtgtatttttatttatttattatttatttatttttttgagacggagtctcactctgttgccaggctagagtgcagtggtgcaatcacggctcactgcaacctctgcctcccaggttcaagtgattcccctgcctcagcctccccagtagctgggactgcaggtgcacgcaccacgcccatagttcctcacccggctaattttttgtattttgtagagacggggtttcaccatgtttgccaggctagtctcgatctcctgacctcatgatctgcctgcctcggcctcccaaagtgctgggattacaggcagaagccactgcgcccagcccagtgtattttttagatggtcagatgatcaagtattaaagtcaaattaatatggacttttcaaacttctttgtacatgaatacacccttaatatgttatgcctcttcctttttttttttttttttttttttttgagacggagtctcgctgtatcgcccaggctggagtgcagtggcgcgatctcagctcactgcaagctccgcctcccaggttcaagcgattctcctgcctcagcctcccgagaagctgggactacaggtgcccaccaccacgcctggctaatttttttgtatttttagtagagacgggatttcaccctgtgttagccaggatggtctcgatctcctgaccttgtgatctgcccgcctcggcctcccaaagtgctgggattacaggcatgagccaccgcgcccagctatgcctcttcttaattaagtacagtagtgactctgctatgcaccattactatggtgaaaaaggaattaggcttcttccatgaacgtaataaagtgtagaaaaccttagaattctaatattactcctaaagggaaaaatctatgggaaaagaaattataaattttagtagaaaccaaagagttcattctaaagtattaaaataagctaagtcagatgtcttctgaagatagaaattttagattataatagttctttctagttgtatgaatcttagtaatatttctgtcatttaatagtaagtcttcagtccagagaccgaataggcacaggaggacaagttgtggactgcagtcgtttatttgataacgatttaccagacgggtaagctaacatcactgaaatcattagagaaatatatagataatatccttaaaagaatagaaataagtgggtgtttattgtatattaaatggtgtttatcgtatattgaatgtagattttccttctaattgtaaaattaatggaagatcttgtctcgacaaatttataaaataagccacaaattagatgtgttaaatttggttattaagagttttgactaggagacaaatgaaatttcttgacaaatataactctcttgtaaatattatctagttaaaaaaatgttgcttgattaaattattcaaaacaggccatgcaagtgctaaattagaaacattgctatatttaagagggatgggatggataatttgtgtaatagtaattaaaataacatagtaagatttcattgagcatgtatatggcagatactgttataagcactttatgtacatatcatttaattctcatagcatcttggaaggcagtatatagccatgcttctgaaatcagaccacctgagttctaatccttactattctgtgtattggctttatgaccttaatttatttaacttccatatgctttggtttatatttatttacaaaagagtatgagtgataatagcatactcataaactgttgagaggatcaaatgaaataattcaggtaaggcactttarcacagtgtcttgcataaaataagcgcttagtaaataattagctactattatttctattgctactattattgttaccctcaaaaactaagagagaagttatttgcctaaggccacataataaatggcagagccaaaacacacaaacctgtcttgattctaaagtcatgatttttatgactggtctctttgatactagttctaactcttttctgattttatttttaacattcaaagtatttttaactaacttcgatgagatataacttacatgtaataaattgcatccattgaagtatataaatggttaaattttaactccaattattttttatacaaaattttatacccaggttatggtatttactcattttttaaactgttaaaaatcactataattaactgttcgtaggtcactttagcttctagatatgtctgttagctcttttatagatatgaggtagattatggtatttttgaaaaggaaatttaggatgaaataactaatcaatattgagagagtgccagcagtaataaggcttattgttctaaacttgccctacattattgtactataattgtaatcacaggagggaaaataccctagcatctctttattttctgtcttttagagcccttcaacctctgccagtatctttgtagaaatattaacattatcacatttctgtagtcatttggctctttttcattaaattaattatggtaaagagttgatagaaagtagcagtcttggccaggcatggtggcttacgcctgtaatcccagcactttgggaggctgaggcgggaggactacatggtcaagagatcaagagcatcctggccaacatggtgaaaccacgtctcttctaaaaatacaaaaagtagccaggcgtggtggtgtgcacctgtagtcccagctactcaggaggctgaggcagaagaatcgcttgaacccgggaggcgnnnnnnnnnnnnnnnnnnnnnnnnnnnnnctgtttcgattttttttttttttttgagaaggagtttcgctcttgtcaccctggctggagtgcagtggcatgatcttggttcactgcaacctccgcctccccggttcaagcaattctcctgcctcaacctcccgagtagctgggattacaggcgcatgctaccacgcccggctaatttttgtatttttaatagagacagggtttcaccatgttggccagcctggtctygaactcctaacctcaggtgatctgcctaccttggcctcccaaaatgctagcctcccaaaatgctggaattacagacgtgagacaccgtgccagccaatagtcttcatttttaaaaaattagtttgggtaggctaaatgctttgaaaagcttttggccggatgcggtggctcacacctgtaatcccagcactttgggaggccgaggcgggtggatcacgaagtcaagagacctcgtgattttatggttaaatatattcttagtatagccattttccatattctggagtaattagtatgaatttaattgtgtattgttgacattattaaaaattctcagagtttggctgatggaaaatatttgttacacctcagcataaatactttagaagcttcagaatcccataaaatatattacagagttctaaaataagttgaaaaaattatatattctgtgaattgatacttcgggttggcattcccgatttgtaacagcasatgtcttactggcttgcttgttgcactgtgtccaagtttcctattaatgccttatcactcaatatttttatttaagctgggaagaaaggagaaccgcctctggaagaatccagtatctaaaccatataacaagaactacgcaatgggagcgcccaacacggtaagaacatacaaatattttctcatgatctatgccagccaccctcctgaagtccttttctatttatctgtcagctttactagattttttttcttggtttttgctgtcgtagatcagtagatcttataacaggtgccattgttattttttaaaagtgatcttcaacagtttgtttgacaggtcatgctgtcattgtagctccagggcctgcagtggtactcaataaatatttattgaatgaggcagggcgtggtggctcatgcctgtaatccctgcacttttcgaggctgcctgtaatccctgcactttgggaggccaaggcatgtggatcacttgagttcaggagtttgagaccagcctgggcaacatgatgaaaccctgtctctaccaaaaaaattagctgggcatgtgacttatgcttgtggtcccagctacttgggacgtggaggtgggaggattgcttgaacataggtggtggaggttgcagtgagccaagatcgtgcccgtgcactctaacctgggtgatagaatgagactctgtccccaaaaaaaaaaaaatattggccaagcatggtggctcaccactgtaagcccaacactttggaaggccaaggtgggcggatcacttgaggtcaggagttcaagaccagcctgaccaacatggagaaaccccatctctactaaaaatacaaaaattagctggacgtggtggtgggtgcctgtaatcccagctactcaggaggctgaggcaggagaatggcttgaacccaggaggtggaggttgcagtgagccgagattgcgccactgcactccggcctgggcgatagagcgagactcagtctcaaaaataaaacaaataaaataaaataaaataaaaatcgaatgaattaaattgataagcagaggaatctctgaactaaatcttgaagaatgtcaggtatggtcacttcatggagcttactgtataaagacattgggatgcaagataaattttgggaactgcaaagaggtgcttttgaagtaactgaaaacaaatagtctatgtggctgaatccccttctcctcacccttttaagtgagaacaaaatttgccatcttgtgcagtgttttgttttgcctgttttccccttcttgagcaggactggcactaggcataaaataccaaattcttttcattagctgcacctacttttatttatacagaactaattgcttaactcattggatcacaaggttttctcttttacattataattctcaggtaaaagcttagctcatgttgccaagttgcatttctagtattaaactgccaaggaatttattgaagtacccatttttattatatctgagcacaaatgaatatgtacttgtgtcagtgttcaaggtttcacttgaacaccaatttccttctgactcatttaaccagtaaaattagcttgaatttctacatgtataaaaggatgattgttgttttaaatgttaatttttttttttttttggagatggagtcccgctctattgcctaggctagagtgcagtggtacgatctcggctcactgcaacctctgcccactgcaacctctgcctcctggattcaagcaattctcgtacctcagcctcccgagtagctgggactacaggcgcccgcccccacacccggctaatttttgtatttttagtagagatggggtttcgctgtgttggccaggctggtctcaaactcctgacctcaagtgatccgctcgcttcggtctcccaaagtgctgggattacaggtgtgagccaccataccctgccatgttaatttaagaatgaactcttgattatttttttattttgaaagatctgcaatagtagactggaagccccttaaagagacaaactgtcttctttccttttgtgatgtattgtcaaatgactgggtgacttttttagattgggaggtctgagggacctcttaggaggcaataataaactgatttgaatgacaaaaaagagccaggcctagggagagtaggagaaaagaatatgccagatggaaggaagagcaactgctctcaggtggaatgaccttggcaagttcaaggaacaggaagaatatgagtgtggctgaagcagagtgggagggagaatggtgggaagtcaggtctgagggagaggctatagctagatcaagcagtgttttgtaagccagtctcacatccacagatacgtatggattttatatcaaatgtcattaaagtcatttaaatacatagttgatgacatgcttatcatttgcatttctttggtgcttagagacttcaggtttgcttttactcagagttcttgaagtcattatacttgtattagtcattctgttttcagacatgataagtggttgttactgcagtatatatatattgtctagagaactctacttttgatatctaaattgataacatcttttccttgttaattttcaatagaccggcatccgaatattctagccctggcagacctcttagctgctttgttgatgagaacactccaattagtggaacaaatggtgcaacatgtggacagtcttcagatcccaggctggcagagaggagagtcaggtcacaacgacatagaaattacatgagcagaacacatttacatactcctccagacctaccagaaggctatggtatgacaactacaaaggaaaaataaaatgtggtttactgatttcagtttgctgaggaagtcagaaaatatattttgaaaaagttattaatctgagcttagggattctgcatgaaaataaatataaaacctcccaactttgaaaagtctttgaagtggtagatgactacctaaccaacagtttgaccttgtgctcatcattcagcctcagcgtttgtgctcttctataatgaagtgagatgactagtttataacaaaggtagtgtgagaagcatacgaaatgaagtgagactgttttgtaaataggcactgtatagaaaggtaagatggtattgttactgataacggtaatctgaagttcaacctatgacataattttttagacatatatatttagaaataattttaaaggcatatttctgatcatatatttgtattgtctgtaattttggattatctgattggattgttgtaaatgactgagtcacttctatgtttgtataaaatgattacaatcttatataaaatcctagattataaagtttcatgtggaagataacatgagtcttctcctaatagaatacggaagtttctaatttaataccatcttgtgaatccttgtatatagtctgaacttgacttcctcttcttgccaaaagctcaccaaggttacttacatctttgccctcttaacagactatagataaaccactttggattgatgttgacatctaatgaccaacactgggaattgccacatctaagttttattttactcaagaatatattttaaaactcttctgcaaatgcatgattcttattttagttttaaatgtattttagctctttaatttgaaaaaacttgtccattaactgtgctatgactcaaaggttaacttttagcacaatcattaaattataggcttgagtgacagacagacttaggacctaggttcgtatcctggctttgccatgtaacaccgagcacattatttaacctctttgagcctcaattttatcctctatagaggaaaataacagcaccaaccatctaggtttgttgcaagaaatcagtgatatctaatttcatgtgaaatgctggcacagtgtctggcatagtaaattttaactgtcattatcagtgttcagacctgagaagaaatactctcctgccatttctctttgagattataaggcaagctctttagagtgggagtggttatacttctacaatatttctgtgatttgaattttaaaaactgtacaaccaaaacataaaaataaagtggataccaaggctgaagttattacagctgtcctctatagtaatatgattttgtttataatctgtgaaagtttaaagtttaaatttattgacattatacgtttataaacaaattagatttatactaataaatattagtaatagttttttatgtattgaagtttctcactggattttgtctaaagaaaagtggttctgttgttctaaaaaaaaaagacaaaacaaaacccaccataaagaaacccttttagagattgttctcttcaccctggcctttcctctgtcttcccaaggattttgagttcattttgtccttgacttttttctccccagtgtgcgtgcttgctctttagtcctcttctttctaatttggctatttttccatctctatctgtttatgacatagaatgtctccccagtatctcatctgttttgcttctctttgagctcaaatgtaatcttgagaatatacctttgtctagcaaagagaaaacataagttttggtataaaattaggcataataagcattatcaacctccagactctttgaaaatttctggaagttcctcctcaaatcttcccaatgttggccagcctctttctcagagccttttatacatcatttaaaattttttagttattagtattgtgacaatcttgatttgttttccattgcaacatatttagtatttaagccacgttataagtttagtttgtttatggatagctggcctgtggccctcatcatttgtaaaattgtttccaagagacagaacaaatgatttgtaaagcccttttttgataataartaaaatagaytggtaatttggagatttttccctattagtatatcatcttagtgtatataactgtctttgatctggacactctgaatgtttttgttatcagtgtttattaattttacagaacagaggacaacgcaacaaggccaggtgtatttcttacatacacagactggtgtgagcacatggcatgatccaagagtgcccaggtaagaacgtattttaagcactctttagaccatcraagagccatttcacctaggatttctttgatttttaagaaatttttaccttttaaaaatagtttatrtaaaagtttgactcttctgatagttacttcagttttaacgtttagtagaaagtcctgcctactgctctgcaatcccacctcagttctcccctccctcaccagttcctagccaccctcccctgcttccccttaaaaaaaagtggaataggcagggcatggtagctcatgcctgtaatcccagcactttgggaggccaaggtgggcagatcatgaggtcaagagatcgaaaccatcctggccaacatggtgaaaccccatctctactaaaaatacaaaaatgagctgggcgtggtggcgcgtgcctgtaatcccagctactcgggtggctgaggcagggaatcgcttgaacccagggaggtggaggtttgcagtgagctgagatcacgccactgcactccagcctggccacagagcgagactctgtctcaaaaaaaaaaaaaaaaaaaaaagtggaatgaaaacatggatcttttaggagtttgaaatttgtcctagggcaccaagcaggtggctcttacctgtattcccaacactttgggaggctgaggcatgaggatcacttgagccccaggagtttgaaaccagtctgagccacatagacctggtctctaccaaagattaaaaatcagctgtatgtggtagagcacatctgttgtggtcccagttgcttgggaggctgaggcaagaggattgcttgagccatggaggttgaagctgcagtgagccttggtcgtgctacagcactccagcctggatgacagagcaagaccccatttctctctctctctctctttttttttttttagtgttttatttatttatttatttatttattttattatactttaagttctagggtatatgttcacaacgtgcaggtttgttacatatgtatacatgtgccatgttggtgtgctgcacccattaacttgtcatttacattaggtatatatcctaatgctatccctcccccttccccccaccccacaacaggccctggtgtgtgatgttccccttcttgtgtccaagtgttctcattgttcaattcccacctatgagtgagaacatgcagtgtttgtttttttggccttgcgatagttggctgagaatgatggtttccagcttcatccatgtccctacaaaggacatgaactcatccttttttatggctgcatagtattccatggtgtatatgtgcccttaatccagtctatcattgatggacatttgggtggattccaagtctttgctattgtgaatagtgccgtaataaacatacgtgtgcatgtgtctttatagcagcatgatttataatcgtttgggtatatacccagtaatgggatggctggggcaagaccccatttcaaaaaaagagaaagaaaattcgtgtagtcccagctgctcgcgaggctaaagtgggaggcggaagttgcagtgagctgagatcacaccactgcactgtagcctgggtgacagaacgagacccgtctcaaaaaaaaaaaaaaaaaaaaaaaaaaggatagaaaaagaaaattgacctggggaataacggaacacataccctttaaaaacgggtagtaggttgatattcttaattatggttcagcttaaaaaaaaatctttgaaaaatttaacctcataaatgcattcaatgttctgttatgtgttccttaataaaattccatttttagaaaacaacgtaatttaattaattaattaatgtttttgagatggagtctcattctgttgtccaggcgggagtgcagtggtgcaatgtcagctcactgcaacctccgcctcccgggttcaagtgattctcctgcctcagcctcctgagtagctaggattacaggcacctgccaccatacccagctaatttttgtatttttagtagagacgggattttgccatgttgtccaggcttgtcttgagcacctgacctcaggtgatttgctcacctcgacctaccaaagtgctgggattacatgcgtgagccactgtgcctggccctaatttaatttaaatatccaaacttgtgtatttcagctgcagatattgcatttcctaaccaaaatgtcaattacttttaacttcaaaaagatgaaatgacacacaaataaatttagtgatttaccataatttttggaacattgttttctccctgcctccctccctctcttttttttgagacaggatctagctctgctgtccaggctggagagcagcagtgcagtcctggctcactacaacctctgcctcctgggttcaagtcatcctcccacctcagcctcctgaatagctgggactacaggcatgcgccacaataccccgctaatttttgtatttttagtagagatggggttacgccatgttgcccaagctagtctcaaactcctgagctcaagcaatctgtgcacctcggcctcccaaagtgctgggattacaggcatgagccaccatgcttggccctattttgagttattttttaatgaacagatgcaaagtaccaagtagtccagttacaactggaaaaaagcttgaattctaaattaaattctaaatcaactttgtatgttgcacatacaaaggatttgtaggatgtggatattttatgttaagcacagcagcgcccctcctccaaaacaaacccccagaacaacccacagaaggttgtttttttttcctgcctaaagcttatgctcaggactctattgtgtatttgaataaaaaacagatgtgactagctagtcttgggttgctttgatactctctatttataaataaaactgtgattatgaaaatgtcttactttgtgttatagagctcagaattctttgagggtggcaaccaagggaatgtgctattactcattactttatcaaggttgccatttccatgtcttgacaatataagctgttagtttttaaaaagtagtgggggccgggctcggtggctcacacctgtaatcccagcactttgggaggctgaggcaggaggatcacttgaagtcaggaatttgagaccagcctggccaacatggtgaaaacccgtctctactaaaaatacaaaattagccaggcatggtggcatgtgcctgtaatcccagctactcaggaggctgaagaagaagaattgcttgaacctgggaggtggaggttgtggtgagccgagatcgcaccgtggcactccagcctcggcaacagagcaagaccccatctctaaaaaaataaatagataaaaagtagtggggaggaaattttacttttttttttttaagcttactaaaaaaagaaaaaaaaaatccaagggcctaacttttcaaaatcagttttattatataaattgtaaaaagctttttggattctgtttatctagttgaaggtcaataataagcttttctttaaattaattagaaattacttgtaggaaatgtatagaataacaatgatcattttttttaactaaatgatttacaatagtgagaaagttgaccttgagttacatgttgaaagaatagtatgtaagctggcaacagaaattgaaattgagacagatttcagcaccactgttggtaacaggctcttattccagaggaaacatgtcagttttttattagtgagtaaaggatttctgcgaagctttaagaatatctcatgttgagtattgacatgtattttgaatgatgattttatgaaataacacttgggattatttttcttattctgtatcccccaaattaccttaaaaacttacatcttttgttttggaggatcctttagcaaatatgccttttgtatggaagatcttttatgaaagtatactataaatatttagtttctattacaatatcactattcgaagatatttataaaattgcaaagtcagactctttaaaacaaactttatttaaagatatccaggatacctagatttatccaagaaatctcatttcatcatgttttgcatttctctttaaaacaatggttaatgccttgttatttgttatattgcatactgagtgactgtagtcttgaaatacagatctgtgttactttgtatgactgtataacattccatttttctttaaccagctcccagtgagacataaagattatttctagtgttttgctcttttaatcagtgctttagcactctcccgtgtatgactgtagatttataaaattctaaataaaatgacatgaaatgaaattctacattttatcagtagaattgttcattttttattttaattttttttttaacttttaggttcaggggtacatgtgcaggtttgttataggtaaacttgtgtcatgagggtttgttgtacagatgattctgtcacccagatactaagcctagtacccattcgttatttttgctgatcctctcccttcttccaccttccaccctctgataggccatagtacctgttgttcctctccatgtgtccatgtgttcccatcatttagctcctacttataagtgagaacatgcaatatttggttttctgttcctgctttagtttgctaaggataatgtcctccagctcctgtttttcatttctaaaccattaaaaatctatttggggccggtgcagtggctcatgcctataatcccagcactttgggaggctgaatttgggaggctgaactccctgagttctcagcttggggaggaagcttcaggtttcctatcccagtcttgctgctggcctgcccttctgcctacctgccactcaggtaccatctttactcagtcccccgaactcccttttttttaaaatttgaggagaattcttggaactttcccttgcctcttttgagactagcagtgtttcaaatggtgttttttcctacactttagctgttctgtagcaggagtctcttggaacacctatagcagaagtcagaatgattgctttggcaaatataggtccctgtgtgcccatcattggtttcactgtgactaaggagaagtcatctcaggaaaaacatttttctagtataacttttaaaatgtggttttgatgaaatttgtgattacttataattatctgttacaatttaaatttacataaacatgctgcttttatcttctcctcctcnnnnnnnnnnnnnnnnnnnnnnnnnnnnnnnnnnnnnnnnnnnnnnnnnnnnnnnnnnnnnnnnnnnnnnnnnnnnnnnnnnnnnnnnnnnnnnnnnnnnnnnnnnnnnnnnnnnnnnnnnnnnnnnnnnnnnnnnnnnnnnnnnnnnnnnnnnnnnnnnnnnnnnnnnnnnnnnnnnnnnnnnnnnnnnnnnnnnnnnnnnnnnnnnnnnnnnnnnnnnnnnnnnnnnnnnnnnnnnnnnnnnnnnnnnnnnnnnnnnnnnnnnnnnnnnnnnnnnnnnnnnnnnnnnnnnnnnnnnnnnnnnnnnnnnnnnnnnnnnnnnnnnnnnnnnnnnnnnnnnnnnnnnnnnnnnnnnnnnnnnnnnnnnnnnnnnnnnnnnnnnnnnnnnnnnnnnnnnnnnnnnnnnnnnnnnnnnnnnnnnnnnnnnnncaacagcaatttccacactttggaagcttcactgaaatatttttttctaacagtgtagaggataagaatttgcagttctattgccagtttattacagaggctacaactctggaacagccaaatggaagcaatgcttaggacacagtatggggggagggcaaggagctaccatgccctctctgggcaggccaccgtccagtacctcagtgtgttcaccaacctggaagctccttaactcattctttaaggccctattaatccttctctatatatactagtattttaagaatgtataatataatagcaatagtctttggtccattaaaaatcttagcttttcttattgcagtggtaacccttagagcactcttggtaatgtatcttaaacaggttcttcattgactaactttacagattttagaattgcagtttattctttaaaaatatgctgtgattattttcaggatcataatttcagtaacatttccagttttgctttgttggcgagcttaaaattatggaatggacattttatgcaaattttatggtatagtaaagaaatgaagggacattttagaaagcatttaattctttatgtcactgacacttgtaaaattacttcctgtcaaacacgtgttgaaatacagtttatgttggcaaatattgggattgattttatattaatttaaatctgtattacattaaagcctaggaaattactaaaaaatgtaggctatgtgataagtttttctgagccatttatggattgggctttgaagatgaaagtttgttaaaccattgggaattaaagattccagctgaacatctcaagtttctgaaacaatacattttctcacactttgtggaattgttctgtgtcatttacacttgcttggttcagcagggcgagcaatgaggtattttttattttatatttgtttttgcagggatcttagcaacatcaattgtgaagagcttggtccattgcctcctggatgggagatccgtaatacggcaacaggcagagtttatttygttgaccataacaacagaacaacacaatttacagatcctcggctgtctgctaacttgcatttagttttaaagtaagtttttgaaacaatacatgttaaaatgggagttaaacatgatgaaacgcatagatgcttttaataataaatgtgagtctcgatacagtggctcacgcctttaatcccagtgctttgggaggccgtggcagcaggatcacttgaggccaggggtttgagactagcctggtcaatatagtgagacctcatctctacaaaaaaaaagttgtttaaattaaaaaattagctgggtgtggtggtgtatgcctgcagtcctagctacttgggaaactgaggcaggagaatcgcctgagcccaggagtttgaggctgcagtggactatgatcacaccaccccaactccagcctgggtgacagatggagaccctgtctcttaaaaaatgaaagaacatctactttcatcagttataatttacttttattgagcaaaatttatgtaagagtgtgacaaggtttactctgatatgagtattttaaacctactatgcttttaggtaggaacctgtcttggaatgttaggaaaagggttattagaggtgctcaagatggccttttacagaggcaatatcttgacaggagaagtaggggttgaacaggctaattttgtgttgccattgtaatacaaaattattaataatttatattaatggctaacaccttagtagcacttactgtgtgacaagcattgttctttatactttacatatgttggtaaggccaggcatgtggctcatgctgtaatcccagcactttgggaggctgaggttggagaatcacttgagcctaggagttcaagaccaacctggscaacatgtgagtcctattctcttcaaaaaatttttttaaaattagctggtcatggtggtgcgcacctgtggtcccagctactcaggacaccgaggtgggaggatctcttgagctcaggaggtcgtggctgcagtgagctgtgatcgcgccactcattctagcttgggcaacagagtgagactcttgtctttaaaaagcaaacaaacaaaaacaccccaagttcgtaatttcatcctcagaaaaactctgtgagttagctactgccatttttacagatgaggaaactgaggtatagaggttacatgactttccatacgttgccagtggtgaagtctggagtgaaaccaggatgctctggcttcagctgcctgtgaggcactatactgagtattgtgtgtatattatttgcatcctttgcttttcttttctctctagctgcctcatttcttctaactctgttacttattagcattgccttctgaagaatgggggcaggaggaggaaaagagagaacaggaaaacttcattactaagctaagtagcaaagtgtctttttcaacacttctggcaaaaacactgagagtggtatagcaacaaggattttaggctaagaacttggagagcaaggttcactctgacccctgaataattcattttagcttctctaaatgaatggtgacattacctgctctgtcttattcatttgttgtaaagttcttatgtatgttaaaatgttaaaaacacaacaaaaataataatatactttaaaatgacttctgaaaatgtccttgtttcattaatttttggagttaggttaataaagcaaaaaatttaaatgagaactggctaccagttttttaggataataggagaaaacattgaaaatgtgtatctttggttccttcttcgaaatatgtataattatcctggcagtctcattatgtcagcagatcttactttattgtagatagaagattctaaaaccttgcttacaaatgaaggtcgcaagtatttgaaagccctaatgtaaaagtatctgaagaaacagagaagtatggactgtttctgtgcattagggtctttatagcctagatagcaaaataagtgtcatctgcagtctaccctttgagtaacactgctctagggcgcttgcctggttgtggaattgctatgtcgtagaatatttctatcttcaactttaatgtataaaggtaacttttctaaagtggctatgccagtttagtcttttaccggcaatatatgagttcctgttgctgcagaagcttgccagtacttgctgttgttggacttcaaaatttttgctgttctgatgatgtttaatggtttcccattgtaactttaacttgaattttcctaattactgatgaggttgagcacctttttataggtttattgactatttggatttcctgtttttgtgaaggtcctgttcacaattttttgccattgtctattgagcttgaacagcttttttttggcctattgaccagctgcatcaactttttttgttaatttatatcttttttgcctatttttctaatgtaatctttatcttctaaaattcacactacaagtaaatgtttttaatacatttatagttttgtcttttactgtaaagtctttaatccatgtggactttacttttgtgtatggatttttttttttttagatggagtttccctgttgtcacccaggctggagtacaatggcgtgatctcagctcactgcaacctccacatcccgggttcaagcaattctcctgcctcagccttccaagttagctgggattataggtgcttgccaccacgccgagctaatttttgtatttttagtagagatggggtttcaccgcgttgcccagactggtctcgagctcttgacacctcaggtgatctgcccgcctcggcctcccaaagtgctgggattacaggtgtgagccaccacgcctagttctggaattttttttgagatggagtcttgctttgttgcccaggctggagtgcagtggtgctatctcagctcactgcaacctctgcctcttgggttcaagcgattctcctgcctcagcctcctgagtagctgggactacaggcgcgcaccaccacgcccagctaatttttgtatttttagtagagacgaagtttcaccgtgttagccaggctggtctccaactcttggcctcaagtgatcctcctgcctcagcctcccaaagtgctgggattacaggtgtgagccgttgtgcccggcctgggtttttttaaagggcatataggggcagcaaattggaatttggggagatgataaggaataaaagatgttggagcactctacagagggcttttgttttacttttgtatcttaattgtttgttacctttctgcttcccctactagactttgaattacttaagaagacgtgtatcccatttatttttgctgctttagtatgtaacatacccaaagtacttgacaaatgtacaatggtaatcaagagccagtatggctctctgagaggcccaggaagcctccaagaggtggttgtgctttatttacctcctgcctccaggatcatccctttaggtcaagcttgtccaactcacggcccttaggctgggcccaggacggctttcagtgtggcccaaaacaagctggtaaaccttcttaaaaaccattatgtgggcaaggcatagtggctcaacgcctataatcccagcactttgggaggctgaggcgggcggattgcctgaggtcaggagttcgagaccagcctggccaacatggtgaaaccccgtctctactaaaaatacaaaaattaggccaggcgcggtggcccacacctgtaatcccaccactttgggaggccaaggcgggtggatcacaagatcaggagatcgagaccatcctggctaatacggtgaaaccccatctctactaaaaatacaaaaaaattagctgggtgtggtggtgcacgcctgtagtcccagctactcgggaggctgaggcaggagaattgcttgaaccagggaggctgactttgcagtgagccgagacagcgccactgcactccagcctggcaatagagcgaaactccgtctcaaaaaaaaaaaaaaaaaaagccaggtgtggtggcgggtgcctgtaatcccagctagttgggacccaggaggctgaggcaggagaattgcttgaacctgggaggtggaggttgcagtgagccaagatcacaccactacattccagcctgggtgatagagccagactttgtttcaaaaacaaagcaaaacattatgagatttttttaacagctcattagctattgttagtgtattttatgtgtggcctgagacagttctttttccagtgtggcccagggaagccaaaagattggacatctctgctttaggtaatagatgtttgccttgatgttgccagtagaatatttcagtagaacagttacagatcttccatctttttgctgaatagttagttgtattaaataactgaatgaaaaataatgttctgaaggaataactacaggtgggatgattagaaatgtctgttgtcttttctgtttgttggagtaaatgacaggaagtaacttgaagaacatttgactagttttcttataattgttagttttccaattttgttgattagtttccattaatatggccagcatttgcattatctggaagttttatacatattcctaatagaaagttttcatttgaacatttttgtattttagtattaatttgttcctctcttcaatatctttgatttcaagttactgtgctatgaaaaagcttaaggctgggcatggtggctcacactggtaatcccagcactttgggaggccgaggcgggtagatcacttgaggccaggagttggagatcagcctggccaacatgacaaacctgtctctacaaaaaaagtaggcgtggtggtgcatgcctgtaatcccagctactcgggaggctgaggcatgagaattccttgaacctgggaggtagagggtgtagtgagctgagatcgcgccactgtactccagcctgggcgacagagtctctatctaaaaaaaaaaaaaaactctctgtcagcggggcacratggctcacgcctgtaatcccagcgctttgggaggccgaggtgggtggatcacaaggtcaggagtttgagaccagcctggccaatatggtgaaaccccgtctctactaaaaatacaaaaattagccgggcatggtggcaggcacctgtagtcccagctactcgggaggctgaggcaggagaatagcttgaccctgggaggcggaggttgcagtgagcggagattgcgccactgcactccagcctgggcaacacagcgagactgtctcaaaaaaaaaaaaaaaaaaaaaaaaaaaaaaccagaaagcttaagcatttctacatccgtttttgttttgttttgttttgtttttttcttcttaaggacaggatttcacaactccagctactagttcggtaaagtccctaacctgatagatcctccctggggtttatattcgtgttacattacataaaatatataaaaattatttgcagcattaaagtttctgtcataaattaactttaaagtgataaattagtttttattcagctatgtaatgtagtatataatttatatgtgaaacaatttattgagatacataagaaacaattttaatcttaaaattgtagttttaaaaagattcataaggcactaattttaaattataacagttaatttattaatctttacatatcaggatatgtcggatagaagtatcttttctattaatgtttgatttctattttttaaagatttttaaattggggggtttttctttagacaagtgttaacggagttttgaatctatgtctatgagccgtcaaatatagtattaccttatttggtacatctattatggtttttattgtttttctctcttggaaatttttttggcaaaaatgtcattagaatataaattatattgcaaaacattgccattggggtttaataaataactttgccaaggaagcatattcttctaagaaagcattttagtcagtttttttttttatttcctttgcttgaaaagcatgtttttgtaactcagtaactatcttaatagtagctatagtaactgatatttattttgcacttaccatgctctgagtgcccatgtcatcttcattgcaatcctgggctacctctttctcatcagtgagaaaaatggggcctcaagcagttacagaacttgtccagaggtgcataaaaggtgctagagctgggatttgaatccacccagtctgactatggaggtttttttttttcccttcatgttttgattccagtaacactaattacttatttcccttcctttgactggcattgcatgaagatattctgccttatacccttaaaggaagcttttctttttaaagaaaaagatgacttatgggcaaggggattacaatttgagtcttttccctgcttatcagatctacttgatttcaagaaaatcatttgcttgtttgataaagcctttagacattggcagaggccctaaaggatagaccagcacccccactgtttcctggcctgcactctcacatcagcccttacagaactgccccttgcaccctagcacacctgaagagacaggctgctttattgggtagttagattttttttttccctgagtgcatcaggaacaatagttccaggctagctgcccacatcccagaaggattttctcctgtgtccgtttttgtccttcagctctaagccacctttccatttgcatggcttggtctttcacaggaggctttgtgaagaggcctgatatctgctggattttttaaaatcagccttattgaaatatattgacatacaataaactgaatatttaaagtgtacagtttaagttttgatatacaccatgaaaccatcaccacagtgaagatagtgaacatattcaccacccccaaaagttttctcttgcccttttgtgatttcttctgtccctccctgtgggacttccaccctgtgttagtttcccagggctgctgtaacaaaataccacgaactggatggcttaaaacaacagaaattcattctctcacaattctggaggcagaactacagggtaaggggctgactctatagtaagtgataatgagttccttccagaggctttgagagagaatctgttccatgcctctttcctaacttcccagtggtttctggaaaccttggtgttccttggcttgtagacaaattgctccagtctttgtcttctgtcctcccatagtcttctttcctgtatgtatgtatcctaatttccctcttcttataaagacatcagtttttggatttaaggccatcctaatccagtatgatcttacctcaccttaattttatctgcaaagaccttatttccaaataaggtcaaatccacaggttgaccagatgttgagccttcagcatatcttttgggggacacacagctcaacccataacaccccatctccagccaactgctgacctgctttctgtcagtatattagtttgcattttctagataaatggaatcatgcagtatgatttcttttactcacataatgagattcatcattgttacatagttcatttctttgtattgttggtggtattccattgtatgggtataccacagtttattcatttatctactgatgggcatttgggttgtttccagtctttcgctatgacagataaaactattatgaacatttatgtgcaagtctttgtatgtatatgccctcatttctcttggttaaataaataacctaggagtagaatggcttctttggcagaatcttttgccatgcccccagccctcccaaatcgagcagctcagttttttgttgagttttgagcttctttagatatttacatatctgatatatgctttccaaaggaattttcctagtctatgacttgacttgtcttttagttttcctaaacagtgtcttttgaagagcagcaattttctttaagctgagggtggtattgggtgcctgtagttctagctaccaggaggctgaggcaggaggatcacttgaaccaggagttcagggccagcctgggcaatatagcaagaccctgcctctttaaaaaaaatttaaaaatggatgttctgtttatccatttgttctttcatggattgtgcttttggtgttatatctaagaaatcattcattgcctgatgtatgtcataacaaattttctcctgtgcttagaagttttatggctttggattttacattgatgtttgcagtccattttgagttactttttgtatctgatatgaaatatacccaagttcatttaaaaaataagattatacagttgtttatggaatgcatttatgtacacggtaatctgttttgattttgtgtgtatgttaaaacatctttattatagtatttgtaagagtagttaatattgacttggcattttaaacaaaggtgtattttctttgtatggtcatatgttttaggtataatatttggcctggtgtataaaaagaagggatccctgccaagctgcctttcagactcctgtttggctcttccagaaagaaagagtctagataacaagcagtgtttggcacatgcctgaattttaaagtgggtgatggtaaactctgtaggggaaaatggaagctatattggaaaaatttgtcctcagaagctgtataaagctttatggataaaattccattatccaattctgtcagtttatgtggactatgagaaataaactttgtagctggtttattgctgccaaaaaatgtcaagccaagtatatgttctactaaggcttggaaaatgatagagctagacttgctttataatatgatgctattttaaatctataattgcaatttttaaaatttgatatactttaataataacatctatgtttacttctagtcggcagaaccaattgaaagaccaacagcaacagcaagtggtatcgttatgtcctgatgacacagaatgcctgacagtcccaaggtacaagcgagacctggttcagaaactaaaaattttgcggcaagaactttcccaacaacagcctcaggcaggtcattgccgcattgaggtttccagggaagagatttttgaggtaaatttacgagcnnnnnnnnnnnnnnnnnnnnctcactaaaaagtgaaactatgaatgggcatgaacagcaaacccaatgaactgtattcagcttctttaacacacttcaaaattatatataatcacagtacttacccacagttcattatttaattaaagctttttttttttttttttttttttctgaagcagggtcttgctctgtcacccaggctggagtgcagtgctgcgatctcggctcactgcaacctccacctcccaggttcaagtgattcttgtgccttaccctcctgaatagctggaattacaggcacataccattatgctcggctaatttttgtattttcagtaaagaccaggttttgccatattggccaggcaaattaaaaacttttttttttttttttgagacggagtctgtcgccaggctggagtgcagtgacgcaatctcagctcactgcaacctctgcctcctgggttcaagcgattctcctgcctcagcctcttgagtacctgggactacaggcacacgctaccacgctcagctaatttttgtatttttagtagagatggggtttcaccatgttggccaggatggtctcgatctcttgacctcgtgatatgcccgcctcagcctcccaaagtgctgggattacaggcatgagccactgcacctggcctcttttttaaaaagagacaaggtcttgctctgtcacccaggctggagtgcagtggcatgatcatagctcactgtagccttgaactcctgggctcaagcagtcctcccaccttagccttccaagtagctaggactacaggtgcatgccaccatgcccagctatttaagaaaaaactttttgtatagacagagtttcactatgttgcccaggctggtctagaattcctggcctcaggtgatcctcctgcctcagcctcccaaagtgttgggattacaggtgtgagctactgcacctggccaaatttcaccttatttagacttgagttttttggatggattggcagggagagattaagtaataggctaaaaggacctaatagtaatagggtattaaaaattatttttttcaggaatcatatcgacaggtcatgaaaatgagaccaaaagatctctggaagcgattaatgataaaatttcgtggagaagaaggccttgactatggaggcgttgccaggtawggacttgcttgccagcttatgacatatggatctttgtacttacaaatttaagctacttcctgtggtgtaactttctcatcgacawttattttttgttattccctaatgtttgtatcactgaggatatcctaatagatatattcataatgaggttagggtggcactgctaccggacaagtattctggaactccccagtagaccatctgagtcccatgagactgcaggccctgtgttttctccatctctctctttaagtacattattgcctctgctttacattgtcaggaacagttttgagatttaaatgatatataacctgaactgaatactggttctctttgcttccatttgttatgccttttttccttgttaaatgaatgtgtatgcatgcatgtgtgtatacacatgtacatatcatgatggtcctcagaatgtttcagtacagaaggtagaatgcttctgctacatttgtaactcacaggtcaagtcaaattaaatttctttctttttttttttttttttttttttggagacagggtctccctctgtcacccaggctggagtgtagtggcgtgatctcagctcactgcaacctccccatcctgggctcaagagagcctcccacctcagcctcctgagtagctgggactacaggtacaagccaccacacccggctagtttttgtttttttttttttgtagagatggggttttgccatgttgcccaggctattctcgaacttctgagctcaaacaatctgcctgccccagccttccgaagtgctgggattacaggtgtgagccaccacacccagccagtgatttatttctgatattatatttactacaagaattcttttctatgtgtgaaaattcgttttatataaatggagaaacactgtagctctgtattgaaatgttccaaggatyattgtggtaattctgctttccctaatcttaaatccaaccaaaattatgttttcaataattcccattaattgttatttagcattacatgtgtgtatttgtagccttattttcattctgtcaccttttaaacctacggatggatagtttctttagtgtggatttttaaaaataatcccttgtacatcatacttaggacttgacagtttctgtggaatttgtattacttactcataactagagtgaatgtttattgggaacacttcatcatcaactactggtggcatctaagtactataattatatgtatagatcaaataagtagtttattttatttatttagttttttagagacggggtctcactctgtcacccaggctccatggagtgcagtggtgtgatcatggctcactgcagcttcgaactcctaggtacaagtgatcctcctgcctcagcctcctaaagagctaggactataggcacatgcttccatgcctaattaaaaaaaaaaaaatttggccaggtgcagtggctcacacctgtaatcccagcactttgggagactgaggtgggcagatcacgaggtcaagagattgagaccatcctggccaacatgatgaaaccccgtctctactaaaaactaaaaaaaaaagattagctgggtatggtggcgcacacctgtagtcccagctattcgggaggctgaggcaggggaatcacttgaacccaggaggcaaaggttgcactgagccgagatcgtgctactgcactccagcctggtgacagagtgtgactccgtctcaaaaaaaaaaaaattttttttttttggtagaaacaggatcttgtgttgcccaggctggtctcaaactcctggcctcaagtgatcctccagcctccgcctccctaagtgctggaattacaggcgcgagccaccatgcctggctcgtagtcagttttttttgttgttgttgtttttgagatggaatctcactctgtcgccaggctggagtgcagtggcgcaatctcggctccctgcaacctctgcctcctgggttcaagcgattctccagcctcagtctcccgggtagctggactacaggcgcatacaaccacgcctagctaatttttgtatttttaatagagacggggtttcaccatgttggccatgctggtctcaatctcctgaccttgtgatctgcccgccttagcctcccaaagtgctgggattacagtcatgagccaccgaacccagcccagttttttgttttttaaccttactactgtcagggtttgagcagaataaatggaatgtgacagtgatctgctttttctgaactttattccatagtagaatctcaaagtagttgagttctgctcttatttgtgttctaaatacttggtaaaacaaaacaaaaatttggattttctttttaaaaaacacatacacacaccaaaaacacaagacacatcagatgagtgttatgttgggaaggctgcttatgtggagacgttacttctttttttaatctctagagtagtttttcaaatgttacataatggtagtaatttaatttagactccatcacatagaattttgaaacagtttcctttaactagttttaatactattctgcatttgctcaaaaatattattcaatctgtttaatccataatatcaaaatatatcatttaaataaccttccctagccaaggaatgacaagaattaagactagaactacatctcttaagtcctagactagtgaatttccaaagtgagtaacaaattatcttttatactttgaaaaatttgaaggttttaataaattcaaggtggaagtactttttattccaggttttaaaaacattgatttacattgaagtcaagaagtggtatggaacatacccaaagaatgcacgtttgcccttgagtccatacctacaccaaatgccttgcaatccttgcccacttatatttttatcatggtatgtttcagggtttatacagtgaatgataatgaaatgaataatgaaatgtccttaatactacaacaaaatatagccttgtccaaaatgaagagtaaatcaatactatattatatgtctgtataaactggtcgtgataggagtagaccaggataatagagatgacgtggactttttttttttttctttgagacagggtctctgtcacccagcctggggtgcagtggtgcaatctcagctcactgcagcctcaacctccagggctcaagcaatcctcccacctctgcctcccaagtagctgggactataggcacttgccatcaacctggctaatttttgtattttttgtagagatgggatttcgccttgttgcccaggctggtcacaaactcctgagcacaagcgaaccacctgtcttggccccccaaagtgctgggattacaggtgtgagccaccgtccccagcctcacatggacattttgaaataaaaccatattcttccttttgttttatgtttattatggattacaaatttatttggcaattaaaagtaacagaccactggaccgtatcatctcgtgagtagctgaactgttggataatacttttatactctttgatgctaaaatataataaaattgcctaaattttgcgtgagatgttacttcaatataatagagtttttatatgctatttgggtacggtagatttttccaatgtgatcttatataactgtagttagtgcttttttgccttttattaatttaaataattatttgctaaaatgattagttaatgacatatcttaataaaaatgtatacattaacaaaaaaattccttggtcatatcttgttttctagggaatggttgtatctcttgtcacatgaaatgttgaatccatactatggcctcttccagtattcaagagatgatatttatacattgcagatcaatcctgattctgcagttaatccggtatgatttgaagttatgatgtgaattgtgaccaataatgcttttcatgtttacatgttaatgtagtttattatatagaaattatttgtccttgtcttagttgtgccctttgactcagcaattccccttctataaaattttcccaagcagatgattatggatatatgcaccaatttggaaacagggatgtttattgtttatagtagcactcaactgaaaacaacatagttgtcttcaggagcggggactgattaaattatgacatgaagcagaataatgcaaatgattaaaggcataggttctggaattagaaagacgtgtcgtggtctcatcacttactagctttgtgacctttcagggcaagttcatggacttaagcttcagttttgtcattgctaataaatacatttgtacctcaaagaggggttatgagaatgaaatgggaccctgcacattaagcacttagcacagtgctgtatgttattcactctacaactctatcaactacattactaagcactcaacagaagttagcagttattactaatgtattgtttttatattgtctttccatataagggcatactatacagccactaaaatgataatgtgggataatagttaatgatatggaaagatggtgtttatgatgtgttaagtgaaacgaaggttatcaaatagtataatgcaactttggtaaatatatatgtttgtgtgcgtgcgcgtgtgttacttttaaaaaagaaacaaaaacaagataaaaggtttaaagacgagcttaaaagattacttagtaaatagagaggtaaaagaatttaaaaatacaaacatctaacaaaacaatctgtgacgaaagaccaaatatatataaaagggtagaaatgttagatttgtttcaagaagttatttagggaggattttgaggtgaaggttctttttggagggcccactactgcccctgtagtaacaatagcccagactcattgactgcttataacatgccaggtccagttccatgggtttcaaacatcacctcattttactcctcatagagatgctttttagatactgttattatcctcatatttccagatgtggacagttagtcttacgggggttaatttgtccatatgccattgactggcagaatcgtgattctaattcaagtctgacaccaagtctgtgctcttaaatctatggtgttttgatgtttaatttctggttaggtcaaggaagtagggaggtttaggattgaaagattttttttcatgacaaagggctcagcaggaggtgagagaaggaagagaaaaggatctgcaagtagttgaatgaagctccgggaccatagtttggacttaatttctaaaagataaaatttacaaaatgactggccyctgcgagaagggcatattaccctgtgtaatatgctgttctctggtgatctagagactctggagcatgccctagagaaatactccctcctgactctattgaagagtaaaaatkttatgcttattctcaaaaagattaatgttgctgaaatayttcatttttattaaaattttcctgggtagtgcctaacgagtatatatactgttttcaatttcaggaacatttatcctatttccactttgttggacgaataatgggaatggctgtgtttcatggacattatattgatggtggtttcacattgcctttttataagcaattgcttgggaagtcaattaccttggatgacatggagttagtagatccggatcttcacaacagtttagtgtggatactgtatgtattgagtcttctatctcttcattataaactctgagctttaaaaaaaaatatgtttcaaaactgatgtacttaaaaaaattacacagaaaatattgagtggttatttgagtgataggatcgcatatgatttccccctttcctgtagcttctttatacatttcaaattccttaaacttagcaagtgttactactttaaaaaggaaaaaacaactagtatatttctatttttaaaagtactttatataattgtttcctcaatgtgatacaaattctgttccaaacctgcgtgtgttagaatagcaaattcttggctgctgttgcttttaatgaagtggcgattgttggaaccgtacttttagaataagaactaattgttgaatttaagctaagaactgattctgttttgcaagaggtcattattttgtgaagatacactggcaatgtttattttttataaagtatacagtagctttctcactagggatacacaggcacttggccccttggagtacagtaccgagtagggctcttcagaatgccaaatgtaactgaaattgtcctatattggtggttctagcaaggcccagctttgaccaaggctctttctcattactcaggaagttaaatgttttctgtgtttatgaaggttaaagctctttgacttttctgtccagaaagaactaggtggtatggaagcagaatctgacctcacatttgttatattataaaatgatcttagttttatctcaccaattaatacatctatagggtctgtattttaggtttcccagttacatatcttttcctctttcctatccagtgagaatgatattacaggtgttttggaccataccttctgtgttgaacataatgcatatggtgaaattattcagcatgaacttaaaccaaatggcaaaagtatccctgttaatgaagaaaataaaaaagaatatgtcaggtaaacactcctgtgttctcaaggctgaattttttaaaatgttctagaatgttagtatgaacaaasttaaatatttagatagtactacttagtgttacaaaatccgcttcaggagaatttagtggcttatttagaacagacattttattatttctcacaattccatgggtcaggaaattgggcaaaagaacaacatggatgacaacactggtgttccacaagatgtcagctaggcctgcaacaccaagatggcctcttcactcataactaggataactcaaatggctgagggctagctggcatggctgttgactggggtcactgtctggggccttgttctcattgttggctgagttccttggttctccctatgtgatatcaaaggccattccctctctccatgaccactccctctccccatagccactccctccccccatagccactctctctcccaacaagatagccagacttcttatggggtggccagctttctaaagctcaaaagcagaagctgctagatctttttaaggcctaagcctggtcctggccaacatgacttctgctgtctacttctggttaaactgagacagccagcccagtttcatcatggaggaggagctgtacaaatgtgtgaataccaggagatgtgggcactggggccacatgtggtgtagctatcacaggtggcaattcagaagggcttttgtgctttatcttactaacacttagcctgtttataaatgagcacattgtgagtttagggataaatgtaaataaatgtttttcagatttcataaagtaaaaattgaggaatttttatgtattgggctaatttggcttatgagaaataaaaagtcctctaaatatagaactatggtaatcagttttgggagtttgaacttgaactttatgtacacagaaacttgcatgatatactttctgtgtatagattatgttcccaaatcttactaaaatgtttcctagtttaaatatgaggtccacttgattggagtgaacactggcatagcttttctggaaagcagtttgataccagcagcatgtgcccttcaactagcagctctgtgtttagggctcttctgcagaaacacacatgtaactgaacgaatacggggaaagacggtcaattaaatgctacttgtgaaaaaaagttacactactaaaatggttttagagaagaatgattatattatacattcagcagaatattatgtggatatttaaaagtgcataagctgtcaaattttaaaagtaagtcttagaagaattatgtaggaacaaaatccatggttttttttttgttttttgttttgtttttttgggtttttttgaggtggagtctcgctctgttgctcaggctggagtgcagtggcaagatcttggctcactgcacctctgcctcccaggttcaagtgattctcctgcctcagcctcccgagtagctgggagtacaggtacgcacaaccacacctggcaacttttttttattattagcagagatggggtttcaccatattggccaggctggtctcaaactcctgacctcgtgatctgcttgcctcagcctcccaaagtgctgggattacaggtgtaagccaccgtgcctggctgtttttttatgattatactgaagatgttcaggaggctgcaaccaaataaagtttttgcctaggatgagggagtggagatgatgcgactggaaataggaaggagaaagagggtaaaagaatggactttcatattttactgtctccatagttaatgtttgatttttttgttatatacgtaaaaagtatgtattacgtttctacttaaaaaaaatgaaagaacaggctgggtgcagtggctcatgcctgtattcccagcattttgggaggccaaggtgggtggatcacctgaggtcaggagctcaagaccagcctagccaacattgtgaaaccttgtctctactaaaaatacaaaaattagctaagcgtgttggcaggcacctgtaatcccagctactttggagcccgaggcaggagaaccgcttgaacctgggaggtggaggttgcagtgagctgagatcgcaccactgtattccagcctgggtgacagaacgagactccacctaatataaattaaaaataataaaaaaagaacaaatgagaatttcctaagtcttagcagtgtctccttttcaagacctcgtgtgtcctactcagtccctggatcccactcttcagggttcagtcgtgtttacagcacgtaataatcccttgccaactacagttattagattaaaaattcaaagaaaaacttttacagttacacagttttgctgtccccttaacccaacaaacaaaaatacggtcctccaaaggatataatgttaagtaacttatttcttaaagtagagaaccatttctccaaatttggaaatgttaacaaatttgacagatgagtaagttctgtgatgcatgagatggagaagttttcttgggtagataaataaaaacaattcacttataaatcgtacattcacacaatagatgtagtttagtgcatttttttattggtaaaattacatcttccagaatttttatatcctctagagaacaatgattatttaatcaaaaagtgcttgctattggcttttactatttattcttctcatttttggtatgaggattctctacctcctcttctcccgtaggcctccctcaaatagaaacaaaacacccaacacattcaaattacatttgcaagtaaaatcagaaaaataagtcatttttgagtgaaagagctctttattctagttattggcatgtatgctgtaagtttagaaagaaatttcatcaagactcagctctagtagacgtcctgtttcctgggagcttctctgatttgaagggttgctctgctgatgctgcttttgttagtagtttaccacttttcatcaacattgaactgtgtcacacctcagggttcatttatccccattagtctgagatttattgttagacttgaggctaaacygttaatgttagatgcttgtaagatgcggtgttgctaaagtagagatttataataataattaccagatctgaaaatacatgtgattatacgaaatcctgccgaatgtttacaggctctatgtgaactggagatttttacgaggcattgaggctcaattcttggctctgcagaaaggatttaatgaagtaattccacaacatctgctgaagacatttgatgagaaggagttagaggttagtgcattagtattataacatcactagtgtaacaaggaaggattgggaattattttgttacttagttttagaggaaagcatatttctggtgctttctaagtttcatggttctatgcttgagaattcttattcacaggaaaagtctttcatgcttttgaaggcctttcatgctttggaatttctgtgagtgaacaatctgtctctctctctctttttttttttctgagacagggtctcactctgtcacccaggctggggtgcagtggtgcaatcatggctcactgcagccttgacctcctgggctcaaatgatccttcagcccctcaagtagctgagactacaagcatgcaccagcacccctggctaatttttttgttttttttggtagagacagggttttgccatgtttcccagggtggtctcaaactcctgagctcaagtgatccgcctgccttggcctcccaaagtgctaggattataggcttgagccaccatgcccagctgtgagcagtctctcttatattgtgaaaatttttaatttatttttctatcctgtactttcttgttttaaacagatttcgtgacttatatgtacattcttccaatatatgtctattccctaacttagtggttactgatttagttaagtaaaacctcattaatctaccattttgaaatttatttgggtaagagcctactctgaattagttttacactaagcttgcaagaaagcatttgatagacaagatcatcgagaaaataactaaaacacctaggataaattgaatctaaatgtctctctcttttttttttttttttttttggagacagagttgcccaggctggagggcagtggcactgcaacctccacctcctggattcaagtgattctcctgcctcagcctcccaagtagctgggactacaggcacctgccaccacgtccagctaatttttgtatttttagtagaaacggggtttcaccatgttggccaggctggcctgggactcctgacctcaaataatccacccacctcggccttccacagtgctgggattacaggtgtgagccaccgcacctggcctctaaatgtctttagattaacggccatactaaacagtgaatagttttttgtttccttttaaagctggcccttaaacaccccaggttttgtaattaagaccttaaacaaatgcatctgaatttcctactgaacaactaaaaaacacgaggtttaattctattaaaggtcccaaatttatttagtagttagggataacacaaatatttgaagtctactaataatttgaaacatgattttattcaatgccttcaatgtcctttctaaataaatctgttaatagacctgttagcaaacaaatctaaaaaggttggttttacttaatactctccccattccttttgtgattgaattgttcatagtgaaatagccagaaggaagtagttagaaggagaacatagcaggaatgccgataaggttgaaatataatgcattttcatctctttatacaataaacgaggatttggccttctaactgccattcctctgaagaaaagaatttaggaggtgtcttttatgtcattaaatacacccataatccttttcggataacctcctccctgttcagtgtggtgttaattcagtgaaccctgtagaagctttgttggagattttatttcagaaccccatagaagccttactggagactttatttggtagggttaggatttttaatatagtttctactgctaatgggtcatgaaactttgtttttcttctcttttttcttttttttatttgtggagacagaatctcactctgtcacccaggctggagtacagtggcacaatctccacttaccgcaacctctgcctcccaggttttcaagcgattctcgtgcctcagcctcctgagtaactgggacttcaggtgtgcaccaccatgcctggctaatttttgtatttttagtagagatggggtttcaccatgttgcccaggccggtcttgaactttttagctcaggcaatccacctgcctctgcttcccaaattgttaggattacaggcgtgagccactgcaccaggcctgaatcattaaactttttatttttattttttgagatagagtctcactctgttgcctaggctggagtgcagtaccatgatcctagctcactgttaactcttatgctgaagtgatcctcctacctcagtctccccagtaactggtactacaggtgtgcaccaccacgcctggctaacattattttggctttttttttttttttttttttttttggagacacagtctcacttgtcccccaggctgatgggatctcagctccctacaacctctacttcctgggttcaagcgattctcatgccttacctgggattacaggtgcccgccaccacgcccggctacctttttgtatttttagtagatacagggtttcgccatgttggccaggctggtcttgaactcctgacctcaagtgatctgcatgcctcgtcctcccaaagtgctaggattacaggcgtgagctaccacaccctaccaatttttaaagacaatatgtataacatttattttagcattgtatatattaatacctgggtgtaattctataaaatacaggatttgcaagtnnnnnnnnnnnnnnnnnnnnnnnnnnnnnnnnnnnnnnnnnnnnnnnnnnnnnnnnnnnnnnnnnnnnnnnnnnnnnnnnnnnnnnnnnnnnnnnnnnnnnnnnnnnnnnnnnnnnnnnnnnnnnnnnnnnnnnnnnnnnnnnnnnnnnnnnnnnnnnnnnnnnnnnnnnnnnnnnnnnnnnnnnnnnnnnnnnnnnncaatgtgctcatgtattttgtgctttaatatcaatttaatattattaagcaaatgtaggccaggtgtagtggctcacacctataatcctagcactttgggaggctgaggcaggcggatcacttgaggccaggagttggagaccagcctggccaacatggcggaatctcatctctactaaaaatacaaaaattagctgggcattgtggtgcatgcctgtaatcccagctacttgggaggctaaggcaggagaatcacttgaacccgggaggcagaggttgcagtgagcctagatcatgccactgcactccagcctaggagacagagcaaaattctgtcttaaaaaaaaaaaattattaagcaaattgtatgactcacttattcaacacccatttctgaagtttctgtgcattatcggttgcttccccaggatgtagtgaaatggatgttactaccatattacagcagaggaattgattgaattgccctcaatcaacaaagctaataggtattgaaactagtagatgatgcaggtccaaagaaggcacatatctgtatttactctttgggtctcaatttctgtccattttttttaaagctttataattttattatgaacttatgaaacattctcaattgtttacctggtcaagtctatcacagctgtggttctcagaccctggagagggagtttgcagtgagtagatatctctggagctttttaaaatatagatcccaactgtcaccccaggtgcacagaattaacatctctgagcctaggacctggaatgtcaatttgaaaagcttttcagatgattctgatgtgcatctttaattaggaaccaccaaatgacagccagcagtacaaacctaaagttctcttttgaggaatttttggtctggctgtggtttccacaggttcattactgtgtactattttcacagctcattatttgtggacttggaaagatagatgttaatgactggaaggtaaacacccggttaaaacactgtacaccagacagcaacattgtcaaatggttctggaaagctgtggagttttttgatgaagagcgacgagcaagattgcttcagtttgtgacaggatcctctcgagtgcctctgcagggcttcaaagcattgcaaggtaacagcctgaggtgcaggcaagctgggcagcgggtgggggcggggctgtcagcgtggggtctgtggagatattttgtaaaccatgtgcttagagattctctttttcacttcttatctgtgactctcacattgtgataccttcttctccctcctttcttttgttcccttcccaagagccttttctgcgggcttctctgattgtagtgagtgccgcatgctagagaccgtacgtggtgatgctctgcctttgttttctggtcaccttacttttaattctgttgcacattcctgtagggaagtcgttcacttccatgttcacatcttgacctggtgaaacgtttacctgcctgggatgcctctcccctctacttttcgttctttctcttattagacagaagcagcatgggtcatggaaaccatctgttcggtcagagcattttaattactgcatggcatcagaccatttgtttacaaccatattccttttttaagaatggttttctgtggaataagctggttaattttgggaggagctggtaatattgctaatgattgtggtgcttcactgggtggcagttgcttcctttacctcttaagcacttcattttcaaagctgctggtgatgaataaggacacacaaagcgacactggtacataattcgacagtgctgcccacagcgcatgcgctgaaatccctggggggagagcgtgctttcagctgtgctgcccttctctgtaaggagagctcctcatcctcacacttcccagatgcataaagtgaagttgtatttctgctacatgtatttatatggggtgcctgtgcgaactgaaatggattctatagacggctcttttgctgtcagcccagtttgagtcatgaaatctaaatttgcatcaggtcgtcatctttttgaatgtgtgcctatgtattttaccttggatttgcctgattacttttcttctcatgcttttgggatattgactttctataaaagatagaaattgagaaagggatttcaatcttgagttttttctcaaatggaaatgtgaacctattacggaatctaagccttatccaaggttaattctggctcttaaaacccagatgcttttcctgctgccctttggtagtatgtgtggattcattagcattcccctatccccagatcctgtggttaacttaccagttttattcttaagattttggagacwaatgcacgcacctgcagtgatttcatccacatttccttcatttgcaggtgctgcaggcccgagactctttaccatacaccagattgatgcctgcactaacaacctgccgaaagcccacacttggtaaggtatttttgtagctgtattccccattccatgtacataagtgttagttccaaacagatttgactttttatttattgtacttactagtgttaaatgggcctttaaagggaatgataagcaacttaagtgatttaaaagttaagattattcggaaattggtaggaaaacccaaaagtggtcatctctgttttagagaaataccttttagttttctgtgtgacacagagtgatgtggctatactggtatacacttgctaggccagtttacttattttgaatgaactgtataaaatttgatttgcttattcacagcttcaatcgaatagacattccaccctatgaaagctatgaaaagctatatgaaaagctgctaacagccattgaagaaacatgtggatttgctgtggaatgacaagcttcaaggatttacccaggactctatttatacaaccctgactgacagcctcctttcagcagagtttcaaagaatatgctgaaatacaggaaaacactcccccccccccyyttttttttttttttttacattttaggacactgtgaggggaaaggacaattttgaaattccttttcaaggaaaaaaaaggtctttatgctttgccatgaggccacattcagctgctatttaaacttaatatcttgaacctaaagaatgctgacttttcctacatttccagagttaggcagtattctacacttaaagactactactatttttataaaaggtaatctattcaaatttcttcacagatttcaagtctctcaaacatcaagacaacttcagcagtcggtacaagtcacatttcattttgattgaatacatgatcttgaacagctcctgtacttgctctttgtaaaaaaaaataaaattattttgaattattctacctttgtaaacaattggctaaaagaatcatctttaagaaattaagccatttacatgtttgtgtttttctatagcagagcattatattttgcattatatgtttcaacctaktctaagtgggtcttttttacatttttcaagaacggatttcctggaatacagcgatataattttggttgtcaaattcctaatgcaaccatttagtctaaacttagtcatttatttgtgacaataagatgtgttcaggggctccctgtttttaagagactcttttaaaaaaaaaaaaacctaatgtttttatcttgagtcaatatgattaggtattttggatttacttttaatcttaaaatactgcatttttatagcttctcagagcatgtggatgggatgggattttcgttattttgctgggtcagcttatctttaatatatggactattcctataaaccaaagtctctgacaagtgcacctaatttatattgtattttaactacagtgtaagtttccattaacaaaaccatcctaaagcgttaactgctcataattttaatcagctacagttatgaaaaaggaagaattttgctctaaagattattaataagcttagaaaatcctgcttttacctaacagaatgaagtggggttgaggggcggtagtatgaacagtgattctaactctatggcgtaaattactttgaagagttcattttggaagtaagggaatcccgcttcccttggtgttgaagatctgcatctgattttgaaacgtccagatttagctttcaaggtgcgtgcatgttgaatgatccagaagcaacgaaaactctggggtgagggattgaaaaaatctgaaatcacagttggatttttaaattcaaccatcaaaaatatgtactatcagtttttttttacattgatgtgaaataagcaaattttcatgataattaagctgcaaaatttaaagttatcaagtaaataggtcctctgtgttctgtttcatgtgatggagtgggtttcagtctgtgttcttggagccaaagggttcctcaggggtgcctcaggagtaatggtttaagagaagaggggcaatgagagggagcgagggggaaggcctagttggtatttgagcaggggccttaggctccatatccccaccccctttacccagaacagcccatttttcttatgtatattggaatttcaagtaagctttcatggggtgcagtggggcggggaggaatggatgggataaaaaaagtggagattttgctgctttaaaaaagttgagaactacttgtgtagtttttaagtattttaatgtatttcatttggccaaattcaactgccacaagcaagctagtcatagttgtaactgtgcagtggtaatatgcttatgcctacctttttcctctcaaacaatttgttttttttacattgcattctgagtactgaagagcatcttgaaatgtatggaagtggtttctatgctatttgataatcagtaatgttcagctgtcatgatagtactttactggttgcagacccatctctcttttatattaaagcactagtgcagtttataattgtgcctacttttaaaatctttcagtaaaaaagtacataatgaatacagaaatcataactgacagggatacagtaataatgaaatgctactatcacttattttaatatacaatataaagcaggcaaataccattgctttttgagtgcctttttaactttatactaatgacttaatagagctttaaaagaaagaaattggctgggcatggtggctcacacctgtaatcccagcactttgggaggccgaggtgggcggatcacctgaggtcaggagttcgagaccagcctggccaacgtggtgaaaccctgtctctactaaaaatacaaaatttagccgggcatggtggcgcactcctgtaatccaactacttgggaggctgaggcaggagaattgcttgaatctgggaggcagagattgcagtgagccgagatcgcaccactgcactccagcctgggcgacaagagtgagactccgtccccgcccaaaaaaaaaaaaaaaagaaattactctccataacagtctatgttatcaccaacatatataaaaacatgatttagatttccatttcaaagttacattacccgattacttccaaataggtgctaagcaaaaacccccaatgtattattgaaccatggacttgcacctcatgtttaatgtgaatatttatttccatgtccctcttaactggttttttcttgtcttccctctagctgtattgttatttcagatatgtgatatctgttttcatactcttgcctttccatcatgaatgcttagttatgaacagagattcctttgtagagctcataggcagtacagagaggtaagtcttgcctcagagggccttgtatcttggtgtagtttttaaatagtgcatagtgtatagtgtatagtgtacattttgttttgcacatagtttgttgccccgaatgggttttttaccaagcctttttttctttcatgtatttacagtccggagcacaagattctcttctttcaaatacaatgtaattcgctttactttacaacactaaatctgggctttgaatttccagtgcattggactgattggattgttgggagttagaggctgttccaaccatccttagtttgggagagtggctccttctgcttgttttctaagcgtacagtcaacgggtgccatttgtggtatttaacatgttaggatgattgttccaaatgctgagttgttttatttctagatgtaattagttcactttatgtaatattcttctctcagactgactttaaaaacaaagttttatcattttcattgtattwgtatttattacagagtgttttagctttgatattctttgtattttcattcatttgttacatgagctttatcagtaacatctgtataaatggtttttaaaaattaactatgtatgtgcccatgccgaagtcgagcaataaaatcaatgctgtttgcactgtcacagcatcaacgtttttaaagaatattgagtttgtaatgaatcgttttgaaaacatttatggttggctctatggagggtgacaacatgagtcacaaaatgaaaagttcaagaacacatgccatcctgagttgatgcctctgtcatgttgcagagctcagctttctgtctcctcgcagagcagggaaggtgcccgttttctccggccgtggtgactgctcagttggtagtacctgttgggggtaccgcataggtggatttctgaggggggtcaggggctagtggggaagagcatcttggtcctgtcaccagtctgcaaccatctttgctataatacatctccgctctgtagggcaggcctatgacaggggctcatatttgccagccctaccttggtatgtcgagcagtaaaattctcaaaatgaaaaggagaaatcaattgtattttttctagaagctgtggattttaaggtttataattcactactgtattaatgatagtggactaaagtccagctaactctatggatagaaaaggaatgaatatggtctgtgtaagtctacacagcatagggtacaacagaagggaacacctgggaaatgtgtaagtagtagcagtgtattaaagttcaaagggtgagcatgcttttgtttatatgctttaatattcttttgaatatttttgttttgctttgtccctcattgctgtgtttactggttttatctaaaatttataaagttttagtacattaaagatttttggccgggtgcagtggctcgcgcctgtaatcccagcactctgggaggctgagatgggcggatcacgaggtcaggagttcaagactagcctggccaacatggtgaaaccccgtctctttactaaaaatacaaaaattagccaggtgtggtagtggacgcctgtaatcccagctacttgggaggctgaggcaggagaatcagttgaacccaggaggcagaggttgcagtgagccaaaatcacgccactgcattccgacctggacaacagagcaagactctgtctcaggaaaagaaaaaaaaaaaattaggccaggtgctgtggcttgcgcttgtaatcccagcactttgggaagccaaagcaggtgaatctcttgagcctagcttgagaccagcctaggcaacatggcgaaaccccatctctacaaacaatatgaaaactagctgggcgcagtggcacgtggctgatagtcccagctactggaggtggggctgagatggggggattgtttgagccctgggaggccgaggctgcagtgagccatgattgagccactgtactccaacctgggcaacagactgagaccttccttgtctcaaaaacaattttttgttttttagtattataatagtctacaaattatccaagtttgatttgactaatgatcagaagtttaacctgaagtttgtcccttcattgtaatgaaggttaaccatgttacccactgcattgatttgtacttcatataccaaatgcttactatatatatatatatatatatatatatatacacacaataagatatatgcaacagaacaagagcctagtaacaggataaaggaggtaatcacgcaggagaagtgttactttacattcctatgttaacattcgtagcaaactagacagaccagattttaaattttacttaaaaggtatctgccctaaatgtgacttgtctgctgctcattcaacaaatatttactatgctcctgctacatgccaggctctgtactagctgatagccatatagctttgcatggtggttagaaagtgaacttccaaagtcatgcttctagtctgtgtctcactgtgggccaagttcaaacttaagtgctcaaagctcaatttatgtacagcaaagtcagtcatgatgggagcacatgagtaaatacccacctcagcaaggccctgaatcccagacttgaatgtgtgtttgtggtctcactgtgttgtccaggctggagtgcagtagctatttcacaggcgcagtcatggtgcactgtagcctgaaactcctgggctcacgttgatcctatgccagcctcccaagtggctgggactacaggtgagcaccaccacgctgtggtgcagtctgtgggattggcaagggaacctaagatgtttctcctccccacttaagtattcttaatgcttttttttttggtaggagtcttgctccattgcccaggctagagtgcagtggtacaatctcagctcactgcaacctccacctcccaggttcaagcgattctcatgcctcagcctcccaagtagctgggattacagggtatgcgccaccatgcccggctaatttttatatttttagtagagatggggtttcactaatgttggccaggcagggcttttcattaattttaaatattgtctggttagtcccttatgatagatgaggcatttagttctaataccaagcacctcactctgtaacaccccccacaggactttccaaatgcatgactgtgatgaatctttcctgggctgctccacgctgactggcttgatgcacacaatccacagcacttgaatcgcactgtcctctgcttgctaagctagtctggtgaagtgatctttatttgcttttgatttttcaaaaatatgttgtctcctattttctgacctttgctgagcaatcctattccttccctgaccaattctctcataaattctttctcttgttgtttattcctggttactttttagcttggtaaagagcaccagttcccaccaatcaccagaactagcaacttcagtcttcctaaaatattttacatttaaaaaaaaatcataataaaagcatcgttaggcttgtgttaacagatctaatggtattatataatctaccactcaagagtcacatctgccatgcttccggatcttttctgtatcatatttatattgcatcatatgtataatacccactcataccatgtttttttctataaaactgcgtattttgtagtctaaaacttttttactcagtattttatggctatctagatctactttatcttctgcttaacattttttagaacttatgttccagctcttgcgtatctagcctcatcttgtgcatttcctgtcctttccattcacctgtgcttgctgaattgtcacaacacatcacaggggtctgtatgtcatttactgtgctccagacacacccagtccatcaagcctttccccgctggaagctcccgcctgcctggtggcccacccttctgccagtttccattccaagagctcagcacttggaaccacagcagttgatccagatgtcttctctctaggtcagttttcactgcttcaggcctcctggcctctcatcatacatacactcatccgcacagcactctctatgctctaatggaagcctctctctgccactccctggcttccaagtccccatatcctcaactgctctgaagcttcctctagcttaaaagaagtgtagccttcccttttcattgatgacgccgcccccaagtgggttttttttcctcgtattcctccataccagatatgaggctggtgcactcttgcccacttgaaacc

SEQ ID NO: 95399 - DNA, 35637 bp, Homo sapiens
tcttagcatattcagcacaccttcatttgcatattcagtagtttggttatgacacatgtagtagtttataactagaggagaagtctccaggttttttgggctggtttggaaatttactccccttcagtaagaccaggttttcttctttgttccatgagtttacgcaaagcatcattcattagcttgtttgtctttaaaggtaggtctcttaccatttctggtatacttactaccagagataactgactcctgagggaagaatagttcgtttaccctttttaaaaaggtctctttaaaattttcttttcttcaaatacattccagttgtaaacaaaatcgttttaaacactcattttatttttattttttttgagacggagtcttgctccctcgcccaggctggagtgcagtggcacaatctcggctcactgtaacctctgcctcccagattcaagcaattctcctgtctcagccttctgagtagctgggactacaggcgtctgccaccacgcccagctaatttttatatttttagtagagatggggtttcaccttgttggtcaggctggtctcgaactcctgacctcaggtgatccacccgcctcggcctcccaaagtgctgggattacaggcgttgagccaccgcgaccagccatttatttattttttgagatgcagtctcactgtgtcacccaggctggagttggagtggtgtgatctcggttcactgaaacctctgcctccctggttcaagcaattctcctgcctcaacttcccgagtagctgggattacaggtgcacaccaccacacgcagctaatttttgttatctttagtagagacaggatttcaccacgttgggtcaggctggtcgccatctcctgacctcaagtgatccacctgcttcagcctcccagagtgctaggattacaggcgcgagccacctcgccccaccaaaacacccattttaaaattaagatttacagagcaggctgggcacagtggctcatgcctgtaatcccggctactagggaggctgaggcaggagaatcgcttgaacccgggagttggaggttgcagtgagccgagatcgcgccattgcactccggcttgggcgacaagagtgaaaactccgtctcaaaaaaaaaaaaaaaaaaaaaattatagagcaaataactgaggaagaagtagggattgttgacattactggctctctacagctaaatgctttcttgtttacctgcctggtgtactgaaaagatctgagcactaatccctgttctggtatttaataataatgcaaccttgggcagtttcttaatacttatgtctaaagtgtggttggtaatacctacctgactgggttgatgaagattaaatgagccgggtgtggtggcttacgcctgtaatcccagcactttgggagtccaaggcgggtgaatcgcctgagctcaggagtttgtttgtttttttgtttttttgttattgagacggagtcttgctctgtcgcccaggctggagtgcagtggcgcgatgtctgctcactgcaagctccgcctcccgggttaacgccattctcctacctcagcctcctgaatagctgggactacaggcgcccgccaccacgcccggcttttttttttttttttttttttgtatttttagtagagacggggtttcatgttagccaggatggtctcaatatcctgacctcgtgatccgcccgcctcggcctcccaaagtgctgggattacaggcgtaagccaccgcgcccggcctgagctcaggagtttgagaccaccctgggcaacatggtgaaaccctgtctctactaaaatacaaaaaattagctgggcttggtggcgcacgcctgtggtcctagctactcgcaccacagcactccaacttgggctacagagtgagactctgtctcaaaaaaacaaaacaaaacaaaaacaacaaaagattaaatgtgttaaggtatataacacacctggtgcctcccttccttttcttttcccactgagcctttgacatttagtttcactgcggtcaggtatgagcaagtacatgattttcctgtaccacccaattcacatcatgcaaaagtctcacagagagggacatgaagatctgcaagaacaaatgttaaaacagacagatgtgcattttacaaggatgttgtttatcttgaaattctcatcactgcatcattgctactgcccaagggttgaattaagggcaaaacatttcagagacagatttgaaattacctaattatcctagacatgttgtaatgttcccttttataatgcctggctcaaaaagcttgatgtcaggttacagaactgtatgcattctttgattgtaattgtgttaacaatagtaaaaaatcttgcatacaatcaagaccagaaagaaatccagatgctaattgttgttttgttaagtaataaaatggtggtaagcaatgctttttctctcctttttgcttttttttctttttcttatctgtaatgtgacaattctttattacttggaaagtacattttatgagaactgtgaaaactcggaaagtagaagttcaaagtattttacatttaataacatctagctaatccttatgatatctagataaggtgctactttacatcttatgaaatagcacaagccttaggcaaacttctgtagtagaagaaatgtgttctgagacttctgagacttctatcttgctagtttttaagatatcttttctcccagaaacctggtgtccagtgtccctctcaaatctgccaaaggacagtagcttaaagatttacttatctcaggggagttgcatttttatagccatcaatggcatataatttggaattagaggcacaggcaagcaggccttccgaatctctgtgagccacaagacccgatggcaccctgaaatcaaacttctgtagactgggagccttgttgaccgctgttccccaattctgacagatcaaagctgttgctaatttgttaaccagaggcagtgatacaaatggaagatgcaactattcattctgagggacgcataaaagtctgattaatctaaggagcagtcattgcccaagcagttaaggagaatatttttggaaaggcagacatcagaagctaagcagagtacaaatttccaccctctacttactgtattaatcatatcagctctcactcttcgtagatgctgccctgctcgaaagcactggttatttagctgggagtcaggagaacccaaaccctccctgggcatagacaaattgtaattttatagcagacagcctctaaaatgtttctacatccacaacagttgacactgccaggcgcagtggctcatgcctctaatcccagcactatgggaggctgaggtgggaggattgtttgagcttaggagttcgagaccaggctgggcaacatattatttaaagagactaggtctctttagtaataacaaggccaggtgcggtggctcacgtctataacctcagggggcatcacctgaggtcgggagttcaagaccagcctgaccaacgtagagaaaccctgtctctactaaaaacacaaaattagccaggcgtggtggtgcgtgcctgtaatcccagctactcgggaggctgaggcaggagaatcacttgaacccgggaggcggaggttgcgctgggccgagatcgtgccattgcactccagcccaggcaacaagagcgaaactccgtcccccccaaaataataaaaactaattagccaggcgtggtggcgtgcctgtagtcccagctacttgggaagctgaagtgggaggaccacctgagcccgggaagtggaggcttcagtgagccatgattgcaccactgcactccatcctgaagcctatcttaaaaaaaaaagaagaaaaagtgacacctataaaaaaactcacatacttatagtccagaaatgtgctgtccagtaaggtagccactagccacatgtggctatctaaatttactaaaataaaattttaaattcacttccttagttacactagccatatttcgtgttcagtagccacatgaggctagtggctactgtactggagagtggagatacagaacatgtccatcatcacacaaagttctactggacagtgctggtccagaagagaataacttcaaattgcatttttggtacaggcatgtataagcccgcacttccacattctgtaaaggcataaagcgcctccctaccccagggcatgtctgtacagtcattaaatggtatgactccagcacttctttctacttaatctctaaatctctaaatcttgacacgcacatcgcacacaacacaaactctattttagcccacctccctcttcactgactcttcatggtaggtttagttcccataatccatgaaaatgcctagctccttgtcactagagcttgttttggaaacctgcctacagtgtaacaagctggaatgtgaagagggatgcatctatttgtgttgctgagtcattgaattgactgaagcttcaaggactagggggtgctgagcagaaatgaaaacacacaatcctttctgttagagatttgctcttttcgtattggcatgtaaacaagtaagtcactaagtgaactgacgtcacaatttagttttaggaagatgcttttcccaggcacgatttgaactcagtggtttcctgaatctagcaaagtatgctgctttgttttctcttagattaattttgcctaattttaaagctttgattctctttttacgaagacgaaaataaatctctctagtctgggcctttttcgtttcccaggattatgattaaaattatcactaacttttagatagtccagcacgcaccggatgactctgaagccggttgggcagtggagatcgggaagaacatgaaaaagcttcaaagcttttggttgaggacatcgggagatgtaaaccccaaacgcgggttttacttctcccctccacccctccccgcaaacccatgcctactcgttttgactgctcagcaattctgaggccaaccatttgcaacggcgaggagcaggggctggtgagtcaaggactgggcatggagtcaggactcttaggtgccttgactcacggcagagccttgaggaagtcgctttgcctcccacgtgtctcccttcacctgccagaggcggaggggaggcggggctgtgctggaaaacgtccgtttcgcaccgacttatgttacagatgggcagacctgaattttaaaagaccctcagagtcacacagcaaatgagccctcaaatgcccgtgtcccgcctgcgctccggagaacccctgccctgcctcggggactcgggmggtgggtgtgggctccgagactcggacggcaccttggcgtggcgagagcaggtggagatgcgcacggaggttgcatgttcacctccgggtctcgggcgccacggctgcccgtacctgttccagcaagcgtcagccaggaactgccgcgctactgattttcccttcgctcttgggtcccaacccccgggctctccgggctagggaggcggtggggtggggtcgaggccgtcccgagccacccgcggcggcttcacacctgtatcggatttgctttctcgcctttaatcctctccaatcccgaaagcaccccagcagagcgcccccgcagcccgcctcgagcccggctcatacgcagacgctgactggggaagcgaggggtcgccggtgtgtgaggcagggtaagagaccaggggacctgcacggaggagcgctctaggggaggctgctgcctcgggagctagggcgcgcccggaccacaccgcacggcgcagaagcccagcgcgcacgcgcgccgcctgccgccccgcgcgtccccccgccccgcgtcgcgtccccccacctcgggagagggcggccaggcgcagggagcgtgcgcgcggcccgccccgggcgcgggcggagggaggaggaggcggcgcgcgcggcgcccagcccgcagaagccggtggccgcgcaggaggacggagccctaaccgcaaccccgcgccgcgccgcgccggtaggggacccgcaggcccgggggtgggggttgtggggaaggtgttggggtggggcgggagggcgggwcttcgcgcttcgggtccctgggcgcagggggacccagaggcccgcgcgaccccgcctctggaaactttgtgccggcgcccccacctgctcccyggcggtccttgactcttcggggcggcccgcggaggagaggcccgagaccytccgcagcgcaccctcgccggccctgagcgtgcgccccctgccgctcccccgccgcgccgcgccgcccccgcgaccctgtccctgtgccccggggctccagcagcctcggccgcgcctcctccgtcgccttccgaccccgctgaggccgcctactctcgctggcatccacccgctctggagcgcgccgccgctttttgcatctccccgaggtttctggtgcatggatagaagcaacttgactttcagcgatgccaagtgtccaacttgagtctttctytgcggtggtagatgggtgtgcgcggtgctaacatctgtctttttatttctcctaagtacccttgctccggagcgaagttgagttgttgtttgtaaagagggggtgcgtgctgtggccgccttaagtggattgtataactgtattttatttaggtggatgttgccagtggtaccagccagtgttatggtaactgggcatcccagaggctagggaaggaggagcgacttacaaatgcagttttaccatgcagagatttttttttttttaaaaccaccttgtactttctatccagcaggacctccggacatttagtgtgtgttaactcgttagctgttcattatcgttttataagagaggggggtggagagcgttaccatcccgttttacagatgtaaaaacggaggcgaagagcaaactccgggtatccttagtaaccttaaaagaatagggaccaagagatttaacccagagtctcctggaattcctagtccctaaggccactcagaagtatgatggaatgttggaccgtcctccctgacattctacagatcacttaagagtcagagaggccgaggccagccggcagctccatgcctgagactcagctctgccacaaagttaagtmacactggacaagtcacagtttctctccgctcatttccttcctgctctctaaaaccaggggaacaaaggtgctgtattctttgcagagttgtgcgtgtgtctggaagctccactcccttgagctgcgatttggttattgttagttgttgtggactyataaaggcccccagtcttggttcccttgagaaatgcagggaaggaggcacccccacagtgaacgcctcttcttcgccagagacgcctgagaattcacatcagggacacttcacatcagggacaggccggggcagagaccctgacctgagggagggacgagggttgccacgaggaggtaggaaggagccctgcacaggaggcttgacacatgggccctattcctgcctccagctctgactcatcttctgacgcttgggggaggagaggtagttgcttggtatttttggctttccaccataaaactggagacagtttccttcattccaagtcgttttaatgtcactgttgaacgtgtgtgtcctgagttctcatctgaaagctttcatatcggttgactgcaggtatgaattctgtaataataattaatagaatggcataaatgtatattcatatcataaaagactagccaagtatgtaagtccaggaaatcctttaatactttaacatttttaaaaagtgggctttagggagggctatgtttgatgggttcctttgcaattgggattttaaggcaaaatggattaaaaatgcttttcccaaaatcacaagaaatacattaaccattctctgtgagatttaaactttactaataaggttaaagctttcttttgaacctcttcctcaaaagtaactgccgagtgcatcttgatcggtttgtgtatatctttttagacttttctaagcatttttataaatgtccgtttgcacaaagtggttttttaaccgaaattaattattttaaagttgacttgtcctgtttataaagatttggcttctgtcaagaacaagtaatgtgtttaagtacaactgttggtaaagttttaataatcctgatagacggtgttacttcccagggcaaggggcaaattaccccttttaaacaacttcaaagtagtagaatcattacgatcctaggttttactcttaggtgctgaataaaactttcctatttaaaaaaaaaatctaggactactagcctattgtcttgtctttgcttataaagaaacgtcaaagggagtggaagacagggagagttgctaaagcaaccaaggcctgggtataaacttacagagctaacatttaagatggctttattatttatgaaagcttcacttcacctgggtgaagacaaaggaaagtgttaatgtgggcacccttcaaaccggtaatttcaggaaatggatgggttaaaacaaaattcatgtcaggattctgtggatttatatattatacatttaccgaggacttttaccatgctaaaggtgctgtgcctgaatacagaggaagaaggcaagtaaggtcggtctctgaccttatgaagctgacaggcaaatagtgacattcagagagagttggccagaattgttgtcatggttctgaattcccagaaatcaacattagatttattgaattgtgaattatgtaaaaaagtgtctaaaacaaatggataatttgatggattattttaacgaaaacataagtgtaactgtcttgcaggtcaagaatctgactccacactctctccctccccsagaggtcctagccagaaactaccctgacttttatggaaatcatttccttcttttctatagtttttatcccctaaatataaatccctaattgacatagttttattttgcttgtttttaacctcagtgcaaactaaaagtagatactcttgtgaatccttccttctggccggcatcgtgtgtgtgtgtgtgtatgtgtatgtatgtgtgtgtgtatgtatgtatatacacacgcacatatataattttttaaatttctgcagcatgctattttaaaagatttatccatatcgttgcctatgcctgtagtttttgtgttttaatttttttagagacaaggtctcactatattgcccaggctgrtcttgaactcctgggctcaagggatcctcctgcctgggcctcccaaagtgctgggattacaggtgtgagccaccacacccagcccagttagtacatttttgtcttatgaacataccacaaattacctttccactgttgatggacatctgggttgtttctggtctggggcaattatgaacagccctgagtcaggtgtgcataccttcagctttactagttgatacctggtttccaaagtggttgtaccaatttacattccttcagtggtgtcagccttgagtttgtaagtcactgtatttgctgtttaaccacaattatgcttgaatattttctgaatgaatgaataaaggtccctgggtagtccgatccctggcctgtcatgtgctagcgtatttttatttagttatatggtttggactaaccacccaaataccagaaatggttttcccactgtgtttggttgacaaatatctaatggaatcctttcatcaatcttttttttttttttttggaacagatgagtagttacaggaaattttaaatatgcaaaatgaagtactaaaaataagtggctagtacctaratgttttttaaggctcttgaatgaatcctgcctctggtgaatgcttccattgtgcccagccctaaatgtgtaggacagtgtagtgtgcaggaacccaggcctatccttgttaaagtaccctctgaggatgagactccttaagaggcactgtgcacagaccctaactcatacttcttggcaattccaaagtaaccacagactctgtgctacaggaatcaatgactcttttaaactttttttttttttttttgagacagagtctcactctgtcgcccaggctggagtgcagtggcgcgatctcggctcactgcaagctccgcctcccaggttcatgccattctcctgcctcagcctccctagtagctgggaccacaggtgcccgtcaccatgcccggctaattttttgtatttttagtagagacggggtttcaccatgttagtcagaatggtcttaatctcctgacctcgtgatccgcccgcctcggcctcccaaaatgctgggattacaggcgtgagccaccgcacccagcctttaaatcttttaaatgtatttttctccaaattttcctttgcctgaraaagtagaagtagcttagagcagagtttttgtcgtttttgttcattttctttgtaagagatggagtctagcagtgtggctcaggctggccttgaactgctgggctcaagggatcctcccacctcagcctcctaaaagctgggactgcagcatgtgccacatccagcttgaattcctgctttgtgaacagacagttaccaggctcactttgattgcccgtgtttagttttgccagctggatttgaagtgtgtgtgtgagagagagtgagagaatgtgagaaagagaaggagcaggagggagggtgtggggagaggtgggcagttcacctgagggcagccgttaaattcaggtgttcattgagtacttaccatgtgcctagtattatgtgctgtgtttctgcccttagagcagaatgttacgcaattctgtaggtttacaaaatacctcaggggaatcctttttagctggagggatgatggaagaacactagcacaaagactgagatttgtagatcctttttatttcttctctaaagcatcttggaaaatagctaaatcactctattttcagtctttatttacataagtcacaaagacttttttgctcattatagtaaagattttttttcagattctctaaaataatgataattttagaaaccacatgcggataaattagaagttttcaggaaaagacacccaaaggaggaggagtaagaagtcgttagtatgagaacctgttgatctgagtgatgggggaggagccctgtcgtgttctttgtcaccccttcggccttccagcgggcagctttcacaaaggagctccattttccacctgttgcagggcaggggcagcctcagcctgggcgagggaggaggcctagggctgagatcacagccatgccctttcatgtgcagcccacccagctcacctgggcacgtcccattctgttcttgcaccaacctagagcaaccagaggtccggttgggtcagcttttcacaccccatgccatgttgaaacctcagtggacgagaaggttcttttgaagttcatatgcaactgctgggtttacttctgtctttgtcccagaacagtttcagcatcaatgrcctagggcaagtttttttgtttgtttgtttgtttgttttgactcctatgtctttgagtgtgtgggtacatatgagaaaactccctaactagagcatgctgcttctgttgactagtaaacattatgtggcagagagcgccttcaaagcaccagccttccctgcctgggaaagtgaccagtaggtgaacttgctttaagttttgttttttttgtttttttgttttttttttgagacggagtcttgctccatcaccaggctggagtgcagtggcgcgatctcggctcactgcaacctccgcttcccaggttcaagcaattctcctgcctcagcctcccgagtagctgggattacaggcgcatgccaccacgcccagctaatttttctatttttagtagagacagggtttcaccatgttggtcaggctggtctcgatctcatgacctcgtgatccacctgcctcggacccccaaagtgctgggattacaggcatgagccaccgcgcccagcctgctttaagttttaaggaagcacttgtaaaaataaaatctggaagtactgtcaacatacaaattacatacaaatttggagatttataatgaagaattttgccaatttagctaaaatctaaatcttagatttaactaaatcttttaaatctttgtgtttcattataaaacacaaaacatttataatgaagacacacttcatgtcatcattataaatctttggtgttatcctggctcctatataaagagcactggcaggctcaggccagaagtggagagggggcttggaccgacaactatgtgttgttaattttcttctattaaaaatattttttacttttagaaattgaaatcatatagaaaattatgctgggcacagtggctcacgcctataatcccagcactttgggaggctgaggcaggtggatcacttgaggtcaaaagttcaatcgagactagcctgaccaacatggtgaaaccccatctcttataaaaatgtaaaaattagccgggtgttaggccgggcacggtggctcatgcctgtaatcccagcactttgggaggctgaggcgggtggatcatgaggtccggagttcgaaaccagcctgaccaacatagtgaaaccccgtctctactgaaaatacaaaaattagccgggagtggtcgtgggcccctgtaatcccagctactccagaggctgagacagagaattgcttgaacctgggaggcggaggttcaagtgagccaagatcataccactgcaatccagcttgagtgaaagagcgagattccatctcaaacaaacaaaaaattagccgggtgtggtggcatgcacctgtaatctcagctacttgggagactgaggcaggagaattgcttgaacccaggacgaggcagttgcagtgagcagagattgagccactgcactccagcctgggcaacagagtaagactctgtctcaaaaaaaaaaaaaaaaaagaaaagaaaattattgaaagcaaattaaccagcatcataaytcaccattcaaaaatcattgctcatactttatcttttataatgcttagaaattaagtattatcaagtcaaagcttccttgggccatttctcttcccttcccactgagacaaccactcccatgaatttggtacatttccttccaactctatttaaatatcaattttacttcaaactgcattttttttttttaaagacagagtctcttccccaggctggagttcagtggcacaatctcagctcactgcaacctccgccctccaggttcaagtgattctcttacctcagcctcctgagtagctgggattacgggcacatgccaccatgcccagctaatttttgtatttttaatagagatggggtttcactgtgttggccaggctggtcaaacccctgacctcaagtgatccacctgccttggcctcccagagtgctgggattacaggcatgcgctaccgcgccctgccttcaaactgcttttttgatgaatgtcaaaaggacatagaggcctggtgtggtggctcatgcctgtaatcccagcactttgggaggcctagggaggtggatggcttgagcccaggagttcgagtccagcctgggcaacatggcaaaaccctgtctctacaaaaaacacaaattaaccggatgtggtggctcatggctatcgttacagctacttgggaagctgaggtggaaggactgcttgagctcaggaggtcgaggctgcagtaagccatgattgtgccactgtgctccaggattcttgctcaaaaaaaaaaaaaaagacaagacaagactaagcatggtggcccatgcctacaatcccagcactttgggaagctgaggccagccagagtatcacttgagcccgggaattcaaggccagcctgggcaacgtggcaaaaccctgtctctacaaaaaattagccaggcatggtggcgcacccctgtagccccagctactcaggaggcagaggtgggaggatcgcttgagtcccagaggttgaggctgcagtgagcctagattgcaccactgcactccagcctgggtgacagagcaagaccctgtctcaaaaaaaaaaaaaaggacagaaatctttactagcctttattttgtactgtcacatatgttctatgtttaggggatggaactcttagagcatttcacatttcacatgatatttcttttttttcctttttgtcacatgatgtttcttgttaacaaaaattggagaagtatttagtgttttacagagcttcaattacttggtgtaaactttcagccaaaggtgatccaaaatggaaatggagtggaacttgttttgtgtactagattgtatcttttttttttttttttttttttttttgagacagagtctcgctctgtcgcccaggctggagtgcagtggcgcagtctctgctcactgcaagctccgcctccccggttcacgccattctcctgcctcagcctccccagtagctgggactacaggtgcccgccaccacacctggctaattttttgtatttttagtagagacggggtttcaccgtgttagccaggatggtctcgatctcctgacctcgtgatccacctgcctcggcctcccaaagtgctgggattacaggcgtgagccaccgcacccggcctagattgtatcttaaatccaaatgactactgtattatatgaaagtaatcagtttttttttttttttacaaaaattacacttayggagtttyttattccatttatcctcctagaaagtacaggagatattttttccacaatatcagattactcttaataatatttttagattccttctaaaaaggtacttactagaaatgtgaattcccaggccttcacttccagaaattctgattaattaggtctggggtggggtctaggagtctgcattctaacaggcagcccaggtgattctcgtgtaggactccttgggagcacactttgaagaatgcgtctactatgctgtgatggttttataacttactaatttcaaccaaggattggtgtagtagcccattctcacgctgctatgaagaactgcctgagactgggtaatttataaaggaaagaggtttaattgactcgctgttccacattgctggggaggcctcaggaaacttacagtcagtgcaggcaggggaaatgccagacgcttataaaaccatcaggtctcatgcaactcactcaaaatcaccagaacagcatgggggaaaccgcccccacctggtcctgcccttgacacgtggggattatgggaattayaattcaaggtgagatttgagtggggacacagarcctaaccatatcagttggcaaactttcttttttttattttttaaatttttttattttaagagatggggtctcactgtttggctcagtctggagtacagtggcatgatcctggctcactgcagcctcgaactcctgggctcaagcaatcctcctgccttggcctcccaaagtactgggattacaggtgtgagccaccacacccgaccctctagaagtgtttttgtttgtttgtttgttttttgttttttgagacagagtttcgctctttcacgcaggctggagtgaactggcgcgatctyggctcactgcaacctccatcccccygggttcaagcgattctcctgcctcagcctcctgagtagctgggattataggtgcccaccaccacacctggctaatttttatatttttagtagagacggggtttcaccatgttggccgggctggtctcaaactcctgacctcaggtgatccactcacctcggcctcccaaagtgctaggattacaggcgtgagccaccatgcccagcctagaaatgttttactaattagtaatgtagtcttctaaagggaactattacattgtcatattgtgtttccagacagtattttttcagttaaagccaagggaataacttcaggatcctctgccttgggacccctctcgttcagctgaaaacttcatccctccctttgctgtaggatggcacagacacccagttgccctcacagtgcagtcggactgctctcagcatgggagcgggcatggccttcgccagttgcctccatcccgctgaagcagaagactcagctgtttacctcaccctgctcggaaactctagcgtggtaattataggtgcctttgatttgtaaagaaaaatgggaaattaatttattagtacattataagtgaagttaatttggtataaaatcactaaaagatgtggaattgggccaggtatatggtaaggaagtcctcatagggtgaaggttgaaactctccgctggagctttaaggattttgatatgtctgatgagacatcaaagatgatcaaagggtgattattaactactgagctgttagtcctgtgaactttattctaatttataaattctgttctttatcttcccttaaagtagtaatgagcttgtaaggactgaaatcttatttatgaaaagacctgcattttctgagatgtcatggtcttgcttctcagagggcagtagtaactttgacagttttgaggcaaactcacacctacctgggttttattgctgattagtgatttttttaagcactttgcctctagatgttctgagttacataaataacagtttatcatttaaccaagcacatatgattcacatttaatttttaccacttagtcctggaagactttaaaatgttatttatataagccattgctcaaattggtttccagttatcattaaacaagtttaaatacagctgtggacttttgcgagctttttattggatatttcacacccgaagaccatcttgtaccaccaacagtttaggattcttagagattactcccyagactgtagacgtaaagcacaatcacgtcgacctgaccttatgttccttaactcctttcttgctgcagtttcccgccccctccccgccccagccagtgaaatgtacattttggtagactttgaatggatggatccattgtggtccaattgtatgactgagccacaaatrgacaactcatggaaggacggttctggtcccagtggggctactaattttcaatgtagagtctgggaaagcttcttaacctccatttacctctgattctctgggaactgcaacagcagaatgatactgatccgggagaggctgagcagtgcttacgtggcttatgtgggacagatgcccgaacgtgctgccacaggtcagatggggcagaatgaggcagattttcacattgtattaagttagtttttaatgagtttaatcttcagtttgcacttttcaaaaactgtgtatacagatcacctgggatcttgttaacctgctggagccgattcggtaggtcttggaatagagcctgcgttctgcatttctttcaagcctccaggtggtattgatgctgctggggcttggatcacacttgctaaatggtgagggctgtagaaaagggctgtattctccattccaatggagartagcccccattccaagtctaaaacaggaggctcttttttttttagatggagtttctcatcacccaggctggagtgcaatggagcaatctcggctcactgcaacctccacctcctgggttcaagtgattctcctgcctcagcctcccaagtagctgggattacaggcgcccaccaccacgcctggctaattttcgtattttttagtagagacagggttttaccatgttggccaggctggtcatgaactcctgacctcaggcaatctgcctgcctcggccttccaaagtgctgggattataggcatgagccaccgtgcctggccaagggggctcttgaaaggcaagaatgggaggagaaaaagcatggtatacaatctataaaacaactccccaagaaacaactcaggttttcagtactatgggctgtttttactttgctttgatcaccagtttttttgtaccagttgtttcgttcactcaatggtagtccatctcttactgttattcagttgtttttatatgtgtatcttgtgtcatttctgttagatgataaaatcctagcacagggttatgccttatgttacctgtatatccctgctctagttactactgctgcataacacagctctaaaactcgttgtaaaataactatttgttttgtttgcttatcaaacaaaacttgtttacaagtccctgttttttttttaagacagagacttgctctgttccccaggctggagtgcagtggtgcaatcacagctccctgcccctttgaccttctggactcaagcaatccttctgcctctgcctgccatgtagctgggaccacaggtgcacatcaccatgcccagcaatttttttttttttttttgtagagagagagtcttctcacattgcttcagttggtcttgaactcctgggctcaagcagtccttccacttcggcctcctaaagtgctggaattacaggcctgagccactgcccctggcctaaaatgactatttgtattgtactcacagattcctgtaggtcaggaatttggacctcactagtaggggcaacttgcttttgcttcacaatgtccgaggccttaggtaggagattcaaagcctgggggtgacttgatggctgggagctataatcataataaagtatctctacttacatatctagtggttgagcttgggtatcagctgggactcagttgggatgttagctaaacacccatggcctctccgtgtggtagctctgttgagctagtttgggcttcctcacagcatggcagctgggttccaagggcaagtcctaagagaacaargtagcagtgtgcgacatgtttgtgctctggcctcggaagcatcatttctactgtatttttttgtttgtttgttgctttaaagacagcgtcrttctgtcgcctaggttggagtgcagtggcgccatcgtagccccctacaaccttgaactcctgagctgaagcggtcgtcctgcctcagcctcccaaagtgctgggattacaagcatgagctccacgcccagcctttagtgtattcttttggttgaagccatcacaaaggtttctcagggttcaaatgaggggacatcagccccactgttggatgggaggagtgtcaagattacactgtagggtctggccacagtggcttatgcctgtaatcccagcactttgggaggccgaggtaggtagattgcttgagcccaggagtttgagaccagcgtgggcaacatggggaaaccctgtctctataaaaaatacaaacattagctagccatggtggcgcacacctgtggttccagcaacgtgaggaggctgaggtgggaggatcacttgaacctgggaggcggaagtggcagtgagccaaaatcataccactgcactccagcctgggctacagagggagaccctgtgtcaaaaacaaaacaaaaaacaaggttacattgtaagaatgtcatgtgagatgggagatgctgtggccatctctggtgaatacattctgcagcagttggaacaacactcagcagggtgttgaccgcattatataaactcagtgaaagactgttgtgtaaatgagtggtaggtaatttaagcaccaaggtgggtgaggaccaaatacaagaattcaattccagatgtgaacagattaccccatggtaccaagataaatgcagaccttccaccttttatagttattgatagtctcttcttgctatctctactctttctgtttccaacatggagaatctgtgaattgatcacgtggaactgaacttcttcaaatctttgcatttgtgtcacgatgctggcatggtttttcctgcttatctagtgtactgcccctctccttcttgggctgtggcatatcccagcagctggctagtatcttacagtgatggggctgggcgtggtggcccatgcctgtaatcccagcagcactttgagaggccaaggtgggcagatcacctgaggtcaggagtttgagaccagcctggccaacatggtgaaacccygtctctactaaaaatacaaaaattagccaggtgtggtggtgtatgcctgtaatcccagctactcgggaggctgaggcaggagaatcacttgaacccgggaggtggaggttgcggtgagccgagatctcatcactgcactccagcctgagtgacagagcaagacaccatctcaaacaaaaacaaaaaccaatgatcggcttctcttagcctcagcaaatgcagtgtgaacaggcgctggtccatctgcggacatcgagatggctggcctggtcacacctacataggcagctgctctgtggctgcatgtcacactgagggactatctgtggctgaaccggagtgtgactctcagtctttggctttatgtatcttatgtgtatttatcctcatcatatcctcatcgtgtacatatcctcatgtattatcctatgatatcagttaattaatacagtgagaaaagcaaaaacgatccctcctccaaagtaagtagaagatgttgagatgttttaccacaattgctaaagctttccaggtgacagaacaatttgtgaatatcttttacttcattttactttaatatgtatatatgagacagggtcaccctggctggagtgctacaatcatggctcactgcagcctcgacttcccagactcaagtgacctcctcatctcggcctcctgagtagctgggattataggcgcatgaaaccatgcccggctaatttttaaaattttttttgcagagacagggtctcattacgttgccccggctggtcttaaactcttgggtttaaggagtcctcctgccgcagcctcccaaaatgctgtgattacagttgtgagccactgtgcctggctgaaattttacttttttgtttttatattttgcgacagagtcttgctctgttaaccaggctggagtgcaatggcacgatcttggctcactgcagcctccgcctcccgggttcaagcgattctagtgcctcagcctcccaggtagctgggattccaggtgcacaccactatgcctggctgatttttgtatttttagtagagacagggtttcaccatgttggcttagctgttttttgagttttggggtagaaatggggtttcaccatgttgcccaggctggtcaccaactcctgagctaaagtgatacaaccaccttggcctcccaaagtgctaggattatcattttcattactaaatcagaaatgtgggccggacctggtggctcacccctgtaatcccaagatctcttgagcctgggagatcaaggctatagtgacctaagattgtgccactgtactctagcctgggcaacagagtgagactcggtctcaaaacaaaaagaactagacagacatttactttattagaaggagaaaatgtgattacaaaagctttttgaatataaaaaggtaacagtgtaggcctctccagtatatactctggccctctgaaattcctaaaactgaaagtattttagtgagagcattttacacagtcatctgaagcactgttgtggccattttctgctgttgactgaacatgaaaagaaaagccgtagatagaatttcagttaactgctgattctggtggttgtcatctttttttttttttttttttttaaagaaaagtaacctccgtggcattaggatggatgctgtctctgattaggccatgaccccatgtagcaattctgagtgtcaggtaccactgctccaggtatggatgccagtgctgaccacaaggctacaaggctgatgcccgcatcccaggagctctgtggagcagggagcaatcaggtgttattaatattagtgtatgcattactgagattagaggcccgctgggaagacactaatcttgtattttgttcagtacttagtgttcgatgcttattatccaaaaagaccagcatcgtctctgagaagatgttaagaacaaaccagactgggctcagtggttcaagcctgtaatcccagcactttgggaggctaaggcaggtggatcacctgaggtcaggagttcaagaccagtctgagcaacatggcaaaactctgtttctactaaaaaatacaaaaaattagctgggcatggtggcatgcacctgtaatcccagctactcgggaggctgaggcaggaggatcatttgaacccaggaggcggaggttgcagtgagccgagatcgcgccattgcactctagtctgggtgacagagagagactccatctcccccccgcccccgtccccctgcaaaaaagaaaacaaaaaaacccaaaaaaccctggggttggtttaggacagctcttcctttctgtctttcactctaccctacccccatcccccaagccaggaaaatattttttcctccaagaagcacgtgccattgccagagcatcttgggaaggccaagttgaacaccatagacagtgatgtggtcattcttaagcattcttcctggtcatcatcgtcccagagaccattgtcctgcagtgggatggcatgttcactcagagagcaccatgcaatttgtgatccctcaaatacgggtcaaactctgctaccctatctcctttccctgtctcccaggacacatttactgagtagattttcatgcacctgtgatataatacccatgggttttttattttttaccatccagttctactgatctgatctgagaactggctgactctagggcttcttgtagtgcctactctggggctgctccttgctgaggtccaccctctgcagccagggggatgttttgtgcaccaaatggtgtaccaggatgtggcagtagttccctgttctggcactaggggaaactggagcagctcggcccatctgggcttagcctttctgtaagtagcactgaaacaccttcttaggcagatccacacccccccgcgtgtgtggcagacgctggctggtggtgtggagcgccgcgaggcaggtgatgagaacacagccacgatttagtcaccgcagagaagcagtgtgtggacttgagctagaaatccggacaccttccatcttttcctagtttcacttctcaagttgaaatctctcaccctttctgaaccatgtattttccaatctgtcaagggggtcaggagtgtttgtcagagaagcatctatagcatctgtgccctctacgtgccctctggcggaagttgttttcctgaaactttggaccagctttggcattttaagcaggtttgttggcaaagagatggactggcagcagcagggagggagcaatgtgtctgtctcacttggattctgccccgagggctcacaatctgttttccctgcagcaccaagtaccctagcgccactcagcaaatgcgagttaacggaatcagcccggcttctacagggaacctgggctcctttgcctcaggaaggcaagtggcttcccagacagcgtaatttgggaggatgcatcgctctgccacccakgctggagtgcaatggcgcgatctcagctcactgcagcctcttcctcccgggttcaagcgattctcttggctcagcctccctactagctgggattataggcatgcaccactgcacctggctaatttttgtatttttagtagagacggggtttcaccatgttgcccaggctggtctcaggtgatctgcccgcctcggcctcccaaagtgctgggattataggcgtaagccaccgtgtctatggccaagcctctctgaattagacaacaactagataacctacttggaaatttgattagcatcttccagattttccacaatgaggagcgtcatccccagcagcttgaaggcctaattttgtgtttattaccacagtgactttgctttttaaaccagtaggattctgccagggaagacttggaagtggcaggagaccctgctctgctgtaggaaaggatgttctcagagtttctgccctgttcatagtttacatccaatgcacacacacgcagtttccttatgtgactgcgtccttgttcctcctcatgctgtgatttcacctgtggactgctctgtgtactcccatagcattaaccagtcatgggatgtgggctcccaaagcgaggcctagcctcgagtgaggaggcagctcccttcagagaagggcagtgtccaggagggacttgtggtctgttagcaccagcacacctggtgcctcagtcttccagggggaatgcagacagagccacagcactcacctctgcagcagttctcagacgtgcccccgacccgcagcctcacctcraaggcaactcttcsagccccactctggagggacggaatcagaagctggggaaaggtccagcagtctgtgcgcacagccctctgggggattctgaggcatgctcaggtttgagagcccctgcattataatgatagaaatagttgtaaatggagccaggcacagtggctcatgcctgtaatcccagcaccttgggaggccaaggtgggtggatcacttgaggtcaggagtttgagaccagcctggccaatgtggcaaaactccgtctctacttaaagtacaaaaaatagcaacgtgtggtggtgcacgcctgtaatcccagctactcaggaggctgaggcaggagaatctcttgaacctgggaggtggaggttgcagtgagctgagattgcgccactgcactccagcctgggtgacagagccagactccatctcaatatatatatatatatatatgtatgtataaataaatatatatgtatatttataaacttttttttttcaaaaaccattttaaaatgttaaacatacgtgtcataggacccagcccttcactcctgggtattgaactgagagaggaaggcatatgtacgcacaaagacctgtacgtggatgctcatagcagctgtactcacaatacctttaaactagagacaacccaggttcatcagtaggtgaatggataaacagagtgtggtgtatctacacagcagagtacttaagaagtgagctgttgataacccagcgtcatgggtgaatgtctaagttatgcagagtgaaagaagccagaccaaaaaaaaaaaaacccatatatatatatatatatatatatacacacacacacacacacacacacacacacacactatatatatgtactatgtatatgtgtactatatatgtatatatacactatatatacacactatatacacactatatatatatatatatatatatatatatatatatatatatgtgtgtgtgtgtgtgtgtgtgtgtgtgtgtgtgtgtttagtttttgagacagagtcttgctctgttgcccaggctggagtgcagtggtgcaatttcggctccactgcaacctccacctcctcctgggttctagtgattctcctgcctcagccacccaagtagctgggattacaggtgtgtgccatcatgcccggataattttggtatttttagtagagacctgggtttctccacattggcaaggctggtctcgaactcctggcctcaagtgatccacccgcctcggcctcccaaagtgttgggattacaggcgtgagccaccacgcttggcctatatatatttatatgctataaatatataaaagtccattgatagaaaagtctagagtgcaaaccatagtgataagaaagatcagtggttgcctgggaatggggtaaagagcaagaaagggttggattattaaaaaaaatgaggaaattttgagggggatgatggatgtgtttattattatgatgtactggtgtctccattgtgtacatatgtcagaactcatcaggtaatgtacctgatcaagttgtatagcagtttatatgtcaagaacacctcaacagagctgtaaaaaaaacacgacaggtctgacagttacctgggaaaggtgggggaacaggtggtagaagaacacattttttatgatgttcatggtacttacataacataaatgaataaaatagggccaacatggaaaagaaaacaaaatgaaggaaaatgtcaaattgccatcctgaacaccagcaccgcctgtaattagcrttcctggctgcagccacatctgcggtcctgctcctcatgaagccgtcctccgtgccatgtcccggccatgcctgtccttagcttcctggtgcacactgtcctccaccttgtgttcaggcacagggctgcttggctcacccttgctgcacctggcctgtccgtcctcccaccgcggtgccgcccaggccttcccactgcagggctggctaacggtgcatggaagagactcgagtccgtgttgtgtcctcatagcccaccgaggaggcagcagtgccggacatttcgcggataggttgtggtctctgagtctcctcctctcaagaggatgagatttgtctgtgttattgtcaaaactcttatttgtcacgccgcgggttatgtgtcagtaacaaaaagctgagatttaggccggtgtttcttactggtgcagcctttaaatgcacacctgcgaatgttcagtgcaccttccgcttcctggctctatttcagtcaaacctgaggtcgtagtgaaagtcggtgaggaattctttggaacttcctgattggctgtgtccttgcctccttgtcttcccgcagatttgatttgtatccactgtcaccagcactgctcacttaggactttctggatccrgacccaggcagcgcacactggactcttgaggaagtgagtaccccaccactgcctgcctgttgaacccggggaggctcttgtctgactgaaatcactgcaggcttcccgacgatcccctgggtgtgtgtgggcaggcgcacttgccactgggcacaggtgataaagcattgtgatttttttttttggtgagaggaacggatgtatctaagatctcaggaaactgagaacttccttttctgctcttattaaatgtcaatatatatataatatatatcaatatatatgtaaatgtatatattgacatttaatagcaaacactggaataatgagaggatagtgacgttcagacgttaaaagccagtgggattcatcgtggagctcagaattaaggtgaagttatttagccacacccaaggtcaggtcaggtaaaatgctcatttaacttacaggaatgaactttgaagaccatggccttcaaattgcctgggattatttccatggaaatgctactgtgtttacattgtcacgaaatgataggaaatagtttttggtttgggtttttgtttttgttttgagacagagtctgtcacccaggctggagtatagtggcacgatctcagctagttgcaacctccgcctcccaggttcaagcgtgtctcttgcctcagcctcccgagtagctgggattacaggtgctcgccaccatgctcagctaatttttgtatttttagtagagacagggtttcccaatgttggccaggctggtctcgaactcctgacctcaggtgatccacccgcctcagcctcccaaagtactgggattacaggcatgagctacctcacctggcctttcctttttttttttttttttttttttttttagaagctgggtctccctgttgcccaggttgcagtgtggtggtggtgcaatcacagctcactgcagcctcgacctcccaggctcaagtgatctgcccacctcagtctcctgagtagctgggactacaggcatgcactaccacacccagctaattaaaaaaaaataaaaaataaaaaataaaaagtttttttgtagagatggggtctcactgtgttgcccaggctggtcttctggtcttgaactcctgggcttaagcaatcctcccacctcagcctcccaaagtgctgggattacatgtatgagycaccatgcccagccacccccccccaccccasttttttttttttttttttttttggacaatcaccagagagctgaattttacattgatttcacatgtttgtgtcttaggtgacttttcccaactgttaattgatagaaaatgatttgtctgtatccttgaaagattgtactgtattatttaaaaaaaaaccctctaatcttcccatttgacaaatgtgacaraaggctgtgatgaatcagtagcatttaaagtactgacacatacctgtattttgcaggaaggagactctaattttggattccttggtggaggaaaataaaacactctggtcttgccgccaacgatgcaagtgtgactgctggcgtcttcatgagctccagaggtcacagcacgctaccaaggactctcatggcccctcggatgatttccgagggagacataggaggcattgctcaaatcacctcctctctattcctgggcagaggcagtgtggcctccaatcggcacctcctccaggctcgtggcatcacctgcattgttaatgctaccattgagatccctaatttcaactggccccaatttgagtatgttaaagtgcctctggctgacatgccgcatgcccccattggactgtactttgacaccgtggctgacaagatccacagtgtgagcaggaagcacggggccaccttggtgcactgtgctgcaggggtgagccgctcagccacgctgtgtatcgcgtacctgatgaaattccacaacgtgtgcctgctggaggcrtacaactgggtgaaagcccggcgacctgtcatcaggcccaacgtaggcttctggaggcaactgatagactacgagcgccagctctttgggaagtcgacagttaaaatggtacagacaccttatggcatagttcccgacgtctatgagaaggagtcccgacacctgatgccttactggggratttagtgccactgaagcctgcgtcagcagcccgagcggggccggcatctgctccccgccgtctgctccctctccactctcttctcaaatggctgacttctggttctccctcaagtgttttttacactgggtgttcaaatttattttaagagatagggagggaggggacataaagggaatgcatacattgctagtcacatttttaaaattaacattttggaatagtgtttatggaaatctttagcttttaatcatttttaccaatttgaacagtttaataaactggttctgctctcttctgaatctcatgcctttggcaccttggtaggtgcaggaggagctcagtgcaaaaatcactytggggcctcattaaccctttagagacaagctttgccccaggctgcggaccagacagatgcttagggaaggttgatamcagcttcagtctctactggattagccctactctttcctttcccctccattatttagtgactctgtaagtaagttaaatacacccttattatktagctgttaagtaactataatgaaatctgctgcaaaatctctcttggaatccatgtgcccaggattatattagcattatttttaataaatctatatgcttaacatattagaatttttactaataatttcaaggtgtgtgtgtgtcgatgatgggaaaaaggtgctctccagtaactaactaactaactgctgaaatgtggctcctgtgccagttgggaacattacttaaaatacacatcccagcagagtcttgtcggcgcgtcacatcctggtggacaggcagacacaccgtccccggtgctgggccggtgggagatgattgatagtgcacgctctgatcaggggtgctggttttggtttcctcttggttagtggagcgccccgaagcagcgtgtcctccatcagagaaactggttttcaataaaaggtgcctctgcttgactattattaccacatacgaaaatgccctaaaccaaacctcagtatgagcgataagcaagtaacaaaaacaatggctgcctttgtttaactttgggactgtctgtcacccagttcactgctcctgataaaacgggcagcaccgctcatcatcatcagatacatggtagaaggtgaatgagctcgcccctgtcccactcctgggacactcctgggcactttccaygtgcccccaagtaaccactgtcctagggcgtgcctttcttctgcatggagggcatcctgggcgtctgcccgtgcaatgggaacccgctgcggcactgctctttggcttcatttatcaggaaggttgtagcttgctcaccagaggaatagttttctagattttttgggtcagttttggcaggaagccatacataggccagtagctacatatttagacaaatatcctccacattttacctggtttgtggcaatggttttttcccatctaaattctaccttttattgctttatacccgtggctgcccactgttataaacatgcatcattattctctagaaaaactaaaatgaaaaaaattattaatagtttctatgggaaatcagaggaaacaacaaatgctataagatcaaaaaaaaaaaaaaaaaaaaaaaatccagggaggctctggctgctttagtaggaggctcagctttgagtctgggagtttctgaataagagcacccaaataaccattgtcctagggcgagaagacacctggtgacagatgttcttggtaattaatgaaaattacctgtagaattcctggcaagcagcactacggggctgtaactaagagttcctcgcacgtgggaagctgaacacctttgtaatcttaagcgcatgggcccctgttcatcctagtgacttgcatctatgtgaaatcaacccaacaaagacaagaccaagaaaaggcttagtagcctgacattcttctacacttgtattttggttagggaagtttaacaaggggtgatttcagaacagaccctgaaaatattttaaaggtaaagctttataatgtctaaacacatcaattagagcagttgtttattaaaatacaaacaagggagaaaccacaccatcttttaaaatacaggcgcgaattccacatcacgcagaagacaacgcatttcgctaagggccacagcattcactggttaataaagccacagctacaaagtaatgagatgtcccacatgaatactttttaaccacttacattcacgtcaacatataaataatggaattaagtaaaaacttcattataatgctattttgttagaaaagtatttgtaaagtggcatttttcccccaagagctgtttcacttaagctttatttcctcggcctggcaaggggagggcttttcagtattgttatttggtacacacttacctgaagaaataagtaagtaacttaaacataaaaaacatagtcgacacacatcttgccctgcattctgacatttgctggaatggtctacagcaggctacaatgctcccttctgaatggcaaatgtctgaaaatgtcaaagtttattaactgttcacaaaggcaggcatttgaccttgaaggtgttaaagggaattttttatttttgagacagagtttcgctcttgttgcccaggctggagtgcagtggcgcgatctcggctcactgcaacctccgcctctctggttcaagcaattctcctgcctcagcctcccgagtagctcggattacaggcacctgccaccatgcccagctaatttttgtatttttagtagagacagggtctcgccatgttggccaggctggtcttgaactcctgacctcgggtgatccacccggctcggcctcccaaagtgctggggattacaggcgtgagccaccacgcccggctaaagggaatttttgtagtggtccccagtacagggccagcatttcctatttctgtaacatacagccctataatctttgcaaagctgaagtacacttgaaataggcaaacagaagacacctttaaacaaataagacccccccaaaacccttcaaatatgtatatgtacacaaaatattcaaataattaaaaattcacaacccctatggaatgctaactagtagccacaggaaaaataaagcatggaaaatatcctcatatatccagtacctcttctatctcaagcatgtccagacaaaaattaaattacacactaagccataaaaattttaaaggcaaaacatcccaccaaaaaaagaaaagtgcttattaatggccattcaagcagtggggtgaagcgggctgacacaatgcacagtatggaaataagtaaccttggctacagtttccaaggacacggggctcctggctgacaagaagagctgaggtgaagctgaatgcagcgttgagccattttaataaacgtttataaagaaaagcagcgcaaccgtgtcccacactccttggatccctattggtggcatctaattaaacatttcaagtattcaagagatatgaaaggtagtgaatacttttcatagcaaaggctttttttctgttgacatctgctgaattttcctgtggcacctcccaaggagtgactaagcctaccatccttggtaaggaaaatggggattatactaaggaattttatctgaggcattctggaatttctcaggaatagaaaccagcccagctaccaagtgagctttttaaaatgttgatactgggccactgtgacatgacaggcatctatatagcatttcaaaaaaatgcttcagcaatacaaattcaaactgggaaacttttttttttttttttttaagagacagtgtctcgctctgtcatcacctacgctgtcacgtgcagcctcaaactcctggacttgtgatctcccgcctcagcttacctagtagctgggaccacgaatgtccacagatgcactccacctacccggctaattattttttgtataattagctggggtctttaccatcatgcccagggctggtctctaactcctgggaaacattcttattgcaaaggtagattctgctgtcatggttctgttatgaaatttaggccaggcgcagtggctcacgcctgtaatcccggtactttgggaggctgaggcgggcggatcgcctgaggtccggagttcaagcctggccaacatggagaaactttgcctctactaaaaatacaaaattagctgggcgtggtggtgcacgcctgtaatcccagctactcacgaggctgaggcaggagaatcgcttgaacccgggaggcggaggttgcactgagctgagattgtgccattgcactcaagcctgggcaacaagagtgaaactccatctcaaaaaaaaacaaagaatttttaaggccaattagcagcctgcttgcattccagctccatgtggaagtggtgctgtccaggatggaagcgccgaggcctcaggaaaagcctgccaaaagctgtcccacttgtgttgttagaaacaccccactagccttgtggtgggcaaaagctccaaaggtgcccattcagagtgagctgcctcagtcaggaatggccagagacggtatcatcgggagcgagtgagaaaagcctttctctcctcggtgcctctctgtgcattcgggcacgcagaaggtcaagcagaagcctcagcaacagctgtttaatgaaaatgttccacacctttcttggagaacatggaaaagctgtaagatggagcaagacagaatttgtcctgagaggggaaaataaattatgtaaaagcagcaattatatagacaagaccaactttttcagtttaaaaataaaagtctaggtcagagggtctaaaccacacaaagtaaagcacacgagattgaaaaatctcttcataaagcgcataatcaacaattcagagagacgtgtgccctagattggtagttcttcccaggaataacacagctcttagccacttgggtttttcccctaattttatgcattcacattaaatggcaaagacaattccctactccaggaagcatgagccttttctatctaaaattcagtactgtttctggacaattttcttctacttcttctaagtcatgtatctatcccataaatatacatcttgatactttacactaggccgagagctccacattttcaccctgaattaattttcaggtttttctcacagatactgcaaagtcaggcagtgttggtccctatgcagtcatctttggaaatttggagagaggccactgcaaagagatttcattccactgcctttccaaatcttgtctgagaaaactccatggtcacagtctttgcatgcggcagaacaggtttgcagcgaaggctcccggggggaaggatattatcctaatacacaggatttgggcctctgtcaaaatgagcattcttcacggctgcagagtgcccaggcatgttttgggaaaaagtcttgagagtggacagaagtgaagggaaggagtagagaactggttcagttgtgacaaccaagtgggtaaaatctgccctcacctgcctgctactgtccaggggagatgggcagaatcttctccataaaaagcagaacatcagtttaatcgcaatttcctctttttattcatttcagacattaacaaactaaatgcagataaatgtattctacttcacaggacagtaagtgtcctagataaaaacaagcactggctccaagcagtcgcccattctagtcccgcaacggtaatctatttttcttcaaatgtcagttcttcacagtttcaatactgcagcagcaagttcttccttagatcaagaaagccgtggtccgtatttcagaaaatcttaagtagagataagtgagcaagcttctggtgccacgtgcagtttgggtgggacaattttacctgaagtcctgcagactggccrtggggatgacgggggccccgtcccttgcggtgttcttcatatcgattcagggaagcgaactgtgcagtgctcgcattctatttattggtccctgtcaccccgtggggtgtcacagaaaaaaaaaagtcaatgcttcacagaggagttgttcagagcaggtcaggcaggacgaggccaggaggctttggttcgacacagttgatccagaagttggcacagctggcrtgatactggtgccctccataggccarcttgaaactgtctgtttctgagttgaatgcctgccagaaataaacagagatgtggggcaagtcaggctttttctgcatctcagagcttttcagcaaccaacatgtacatctatctctccaggtcacagaggctgaggccaaaatggcacacacataaaagctgagcggatagctacaggaattcaagagagaaggttttttactgctaattaaaggtataaaattgttaccactaaacctagtttcagcaaaaggtggccaaatcttccatggaaaaggcagacagaggttatggggtggagggggggaatcatgataaggggaactgaagtagccaagggctgtggatagctttcatccctcactgtgctgaaggaagccctcctcctaaggccggcatctgactacagcatgcaatcctttacactcctgtagctgaccacaagcctatcatgacaaaaaattacaagagagtta

SEQ ID NO: 95400 - DNA, 85379 bp, Homo sapiens
  misc_feature (1)...(85379): n = A,T,C or G
tttcctttggatatatacccagaagtggattattggatcatatggtagttccattcaaaaatttttaaggaacctccatactattttccaaaatggctgtactaatttacattcccactgacagtgtacagggtttttctccacatccttgccaatgcttatctcgctttttgataataatcattctgacaggtgtgaggtgatatctcatggtagttttaattcacatttccctgatgattagtgatgttgaacatttttttcacataccagttagctatttgcatgtctttttcttttgtttttcttttttttttttttttgagacagagtcttgctgttgcccaggctggagggcaatggtgtgatcttggctcactgcaacctccgcctcctgggttcaagtgattctcctgcctcagcctcctgagtagctgggaatacaagcgcccgccaccacgcccagctaatttttgtttttttagtagagacagggtttcaccaggttggcccggctggtctcgaactcctgacctcaggtgatccacccgcctcggcctcccatgctacttgcatgtcttcttttgagcaatgtcttttcaggcccttgtccacttatctgatgtaggggtcgtgaatattttctcccattccgtaggttgtctctttaccttttttttttttttccagacgaggtctcactctgttgcccaggctggagtaaagtggcacaatcacggtcactacagcctcaactgtctgagctcaagtgattctcctacctcagcctcccaagtagctgggaccacaggcgtgtgctatcatgcccagctaattttttgatttttttgtagagttgaactctcactaagtcacccagtttagtctcgaactcctgagcccaagcaatcttcccacctaggactgtcaaagtgttgggattacaggcatgagccaccgcaccaggccagaaactctacgtttgattctaaccacagcagcttagcagctgaggacaaactgttgggatattttggtctcagtcaatggcagccaggttaccaaccctgacaagatacaagttttcttcgttgggttcctggtacaaaagtcaaccttttcagttagttatgaatgaaagggcatgaagattgtgctattagtttatcctgaaggtcaatcttcaaaaatactggttcaacatggatttggatattattaatataaatttatggcttaaagaggacaaaaggtgtttttttgggttcctttacagagatatttagtgagggaacaaggcacttagtcatctttgctatgacaggttaaatacaaggtgtactgggaacatgtaagagggtgacttaactcagccattggggggtcaggagaagtgttcctaaggaagtgatgtctaagtgaggtaggcagtaccttggcaaaaaaaaccttgaagttaagagtgcatatgagaaatgaaggtatgtccacctggctggcaaatggagtctaagatagggcagtgatgataaagatataggaagatgctagatctggaagggccttctaaaaagaatgacaatataaatttattgtacaaatggagactttactgagagtgaaaccaggcaatattaatacttaggtagggacaacagatataaaccaggctattctcagcaaatcagaaattatggtcaccctacttgtaagtcacattcaggtgcttagactttcagtgaaagcatagagtatgtatcttctacattttgcctaagtgacttcattctttttttttttgagacagagtctcgctctgttgctcaggctggagtacagcggcacgatctcagctcactgcaagctccacctcccaggttcacgccattcttcttcctcagcctcctgagtagctgggactacaggcgcccaccaccacgcccggctaattttttgtatttttagttgagatggggtttcaccatgttagccaggatggtctcgatctcctgacctcgtgatccgcccgcctcagcctcccaaagtgctgggattacaggcgtgagccactgcacccagccagtgacttcatttttacttttgcctttacttactcatttcacaagtatttgaggatacacttcagagcactgaggttacaaagacaacagtgtctgtcctcaaggtctgtctaggtaagacacacagccaaataaacaattctaatacagttatacagttttagttctgacacctccaatgagctgtagacttgtatttgtcatttccagtcagaatgcaaaacacagatccaaaacagaactttcaatttctcctccaaatctattcttccttcagctggtcgtgtaagtgatgccactatcacatccacttaagacaaaaacccagaggagtactgccttaatcagtaatcagtgttacccttcttctcactgtgcatgttaattttgccacatcttttttttttttttttttttggtacagtgtctcactctgtcacctaggctggagtgcagtggtgtgatactgggtcaatgcagcctcaaccctctgggctgaagtgatcctctcacctcagcctcctaagtagctgggactacaggcatgcgccactacacctggctaatttttgcaatttttgtagagacgaagtttcaccatgttgcccagttctcatgcctccttgaactcctgaactcaagtgatctgcctaccttggcttcccaaaatgcagggatcccaggtgtgaggcaccgtgtcctgccctctccacatctttcttaagcacactgactaaattggtctaagtagagcctaacatcaactgaagggagagggtaatttccaggtagttgaatgctatgatttttgtttttttgtttttgagacagactcttgctctgttgaacaggctggagggcagtggtgcgatttcagctcactgcaacctccacctccagggttcaagcaattcttgcgcctcccaagaagctgggattacaggcatgcgccaccacacccagctaattgttgcatttttagcagagatgggttttcgccatgttgcccaggctgatcttgaactactggcctcaaatgatccatctgccttggcctcccaaactgctgggattacaggaatgagccactgtgcctggcccctgaatgctatgtttttaacgactagatctcagtattatgtgggactaatttttctacagtattacaacactgattactgatattcattgttgacaatcatgacatccagatctggatatttgccttagccagtctcaaaatttgagtttcaatgacaaagacacagatatgtcctaaatgactgaccccacttccactatgtgaagttgagagtggttgtaaagctgtacagctataggtgaaacactaatgttaatcaactatctgttgaacaactaccatgtaaaaggacaatttatgccttagagagcaatttaaaatttttttagagatgggggtctcgatacgttgcctagactggtctcaaacttgggctcaatccatcctcctgcctcagtctctcgagtagctgggattacaggtacacaccacttcaccaggcaaagggcaattttaatatttctaccatccattctccacacagctgccacagtgattttttttttttttttttttttgagatgcagtttcactctgttgcccaggcttgagtgtagtggcacaatcttggctcactgcaacctccacctcccaggttcaagtgattctcctacctcagcctcccgagtagctgggattacaggcgcccgtcacaatgcccagctaattttttttgtatttttagtagagatgaggtttcaccatgttgaccaggctggtctcgaacttctaacctcaagtgatccgcctgcctcggcctcccaaagtgatgggattacaggtgtgagccaccgctcccagcccacagtgatccttttacagcaaagctactcctttgctctcaacccttcgtcatattctgtcacttcccaataaaatccaaaccttaccagatgatacatgatctgccttgatttccatctaatttctctcatttgctgtgctccagccacactggtcttgccctttctccatgccaaacaaatccccatttcagggycactgcacttgctgcttctcttctaggatagtttccctctagaaatccatgttgctccttctctcattaaatgatcagatatttatgtgcctccttagctaagaggccttccttatctaccctaactaagagaatccccatatcactcttatccttttatcctgatttatttttccataaaacttgccacattactgggcattatctatcatttagtaatgtgtatattgcttattgacagtcttccctactataatatgagctccatgaggcagagactttgttttgttcactgctgaattcccagcacctacaacaagcctactcactaaacatttgttgaattaatcttcaggatacatcaaatgtaaaatatcctatcatatatttattgatgtgatgcataggaaaatgtctggaagggtacataccaaaatgttaattatttatttaacctggtgggaggtggtttttctttccttttcttttctttttgagacagagtttcgctctcgttgcccaggctggagtggaatggcaagatcttggctcattgtaacctctgcccccagggttcaagcgattctactgcctcagcctccggagtagctgggattacaggtgcctgccaccacacccgcgtaattttttgtatttttagtagagacgggatttcaccatgttggtcaggctggtctagaactccagaccctgtgatccgcccgcctcggcctgccaaagtgctggaattacaggcgtgagccaccgcgcccggcagggcttttttttttttttttttttggaatgaacttgtattatgcatataccaaaaaagaatgaaagggttcacacaggtataaagtgtaagtgaattctaaaaaaaggttgggcaaatttatcaaaggcagacttctaaatagatgtaacagttatatagttcagataaaccatggtttgaattcccttccccagtacttcctagcagtgtgatcccaagttatttatgtcagtgcctagatttcttcacctggaaaatagggataacaacaggtgcctacctcacaagttttaaatgagaccgtatgtgtaacctgctttgtgcaatgtctggcatgcaataagtactcgacaaatggtagctattagaatcatcattaacagcagtaataagagatcttgggacatacctagccctcaagattgacatcagagtagaccaccacatcctctcatcattgcgcctcaatttgggcctctgaagcccaaagaggggatggttctttccaaagaagacaatttcgacgttccagaagcatctgattgaaacgcaccctcttcaccccttaaaatcagtctggttcatccacgagcagcccttcggggcccggactggagaggcagccacggctcgccgtccctgggcccagttccctcagcctcaatttcccttgctgcaacaggggtggagatgggaacgttatccccaaacccaggcagtcccggctcggcccgcctcaccgcactccggaggggaccaaacagccccacgcgccaggaagcctcaggcaacgggccacgcgccacacgggcaaagtgattactggtcggatcaaaagtcaggcaagcggctcagccccatcctcccagtcctcgggcacggggacagcagcaggcgcgcggcggggaccgggaaaaggccaagagggcggtggcgggcgctcagcacccggcgggggcctccacggccgaggggcggaggcggcgggcgcgcggcacgcggcgcgctcgccactgcgccgcccgggggcgcgcacgcaaagcccggaggcgcgcgcgaccggcggctctttggcgcggattagggggtctcggcgaggtgaggcgccaggcagcgctgggcgggcgggcgggtggcggagcgcgagcccctctagcgggactagggagaagcgggggccacgaggtgcggcgggggaggagtcgcgggctgcgggccccggcggcgggcttgacgcggcaggctggcgggccggcgggcgggcagcggcgggcctcgccgctctgtgggggagggcggtgtggggccgggcctgaccccgggggcccgccccgcgtctgggcggtgccccagtgccccggcctcgccatttcccgctcagccctggagcgcgtagctctaccaagaatggccactgtgccagatgcccctgaccagcgttgcccatttgaatttcctagcaggccccccaaagtaggtatttcagtaccctgttagagctgaggcgcaggtaaaatgactggcccagkccggtcccaccccgtaaggatttgaacgttggctccacaactcgggagcctgcgcctttcctcctcccaacgtggactcctgcccggcgaagtgcctcacttccttctcccggtaactgattcgaatttggygattgttagtttggagctagcgccagtgtttccacggaagttggtgtcagaatgtggtctcttgtgaaagggggagaaagaagattctgcagactgcaatattgtgcttttttgcctttttttttttttctcctaggctgtactgcagtgcagtggcacgatcgcggctcactgcaatctccgcctcccaggctcaagcgattctcgtgcctgaggcgtgggccaccacgcccagctaatatttgtattttcagcagaggtggggtttcaccatgttggccaggctggtctcgaactcctgacctcaagtgatccttccgcctcggcctcccaaagtgctgggattacaggcgtgagccaccacgccyggccctactatttttttattttttgagatggcgtttctttcgcccaggctggagtgcaatggcgccatctcaacacactgcaacttctgcctcccaggttcaagcgattctcctgcctcagcctcccgagtacctgggattacaggcgcccgccaccacacctggctattttttgtatttttagtagagatggggtttcgctgtgttggccaggttgatctcgaactcctgacctcaggttatctgcccacctgggactcccaaagtgctgagattacaggcgygagccaccgcacccggcctcctactgtgctttttcgagtgttgatcagtccctattgactgtgcatcctttactggacgtctgtttttgtttttgttttttgagagggagtttcacacttgttgctyaggccagagtgcaacagcgcgttctcagcccaccgcaacctccacctcccgggttcaagcagttctcttgcctcagcctcccaagtagctggattacaggcatacgccaccacgcccagctaattttgtatttttagtagagacagggtttctacatgttggtcaggctgatctcgaactgccgacttcaggtgatctgcctgcctcggcctgctaaagtgctgggattacaggcgtgagccactgcgtccagccttgacatctgtatttgaaatgacacagctatcccttgtaagacactgcgcaagtaacatactctttcagagcttgcttgcttttgaaaaagcagcttgccccaaaagtgtgggagtgaggattcaaagaatccccacaccttggtacccacgggtacctagcaaattgaaaaagttcagtaaatttggctgttatttgattgctgcgttcgtaatacacccttgctagactcatttttcttcagagctcaacttttcctgagaggacagcaaagggagacctaccccaccccaaaaagggaaagttctttgatggcagcgttagcagaaatgttgcccacacttagtgatgaattattctccaagctaaaaattaccagggtgaaaaaaatcacttcagaaaagctaaagataaattaaccttttgtagaattaacatttattagtccactwctatgtgtttattgtattcctcctgtatgcttggcattttaaaagcatacagataggtatccgatatagtctctgctttcacttatttattatttatttttgagacaggatcttgcactgtcgcccaggctggagtgcagtggcacaatctcggctcactgcaacctccacctgcctggttcaagcaactctcatgcctcagcctcccgagtagctgggattataggcgcccgccaccacgccaagcaaatttttttgtatttttggtagagacggggttctcactatgttgcccaggctggtctgaaactcctgacctctggagattcatctgcctcagtctcccaaagtgctggagttacagacatgagctaccacacccagcctgctttcacttaatttagaagtgggggaaaatagacattcagaagtaatactcacaaagtagaatgtgaaaaatgccagataaaaagctgtgagtgggccgggtgcggtggctcatgcctgtaatcccagcacttggggaggctgaggtgggcagatcgcctgaggtcaggagttcgagattgcctggccaacatggtgaaaccccgtctctactaaaaatacaaaaattagccaggcctggtggcccgcgcctgtaatcccagctaattgggaggctgaggcaggagactcgcttgaacccgggaggcggaagttgcagtgagctgagatcgtgccattgcattccagcctaggcaacgagagcgagacttagtctcaaaaaaaaaacaaaaacaaaaacaaaaagctgtgagtgtacagaagaaggattattttttgacttagtgtaaaatattattttatttctgcttcaaagaagatactttgggccaggcatggtggctcacacttgtaatcccagcactccagcacttttggaggccgaggtgggcggatcacttgaggccaagagttctagaccagcctggccaacatggtgaaaccctgtctctcctaaaaatacaaaacaattagccaggtatggtggtggcacatgcttgtaatcccagcttctcaggaggctgaggcacaagacacaagaatcaaaaatgagaaccaaatggagaatgagaatcccttgaacctgggaggcagaggttgcaatgagtactccagcctgggcaacagagccagactgtgtctccaaaaaaaaaagaaaaagagacttagtctgtcctccaagctggagtgcagtggtggctcactgcatcctcgacctcctaggcccaagcgttccacctcatcctcctgagtagctggaaccataagcatgggccactgtacccggctaactttttttttttttttttaagagatggggtctccctatgttgcccaggctggtcttgaactcctgggtcccagtaatcctcccacgtcagcctcccagagtgctgggattacaggcatgagccactgtgcctggccctgttacgtacttgttgaaagagtgaggaacaaatgtatgttgtaatagataggattttttggtttccagttacagaaactcgttcagtcttatgattaaagttgagtttattaaagtttattaaagagagagaaatgagagaagagttaaacagttgagccacctggggctagggatttcaacagccagagcacatggactgaattctttgaatgaattctagtgaataactaagctccaactgccttctgtcctttcatgtcttactcaagatccagatttctggaagaagagacctggttgctttagcttttgtcaggggtggggaatggggtattgtgattggcagccccaccagtatcacatgaaatgtgggagggtcagtttcccaaataaagatggcagctaaggagagaaatgatgctgagtagagaaagccaacagttgtttattagaaatatgtagcatttgcccctgccaccctcagtgccccatagacccagatccttcctcataaaaaagaaaaatatgtagcatttatagaggaccaggtaccatgctacattacttatatggattatgatatttgattataacatttaattctcacaactttggaaggtaggcactgttayacccactacagaggaagaaacaggttttcagaggtggaataatttttcaacattacaaagctaagatgtggcagagctgagtatgttgcatatcttctctttatcttgtccctttgaatgattttctgatccatgtgccacttttgtttgttcctagggagtcatcaagctttggtgtatgtgttggccggttctgaagtcttgaagaagctctgctgaggaagaccaaagcagcactmgttgccaattagggaatggaccgtttgggtycctttagcagtaagtacagtgggaacaagtctcaggtgacttattattattttttttttgagatggactctccctctgttgcccaggctggggtacagtggcatgatgttggctcactgcaacttctgcctcccggctttaaacggttctcctgcctcagccgcctgagtagctaggactacaggcgcgcaccaccacacacagctaattttttttatttttatttttagtagagatagggttttaccatgttggccagactggtcttgaactcccgacctcaggtgatccacccacctcggcctcccaaagtgctgggattacaggtgtgagccaccactcccggccttcaggtgattattaatagcaaactagagtggaagttgatcaaggaagaaaaataaacgatgaagttargcaataaagccctttgactctgattctaagggaattatgagtatcaaaataaaatcaattaatacatattgattacccattgaacacatgacacaaacatatgaccctgggtcttacaagaaaatgaagcagccgkgcgtggtggctcacgcctgtaatcccagcactttgggaggccgaggcaggcagatcacgagatcaggagatggagaccatcctggctaacacagtgaaatcccgtctccagtaaaaaataaaaaaaattagccaggcatggtggcaggcgcctgtagtcccagctacttgggaggctgaggcaggagaatggcatgaacccgggaggcggagcttgcagtgagctgagattgtgccactgcactccagcttgggcgacagagtgagactctgtctcaaaaaaagaaaaaaaaaaaaaaagaaaatgaggctgagatggaccaggcatattctgattaacctgtagttaaacctagaaaagccatgggatttctgtttagaccaataacatgtttcaggcaccttgataagaaatgtgtcagtggtaagataaaggaaagatcatcccacctcccccttgatgtggaacttgtttctaagagtaaaccacggtagaataatttagagaattatggggtatgtatgaagtaaattcaagtagccataactatggataaaaaaattatactggccaggtgccatggctcacgcctgtaatcccagcactttgggaggtcgaggtgggtggatcatgaggtcaggagtttgagaccagcctggccaacaaggcaaaaccccgtctctactaaaaatacaaaaattagctgggggtaatggcgagtaactataatcccagctacacgggagctgaggcaggagaatcgcttgaacctgggaggcagaggctacagtaaaccaagatcatgccactgcactccagcctgggtgacaagagcaagaatctgtctcaaaaaaaaaaaattatactgctctttttccctgattctgaatatatgagatttggcagaaatagaaattccattgttagatgtttagtagtatcctaatgagaagaatcagaaaagtactttttgggtgttgtttcctcttcaacaattcgtgttttttttgagatggagtcttgctgcattacccaggctggwgtgcagtggcatgatctcggcttactgcaacctccacctcccgggttcaagcaattctccgtctcagcctcccgagtagctgggagtataggcgtctgccaccacgcccggctaatttttgtatttttagtagatacagggttttaccttgttggtcaggctggtcttgaactcctgacctcaggtgatccaccagccttggcctcccaaagtgctgggattacaagcgtgagccaccgctcccggcctgacagaacaatttcttaaaggagctctaatttactttttgatcacactcctaatataaatttaggagagaatggagtcttcagacacatctagttcaactctttcattttacatgtagagaaatctaagtggactgctctaatgctgggagtgtccaaaataaacttctttttggaaataatttcaaacttaagttgcaagaataagaatacaaacaatacccacataccttttgttaaccttttactccatctgctttgtcatttgcatgtgcactgtctgtctctgtgtgtgtgtatatatatgttttttattttttaattttttttatttttaagagatggggtctcactgtgtcacccaggctggactgcagtgacacaatcatagcccactggagccttgaattcctaggctcaagcgatgyccccaccttggcctcccagtgtgttggtattataggcataagccaccatgcctggcccartctttactattaaggttgcaaaaagatgattccccccccaccccctgccaaatctagtgctctctccacatttactagttagcatttttagtttttattttaagttcaggggtacatgtgcagggttgttatataggtaaacttcttgtcacaggggttttgtgtacaaattattttgtcaccaagataataagcatagcactcgagaggtagtttttgggtcctctccctcctcccactgttcaccctcaagaaggccctggtttctgttcccctctttgtgtccatgtgttcttgtttttttagctcatacttgtaggtgagatcagagggtatttggttttctcttcctgtgttagtttgcttaggataatgacctccagctccatccatgttgctgcaaaggatgtgatctcattacttttttatggctgcatagtattccatggtatatatgtaccgcattttctttatctgttcacttttttacttattttttattatggacacaggaattcctattttttcaaggatttacgatttattagcatacataactagctaggttcatggattattccaaatttggccactgggagtcccttcaaatgggctcctacatccttatagcgtactctcatcattttttttttctttttagcatctccgtcctttttggcataactaaatactccaagtgcatcctgtactccccccgccctggaatcagccacttctctgaggagtcctggtacttttacaagggagtcatatcagagaccgagatcttttcatctactagaatatttttgcatcttggcccttttggctgacagaactaggaaatatatgcatgttatgtgctatatacatatatgccagtatacatacacacatgcacatttacgtacacatatacttcttttgaggaaatcatgagttcacattgatacctctaattcatcatcatgggcttttttcttgtctgcattaattcctcattcacatgtctctactcagtgagaaccctggctcccaacatcaatataattccactatcccctgccctcaaccccttgtacttaccaacttcattgttttctggtttaatctgtcccttaatcctttttgcaaagaaaagaggactgttttttactctaatttttttctttttcttttctcttttttttttttgagacagagcttcgctcttgtcactcaggctagagtgcagtgccacgatctcagcttactgcagtctccacctcctggattcaggtgattgtcctgcctcagcctcctgagtagctggaattacaggtgtctgccaccacacctggctaatttttgtrtacgggatttcaccatgttggccaggctggtcttgaactcctgatctcaggtgatccacccgccttggcctcccaaagtactgggattacaggcacaagccaccgtgcctggcctctaatttcttataggaaagatagcatactatatatatgtgttcttttgtacttttaaaaaaattcttcaatcagcaccaggattgtacttttttcccctcacttaatagtatctcctggaaatactgtattagttggtagaggttgtcctcattctgttttttatagttgcataatacttcattgtgtggatatgttattattcaaataattgcttatacttggacatctaagtagtattttgcaattacatctaatattatatataaccttggatgtgtgtatttttgtattattggaaatgtatattcatggtaaaaaattcctggaagtgagattgctgggtcaaaagataatgcccctctatatgagttgtactattttgtattcccaccagtgatacgtaagagtgccccggctgggcgcggtggctcaggcatgtaatcccagaactttgggaggccgaggtgggtggatcatgaggtcaggtgttcgagaccagcctgaccaccatggtgaagcctctactaaagatacaaaaaattagctgggcttggtggtacgtgcctgtaatcccagctactcaggaggctgaggcaggagaatcgcttgaacctgggatgcagaggttgcagtgagccaagattgtgccactgcactccagcctgggcgacaagagtgaaactccttctcaaaaaaaaaaaaaaaaaaagtgtctatattcccacggcctgactaattatattgtcaggcattgaaacttgccaatctgatgggtgagaaactatatgtcagggtagttttaaattttatcttgcttatgagtgaagctgaacattttttcatatgtttaaggccattttatgtctcttttttttccccaaattgtctttgtgtctttcgcagcaggatctttggtcttttattctccctctcaatttttttttttttttaaacggagtttcactcttgtcacccaggctggagtgcaatggtgcgatctcggctcaccgtaacctctgtctcccgggttcaagcgattctcctgcctcagcctcccaagtagctgggattacaggcacatgctgccatgcccagctaatttttgtatttttagtagagatgggctttcnnnnnnnnnnnnnnnnnnnngtgctatatacatatatgccagtatacatacacacatgcacatttacgtacacatatacttcttttgaggaaatcatgagttcacattgatacctctaattcatcatcatgggcttttttcttgtctgcattaattcctcattcacatgtctctactcagtgagaaccctggctcccaacatcaatataattccactatcccctgccctcaaccccttgtacttaccaacttcattgttttctggtttaatctgtcccttaatcctttttgcaaagaaaagaggactgttttttactctaatttttttctttttcttttctcttttttttttttgagacagagcttcgctcttgtcactcaggctagagtgcagtgccacgatctcagcttactgcagtctccacctcctggattcaggtgattctcctgcctcagcctcccaagtagctgggattacaggcacatgctgccatgcccagctaatttttgtatttttagtagagatgggctttccttcgtgttggccaggctggtctcgaactcccaacctcaggtgatctgcctgcctcggcctccctctcaattttttaaagttgtttgcatactagggatttcagtgctttttttctgatatgtttacaaatattttcttaaagtatacttgcttttttactttccttatggtgtttttgccaaaaaaagttttttgttttctttttattaatgtagtcaagtttattaaccctttattgaatttgaatgatggttaaaaagcctcactcggccacacatggtggctcacgcctgtaatcccagcactttgggaggcygaggcaggcagatcacgaggtcaagagattgagaccatcatggccaacatggtgaaacgccatctctactgaaaatacaaaaattagctgggcatggtggcacacacctatagtcccaactacttgagaggctgaggcaggagaatcacttgaacctgggaggcagaagttgcagtgagccaagatcgcaccactacactccagccttccagcctgccagcctggcaacagaacgagagtccgcctcaaaaaaaaaaaagcctctctcttgtttcctgttatctcagtgaaaaattagataaaaagtctttctcttagattttaaaaaattttgaaataccttttgaaggacagttgggctctgtgtatcaaaaacctaaaaatgctcaataactgtacactcaacaattttagttctaggaaaatatatatcctgaggaacagatgtgaaatgtacatacaaaagaccgggcacaatggctcacgactgtaatcccagcactctgggaggctgaggcagacggatcacctgaggtcaggagttcgagaccagcctggccaacatggtgaaaccccgcctctaccgaaaatacaaaaattagctgggtgtgttggtgggcgtaattccagctacttgggaggctgaggcaggagagtcgcttgaacccgggaggcagaggttgcagtgagctgagatcgcgccactgcactacagcctgggcaacagagcaagactccgtctcaaaaaaaaaaaattagctgggcatggtggcatgcacctgtagtcccagatactagggaggctgaggtgggaggatcactgagtctgggagggagagtttgcaatcagccaagtttactatttggaaataaaatacataagacaatatgtctacatatgtgatttctttttttttcttgagacatagtctcgctctgttgcccatgctagagtgcagtggcatgatctcagctcactgccatctctgcctcctaggttcaagtgattctcatgccacagcctcccgagtagctaggactacaggtgtgcgtcaccaggcccagacaatttttgtatttttattggaggtggggtttcgccatcttgaccaggctggtcttgaacttctggcctcaagtggtccacctgtcttggcctcccaaagtgctgggattacaggcatgagccaccatgcctggcatacataatttcaaaaattaaaaataataatgctctaactataataaaagagataaatacaagagaagtaatctatggtaaaacaatgcaatttataataaagcaatatgtatttcaatatgtttagacataattacaatagaagacatgatttaagtactagatacttgaacccatatgttgaatcactgtgcatatacaaatgcagaatgattcaagcgtgtcatgttggtgactaagaaacaccacaagctagaataactaaacgttctgaacaaaacaaaatacattctcctctagacttatatacaattgcctgtctggaaatttcagtgcatattaaaattctcaaaaatactttgctttatatataacatggaattagcttctaggtcatatgagatttttcattcacttgaatgtctggtgggacatttgaaagttgcacaggacacacaaaaaagtcaatttttattagaatgtattgagcattgtaggatacctagaatccctgttttaggggcctgcagaatgccagtggggcactgrtcattgtggmaacaaaaaggtacctcctcagatttccaaatggctccctaggggggagttgagtacaattaggttatataatataattaatacaatggaatgttatttatccattagaaagaacaaggaaggtcaatgtgtattgtcatgaaaacatgtccgcaatttgttgtcaagtgaaaaaacatgtatgatattccactttttctttttcttttttttttttgagacggagtttcgctgttgtcacccaggctggagtgcagtggcgtgatctcggctcactgcaacctcyccctcctgcgttcaagtgattctcctgcctcagcctcytgagtagctgggattaggcgcccaccaccacatccagctaattttttatttttagtagaggtggggtttcaccatgttggccagtctggtcttaaacccctaacctctagtgagccacccggctcagcctcccaaagtgctgggattacaggtatgagccaccgtgcctggctattttttctttttattatttttggtagaagcagggtcttgcagtattgcccagggtggtcttgacttcctaagctgaagcgatcatcctgccttttcctcccaaagtgctggggttacaggcatgacccacagagcccagcctctacttttgttgaatatatgtactatattatatagaagaaaggttggaaaaatatttttcaaaatgctaattgtggatgacatactttacagttttattttagtctggaatgttaagaacttacttttacaaagtaattgcttttttttttctttttgagagagggtcttgctttcttacccaggctggagtgcagtggcatgctcaaggcttactgcagactcgatctcagctcaagtgatcctcctacttcaggcctccgtatagctgggaccaccaagcatgcaccactgcacctgcctaattttgtggggtttttttttgtagagacatggtttcaccatgttccccaggctggtctcgaactcctgagctcaagtgatccacccaccttggtctcccagagtgctggaattacgtgcatgagccaccgtggcccgtgcagtaattgcttcttgacataaggatttaaaaaatcactttgggcctgcaatcctagcactttgggaggctacgccaggtagattgcttgaatccaggagttcaagaccagcctgggcaacatgggaaaaccccccctctactaaaagtacaaaatttagctgggtgtagtgcacatacatgtaatcccagctacttgggaggctgaggcatgagaattgcttgaacgtgggaggcagaggtttcagtgagctgagatcaagccattgcactgcagcctgggtaaccagagtgagacactgtctcaaaaaaaaaaaaaaagaccacttttcaggagttcgagaccagcctggccaatatggtgaaaccctgtctctactaaaaatataaaaaattagccagtcgtggtggtgtgcacttgtagtcccagctactcgggaggctgagggagaagaatcgcctgaatccaggaggtggagcttgcagtgagctgagatcgcgccactgcacttcagcctgggcgacagagcaagactccgtctcaaaaaaaaaaaactactttgctcagtggctgatgccttttttaaaaataggatagttggaggaaagagagaagcaagcttatatctaacaggaagtgaggaagagggtaacttggtagaagttggcacctgtcacttaatatacaataatttttggctcagcgcagtggctcactcctgtaatcacagtactttgggaggctggggcagaaggatcacttgaggctggaagtttgagaccagcctgagcaacatagcaagatttgttcttctgcattaaaatttaaaatgggggaaatggagtagctgcgcagtttcatatattgaatttgaagctactgccaggagtacatttttttctttcatcattttcttctgtgtctttttttttttttttgagatggagtttcgctcttgtcacccaggctggagtgcaatggcacgatctcagcttactgcaacctctgcctcccgggttcaaacaattctcctgcctcagcctcctgagtagctgagattacaggtgcccaccaccacacctggctaatttttgtatttttagtggagatggggtttygccatgctggtcaggttagtcttgaactcctgagctcaagtgatcaacccgcctcagcctccsaaagtgctgggattataggtttgagccaccgtgcctactctctctatcttcttaaaaacaaataaagagaacagtgatcttcacttggaagagggaaaggtaccttgaagaacatttcttggactttagggaggcaaatactgttacagaatgtgagaaatcctgttccaggctgaacaaattaaattccttcatctaccttcaaagcttttcttctcttagattcttgtgattgatcatagagaacaattttgctaggttgccgtgactccagaggccgaatttggggcaaccagggacacatatatctgcatttttatgagttttgagagtttggattgtactccttgtcttcatagtttggagacataccactgtcattggagtagaagatctgctgtgttatgtacttaccatgggagaaagggaggaagcttcctgggtttcaattcccactcagagccaggtgtggtggctcatgcctataattccaccactttgggaagctgaggcaggaggacttcttaagaccagtgtgggcaacacagtgagaccctgtctctacaaaaattaaaaatttagccaggcgcagtggtgcaagtctgtccctcctcttgggaggctgaggtgggaggaacacctgagcctggggagattgaagccacagtgagccatgatctcaccactgcactccagcctgggcaacagtctaagaccctgtctcaagaagactctgtctcaagaagaccctgtctcaagaaaaaaaagaaaaatccgaacycaaatataaaatagtatattccaaaatatgtatttagaagagacatgtatttagaggctagctgagtgtgatggctcatacctgtaatcccaacactttaggaagctgaggcagctcaaattcctggaaccgtttgagcccaggaattcaagaccagcctaggcaacatagtgaaactcttgtctctacagaaaataaattttaaaaaagtacccgggtgtggtggcttgtgcctgtagtccctgctagttaggaggctgaggtgggaggctcatttgagcctgggaggttgaggctgcattgaggcatgatcgtgcaaccacacttcagcctaggtgacagagtgagaccctatctcaaaaaaaaaaggagttttctcttatttgccccaactttttattatgaaaagttttaaacttaaatagaaaagtcaaaagaacagtacaatgatgatgatgtgtttttttatttttttatttttttttggagacggagtctctctctgttgcccagactggagtgcagtggcgtgatctcggatcactgcaacctccgcctcccgggttcaagcagttcttctgcctcagcctcctgtgtagctgggactacagatgcataccgccatgcttggctaatttttttgttttttttttgagacagagtcttactctgtcgcccaggctggagtgcagcggcgcgatctcggctcactgcaacctgtgccttctgggttcaagtgattcctctgcctcagcctcctgagtagctgggattacaggtgtgcaccaccacacctggctaatttttgtgtttttagtagagatggggtttcaccatcttggccaggctggtcttgaactcctcacctcatgatccacccgcctcggccccccaaagtgctgggattacaggcatgagccaccgtgcccagccaatttttttgtagttttagtagagacagggtttcactgtgttgcccaggctggtctcaaactcctaagagcaggcaatctgcctgcctcagcctcccaaagtgctgggattacaggcgtgagccaccatgcccagctgattattattattattattattattattattattatttgaggcagggtctagctctgtcgcccaggctggagtgcagtggcacaatcttggctcacggcaacctttgccttccgggttcaagtgattctgtgcctcaacttcccaagtagctgggattataggctgcgcccccatccctggctgtttgtatttttagtagagacagggtttcgccaggttggcaaggctggtctcaaacttctggcctcaggtaatgcacccaccttggcctcccaaagtgctggaattacagggtaagctaatgtggccggcctacagtgattatttatatgcttgctacctagattcagcaattgttaacattttgtcagattttctttatattgtatgtgcaggtatgtgtccattttatgctcctggaaaaataagtttgggatattatgaaacttccagttaaaaatgtgtttgtgactgggcatggtagctcatacctgtaattccagagctttgagaggccaaggcaggaacattctttgaacctaaaagttcaagaccagcctgggcaacatggtgagacatcgtctctacaaaaaattaaccaggtgtggtggcatgtgcctgtagtcctaactacttgggaggctgaggcaggaggattgcttaagcccaggagtttcaggttacagtgagctattgtcaagccactgcactccagcctgggtggcagagcaagaccctgtctctaaaaatatataaataaatcaacaaacaaacatatgcttgtaaatttctctgcagggttcatatctacgtaaatgctgtgtgaaaaggaacaatgctgccctgaagttaaaaggatcataatttttgcttttttttatttgtaatgagctcatcttgtctccatgaacttttcagcttagctcactacttgtgtggtcatttggggattttcacctttttgcacttaagataacygtaaggtggtctgaaatgtgcatttgttttctgtttgttctagatgatccctctgataagccaccttgccgaggctgctcctcctacctcatggagccttatatcaagtgtgctgaatgtgggccacctccttttttcctctgcttgcaggtaactcactaatgctggcttctcctagcctagttttatgctattttttatgatgtaatatttcggagattactgtcaactgctaaggagatctatgtcttattaaatctattccttccaatttttctttttctttctttttttttttttttgagatggagtctcactcagtcgcccaggctggagtacagtggtgtcatctctgctaactgcaatctccacctcttaggttcaagcgattctcctgcctcagcctcctgagtagctgagattacaggcacacaccattatgcccagctgatttttgtatttttagtagagacggggtttcaccatgttggtcagggtggttttgaattcctaacctcatgatccatctgcctcagcctcccaaagttctgggattacaggcgtgagccaccgcacccggccccaatttttcattatacgttttaccagtgaaaagttgagaaacagagcagttagatgagacagactgttgattagtccacatctgtgtttaaacctaatacttggccgggcacagtggctcatgcctgtagtcctagcacttttggaggctgaggcaggtggatcccctgaggtcaagagttcaagaccagcccggtcaacatggttcaacatggtgaaatcccatctccacaaaaataaaaaaaaattakctgggcatgatggcgggtgcctgtaatcccagctacttgggaggctgaggcaggagaatcttttttttttttttgagacgaagtctcgctgtgtcaccaggctggagtgtagtggcacaatcttggctccctgcaacctctgcctcccgggttcaagtgattctcttgcctcgcagattgcactccagcctgggcgacagagcaagactctgtatcaaaaaacaaacaaaaccctaatagttaacactgttttttttgttgttgttgttttgttgagacgggagtttcgctattgttttccaggctggagtgcaatggtgtgatcttggctcaccgcaacctctgcctcccgggttcaagcgattctcctgcctcagcctcctgagtagctgggattacaggcatgcgccaccacacccggctaattttgtatttttagtatagacagggtttctccacgttggtcaggctggtcttgaactccagacctcaggtgatctgcctgcctcggtctcccaaagtgctgggattacagggcgtgagccaccgtgcccagctattttttcttttttttcttttccacgacagagtcttgctctatcacccaggctggagtgcagtggcgtgatctcggttcactgcaagctgtgcctctcrggttcaagggattctcctgcttcaagggattctcctrcttcaacctcccgagtagctgtggttacaggtgcatgccaccattcccagctaattttttatatttttggtagagatggggttttctcatgttggccatgctggtctcaaactcctgacctcaagtgatcctcctgcctcagcccccaaagtgctgggattacaggcgtgagctaccacgcccggccataacactgtttttttaagttaatttaaagtattgaaattacaggaaacataactggaagattattccttttgatgacactgtttattgtcttgttgaagactgatctctgtacagatgacaagggaagaaacaatttttgtgggtgataatggtaataataatactaattataagtacttgctctgtcccaggcaccactttgagtactttacatgaattaacccttaaatcatcactgtaatcctatgaagtacctatgattagtatccccattttatagatgaagaaatttaggctaagagaggttaagtaacttgttcagggtcacacagcaaataccatattttatcagatctaagacaccattgattataagaagcacctcaatttcagaaatgttaaaatgtaaaactggctgatgaaagttgtgatgtactttcgattataagatgaatcttgatttcagagagtttttttatttttttgagacagggtttcactgtgtcctctaggctggagtgcagtggcatgatcatggctcattgccacctctatcttccaggcttaagtgatccttctacctcagcttcccaagtatctgggactacatgcttgtgccaccatgtccagctaattttttttttttttttttttctgtggagaaagggtctcgccttgttgctcaggctggtctggaactcttgagctcaagcaatcctatcacctcagcctcccagaatgctaggattactccaggcctacttcagggactttttatttttctttaaaaaaaaataaagaattttttttagagatggggtcttgctctgctgttcagcctggagtgcagtggtataatcatagctcactgcagcctcgacctcctgggctcaatgatcctcctccctcagcctgccctgagtaactaggtctatgggcacaagccacaatgcccagcccagagtttaaaatatgaaacaatatttatcttagaatggctgaaatacggtttcagagccaggattcaaatttaggctatatgattgtgattccagggcatatgctctcctcaaagagttgtcttagaaaaaagtatttttttcagacttgttttttctccatgagggccactgaaaagctgtgatcatgattccaccattctattgcagctgcagacaagattaaatgaatccttaaaaaattgttgtccgggctcggtggctcacgcctgtaatcccagcactttgggaggccaagaaaggtgaatcacaagatcaggagttcgaggccagcctggccaaggtggtgaaatcccgtctctgctaaaaatacgaaaattagctgagtgttgtgccggctgcctgtaatcccagctactcgagaggctgaagcaggagaatcaacttgaacctgggaggcagaggttgcagtgagctgagatggcgccactctagcctgggtgaaagagcaagactccgtctcaraaaaaaaaaaaaaaaaaaaaaaaacttgtcaagaagtggtgtggtggcccacacctgtaatcttagcactttgggagactgaggtacaaggatcccttgagcctaggagttcaaggctgcagtgagctatgatggtgccactgcacttcggcctgggtgacagaacgagaccctgtctccaaaaataaaattttaaaaacccaaacttgtcagaagaataacacaaacctcctctgtcctttaagaaagtagcttttgctaatttaatttttctttctttgcagtgtttcactcgaggctttgagtacaagaaacatcaaagcgatcatacttatgaaataatggtaatgatgaagttgctgggaatttctgttcactttttttaagaattagactgggaagtagtttttcttttmcatttttctttaagctctcttggacttcagggaattagttttcttaatctctgagtatctttaccttttctccccttcggaartaggtaattgttatccaataagttttttagggttttgtggatctatcaaggtatttaagcacaaaaatagttttatatactcagatttttgtttgaaatttggaaattattcaaaggaaatacttttgayaygaggataacaggtatgctgctttttaaactcattgataaacatagccratgtgttgtcactgtgtgctcatggtatttttatgtggttcatgtggacagtggtgtttttgttgagcagttcattcccttgccttggggaaattagttaccttctgagagtcaggttataaagtgaacacagcaaatgaattaatacataaaatcactgaagaggcagactggtttataagcttgaataaaacttggctatagcttaattgtaatgccacayttaaagaaggaataagagtgttcgtagtgtccttccaagccctggccatgggagtgggtggtttaataagccaaagtgaatatccagtctgcttgacgggtatatatacctttgtcaagatagttttgttggccaggcacagtaactcacgcctgtaatcctagcacttccagaggccaggttgggcagatcacttgaggtcaggagttcaagaccagcctagccaatataaggtgaaaccctgtctctattaagaatacaaaaattagctgagtgtggtgatgtgcacctgtagtctcagctacttgggcgtctgaggcaggagaatcgcttgaacccaggaggcagaggttgcagtgagccaagatcgcaccactgcactccagcctgggcgacagagtgagactccatctcaaaaaaaaaaagacagttttgtcagttatcagaacatattaagcatataactaaatctcctacttcaagcagttttctgacatttggcccccatgcagttgttcttacaggaaaggatcctggcaggcttgacagttaaaatttcacatagtagattaatctatattttctatcgatgctgcaacaaattaccaaaaattagatatcttaagacaacacaaatttgtctcacagttctgtggatcagaagatcattaggctcagctggtttgctccaggttccataaggctgaaatgaagatgttggccagcctgggctctcacctggaggccctggggtagaatccacttctaggttctttcaggttgttggcagaattcactgccttaaggttttaggaaggatgccactgttttgatcagggcatgttctccgtttccacaggctgtctgcattccctggctctgggccccctttctccatcctcaaagccaggagcacaggaagtccttgaggttgttgatgaaatccagggaatctctatgacctctcctattgccttatctttcctgtgctgaatctttatgagtgattcttctgctttcctcttctactttgagacagggtctcactctatcacccaggctaaagagcagtggcacaatcacagctcactgtaacctcgacctcccaggcttaagctatcctatctcagccacctgactagctgggactataggcacaagccaccatgcctggctaatttaaaaattttttttgtaggccaggcttggtggctcatgcctgtaatcccagcactttgggaggccgaggcgggtggatcacaaggtcaggagatcgagaccatcctggctaacatggtgaaaccccatctctactaaaaacacaaaaaattagccaggtgtggtggtgggcgcctgtagtcccagctactcgggaggttgaggcgggagaatgatgtgaacccgggaggcagagcttgtattgagccaagattgtgccactgcactccagcctgggcaacagagtgagactccgtctcaaaaaaaaaaaaaaaagaaaaagaaaaattttgtagacaggggtctaggggcctttctatgttattcaggcgtctaggggtctttctgtgttattcaggctggtctcaaactcctgggctcaagtgatcctcccacctcaaccctcaacctcctaaagtgctgggattacaggtgtgagccaccacagcaggcacctcaactatgtataaggactcaygtggattacattgggcctatcagggtaatccaggatagtctctctactttaaggtcagctgattagtaacctttattccatctgtaaagtcctttcccagcagtacctcgctagtgtttgatggactagtcagaagacaggaatcttaggatgaggggaacatctttatttttattttatttatttattgaaaaaaaaaatagagacagggtttctccatgttgcccaggcaggtctcgaactcaggggttcaagttatccttccacctaggcctcccaaagtgctggaattatagacatgagccaccatgcccagccagagaacatctttagaattgggcctcctacagcactgcagtatatttacttcagtctcttaaaagtttagaaagggtgaatcagcatctctgagcctgactattggtggagtcctattaaaatgagtttctgggcttataatattcagggtcagattctaggccacaatgaattaatcaaagaaccagttagagttcttgggagccaactaactagccttcctctcccatctctaaacaatttcagtcttttaatggcttcagtaattgtaagacttggaataaawtttttccccctttaaatgcaaaaatgaagggttaggagactgttcaaagtagctktggatttgagttaatttcaccaaggttatcaggtcttcagaaagctggtttatttttcccaaattaatgcgagaatacctagagccagaatacaaatttattcattcacattgtgaaataactccttaagggataattcagtatagcttgggtaggttggtagtcatgcttattcactgtaggaaagctgaccatgagctttctttagctattctggcatcatgtcttcttcataatgctgaaagcactgactaagtttcactccacatcacttcattctgattacatcatccttttctcacgtattcaacacccatacaatcacatttcagagtactgtcctttactttggggagcttttgggggttactaatacttcctttttgtggcccatcttatttattcccagtgaatctttccttctataggcatgatgaccaaattttagctttctacacaaaacttgatttttttgcctcagataactttaaatggttttcagtacttttgtcatgtcacagagctgtatttttgggagttactcatgctgtggtaggtggtgtgttaaccaggatttctgaattctatgcctatttttgtcttgtaattcttagaactttgaacaagtcaaggcagctctttctgccacacccttttataccagtgattcttaaacttcagtacataagaactgcctgggagcttcttataaatgtagatttctagactcttctgtgagagattgtggttcagaagtgctgaggtttggtccaggagttgaataatattaattcaactttttgtaaaactgccttgtgccttctttggtgtgtctgtgatgtagaaagtttttattgtttatctcacagtaaagttggttgagaaacaattaatattctaaaatacagttttacaaatgacagtctcttcaactaatgtgtgtgttgtcatatttacatgtcttttggtacttgctgaattgagagtgattatgaatttagwatagatatagactctgaaatttctctgttggatttcataatacctcatgtgctagatatattcgtagtacgtgctcagatgaaaatgtgttgcttattggtagtgtaatctcacaaatcatgacyttttttttgtcattaacaaaaggtataacaagttctaagtgcctgtgtaatctgaagacctcctgtgtggtcttcagattattttttttttacttgttattatagaaaagttcagatatacacaagagagaatgatgtttggttatctattgctatgtaacagctacctcaaaacctcwtgcttaaaaatgaccattttattatctcccacagttttgtgggtcaggcattcagattaggcacagtgagggtggctcttggctccacatgatgtacttaggctgaaagtcccaagagggttatgaatttagtataggcatagactccaaaatttctctcttggatctcataatacmtcatgtgctaggcatattcatagtacgtgctcagatgaaaatgtggttgtcattgtaaccaactactacataatggtaataaatttccgtttacccatcactaactcttaaaattattgactcgtggccaatcttactttatctaaaccatcaccttttcttttatcttttcttttttttttttttgagacagagtcttgccctgtcgcccaggctggagtccagtgggttgatttcggctcactgcaacctccgactcctgggtccaagcgattctcccgcctcagcctcctgagtagctcagattacaggcacacaccaccgtgccyggctaatttttgtagagacagggtttcaccatgttgtccaggctggtcttgaactcctgacctcaggtgatctgcccacctcggccacccaaagtgctgggatgacaagcgtgagctactgcacccagcctaaaccatcacctttctagattattttgaagcaagtatcctagacagtatatcatttcatctttcagtatttcattaggtctctacgtaattctagtcacttttcacattccccgtcatttcataaaggcttaatatctaaaaccctgctgccttttttacccttgaaacaatcactgttctgatttttttttttatcagcgtagattggttttgcrtattctagaactgcatatatatggaatcatactgtatgtacacttctgttgtttctggtttctttcactcagcttttttatttatttatttatttwttttttgtgacagtcttgctctattgcccaggctggagtgcaattgcacaatctcggctcactgcaacctccgcctcccgggttcaagcagttctcctgcctcagcctcccaggtagctgggattattataggcgtccaccaccgcgcctggctaattttgtatttttagtagagacggggtttcaccatgttggccagattggtctcgaacccctgacctcaggtgatccacctgccttggcctcccagagtgctgggattacaggtgtgagccaccgcgcctggactcactcagcatgcttttgagttttattcatgttgtgtatgttactggtacatttgctactaatcatttcttttaattactgagtaatattctgttgtacgaacataatacagttttttatccattctccctttgatggacacctgggccttgcccacgtttaggctattgtgaataaagctgcaatgagtattyttatataaagctttytatgtacatatgttttcactgttttttggataaatacctaggagtgaaattgctgggtcatagagtaaatgattgtttaacttttaaataaacgattggcaagttttccaaagcatttatatcattttacacctctgtcgacaatatatgagagttytgattgcttcatgtgcttgccaacatttggcattgtcagtttcattcattttagctattttagtcagtgcagtgtggtattgtggtattacaawtttttttttttttttttttttttttttactttttgcagtttgtttaattcagatacaaataagattcacacatttcaattttccaattggttgccttttatgtattttctattctgtatgggttttccttccctttctctcatttcttttttttggtcttattttagaataattattttttaaattttcttcttaaaaatatagggaaatagaaatagagttttgccatgttgtccagggtggtcttaaactcctggactsaagggatcctcccaccttggcctcccagagtgctaggattacaggtgtgagccaccgtgcccagccatttttgggtttactgaagttgcaaatgtagtatagagagttcccatctatccttcatcctgcttccccaaatgttaacatcttacattatagtacatttgtcaaaattgagaaatgaacattggccgggtgcggtggctccttcctgtaatcccagcactttgagaggctgcggtaggagaattgtttgagtccaggagtttgagaccagcctgggcaatctagaaagaccccattgctgcagaaaaatttaaaaattaggtgggtgtggttgcacatgcttatattcttagctacttgtatggtggaggcaggaggattgcttgagttcgggagtttgaagctacagtgagccatgatcacaccagtgcactccagcctggtcaacccacaagaccccgtctcaaagagaaaaaagggctgagctcggttcctcatgcctgtaatcccagcattttgggaggccgaggtgggcggattacttgaggtcgggagttcaagaccagcctggccaacatggtgaaaccctatctctactaaaaatacaaaaaattagccaggtacagttgtgtgtgcctgtaattccagatgttctggaggctgaggcaggagagtcgcttgaacccaggaggtggaggttgtggtgagccgagatcatgccactgcactccagcctgggctatggagcaagacttggtctcaaaaaaaaaaaaagtggggggcaaaagaaatgaacattactacaatactagtaactatagattttattcagatttctccagattttccacaaatgtccttttctgttgcaggatccaattggggatcccacattgcatttagtcataatgttttctccaatctatgacagtttcttagattttccttgttcatgaccttgacaggtcgaagtgtattttgtacagtgtctctcaattttgtcttcataggtttgatattttatcatgattagatttggattatagatgtttaggtggaagatcacagaggtgaattgccttctcattttatcatatcagacgatacataatttaacactggtgatgttgaaaaatgagcagccagccacaagagatgcatgaggcagggtgtatgtgggaaggggtacggagctttcctgtcctctctgggtacaccgccctctacctccatgtgttcagcagcccggaagctcctcgctctcatttcttattattcgtttgatttttaaaagctggattgtttgtcttacagatgttagtacagtctggattctgttgactaatgtgttcctctctcttctgtgtttcctataaattagtagttacatttaatgactacttcagattcatttaggaccattgtctggatctgctaattcaccaaggattgcaaaacattaatcttttaattctatcactcattttaatttatgagttagaaatttcttattattgtgtggtcccttggagtaacgtttatacaggaaaggaaacagaaaagatgattacttccctttatttactagttttgagaatatgcattggttccctagcatcctctacatatttaaaatatttgatgtttcagtcctttgtggttattatacttattgatgctcaaaatattccatttttagttaacaggagtctctggaagttgacttctgaatttttttgacatgacctttatagtctttaagagcttctttgctgccaggcacggtggctcatgcctataatcccagcactttgggaggcccaggcgggcagatcacctgaggtcgggagttcgagaccagcctgaccaacatggagaaaccccgtctctactaaaaatacaaaattagccaggtgtggtggcacatgcttgtaatcccagctactcattgctactgggttggtcatttttcctggaccttttcaatgaacgatgttaggaaattatttttcttgtaagatacaacacatgagttcataataaaactttcaatttaaatacgagactacaagagttttgtttgtttgttttctgtttgtttgtttgtttgtttttgaaacggagtctctctctgtcccgcaggctggagtgcagtggcgccatctcggctcaccgcaagctccacctcccgggttcacgccattctcctgcctcagcctcccgagcagctgggactacaggcacctgccaccacacccggctaattttttgtatttttagtagagacggggtttcaccgtgttagccaagatggtctcgatctcctgacctcgtgatctgcccgccttggcctctcaaagtgctgggattacaggcatgagccactgtgcccggcctgtttttggtttttatgagacagagtctcttgcccaggcgggagagcagtggtgcaatctcaactcactgcagactctacctcccgggttcaagcgatcctcctgccttagcctgccaagtagctggaaccacaggtgcgcgccaccatgcccagctaatttttgtagtttttgtagagacagggttttgccatcttgcccaggctggtctcaaactcctgagctcaagcaatccacccacccaggtctcccaaagtgctgggactacaggtgcatgccaacactcccagctaatttttgtagtttttgtagagatggggtttcactatgttgcccaggctggtctcaaaactcctgagcccaaaaagtccacccacccaggcctcccaaaattctgggattgcaggcatgagccaccatgcctggccaactacgaggtttttacataacctcacagatcttacagctatatcttttttttttcccaagccaaaaattatacttcccaatgacactaaccaacgtaattatttatttgctttacctcataacatatacacatacactaatctcaaaataactgtcaatactaaagaaacattttaagatttggcaatttcttttgtttttaaggtatatcctacttagagatatttagtcaaattaagtgtttcaaaatcacttgaaatagttcctttctgtgtgattatgccttcaaattgatttctgagttcgttatattttgcattttattcttaagattttgaagtttatttttatttttattttttgagacggagtcttgcttgttgcccacgctggggttcagtgctatgatctyggctcactgcagcctccaccttccagttcaagcgattctcctgcctcagcctcccragtagctgggactacaggtgcgtgccaccatgtccggctaatttttgtatttttagtagagacgaggtttcatcatgttggccagccttgtcttgaactcctgacctcaagagatccacctgccttggcctcccaaagtgttgggattacaggcgtgagccactgaggccagcctaaagtttaatattatactctttatgtttcaaagttaaatctacaagcaaggaatattcagagacatctagcttctggatagatgtctctaccctgttctctttcttcctccccatagtaacctttttttttttaaagtgtgttttattcttccatttaaaaaaatacatacatatttgtcttttcctctttcttagctaaatgggagcgtactgaaatatttatctctacctctgtgttaagtttaaaaatatatgtatatctgcatgaattgcttggcatttataggtgatatggaggcccttctagctaatggtggaaacgggtgggagaggtggacaactaataagaatgtaccctgggtatctctcatcattcggctgtaaactattactacagttgaagttcctagattccatttatttttaattttttttttttttttgaaacggagtcttgctctgtcgcccaggctggagtgcagtggcgcgatctcagctcactgcaagctccgcctccgccttctgggttcatgccatcctcttgcctcagcctcccaagtagctgggactacaggcgctcaccaccaggcccggctaattttttatatttttagtagagacggggtttcactgtgttagccaggatggtctcgatctcctgacctcgtgatccgccctcctcgacctcccaaagtgctgggattacaggcgtgagccactgtgcccggcctatttttgatttttgagacagagtcttgttgtgacgcycaggctgaagtgtggtggtgtgatctcagctcactgcaacctctgcttccgcagttcaagtgattctcctgcctcagcctcctgagtagctgggactacaggcgtgtgccaccatgcccagctcatttttgtgtttttagtagagatggagtttcaccatattggccaggctggtctcgaactcctgacctcaggtgatccgcccgcctccgccttccaaagtgctgggagtataggcgtgagccaccgtgcctggcccctagattccatttgtatctctgttcttaagcaaaacttttttctccttagacttcagattttcctgtccttgatcccagctggactgctcaagaagaaatggcccttttagaagctgtgatggactgtggctttggaaattggtaagagcttggtgttaagagttgtcctgccctagtggactcagagaagaagctgttgttgaagagtaaaggaaggaacctcaggaagagaaagtatgtgttgctttcctatcaacccatgatttagaggcaagttagtcccctctgtacattatttttccagtgtcgaaatgtgtcacgaggatatgggatgtttagcggtccatgactgagcagctttaaaaggccactttggatgtatcaacagtgggaagattgattattattcctttctgaatagtagggaagtttagtttcgttagttattactcccttctgattttatgaatttttgttagttgtagatgccctagtcatttaagtgaatcagactttagctagatggtcatacgtaagattcaagtttcacagacttcctgatagcattctctgyttttagctttcaaacacctacctgccttagtccaaaaccggcggaattgaatagcacttattgctgttgacctagggggcagcaccacttaatactaccactttcgtttttatcttttgggaacactttcatatggatgcttttattttatgaactagatagcagaggcattattgaatatattttgttcacaaattatctgaagcctagggggttgaaatgatttcttgtgattacatagcttattactgaaggactcttaattaggtcctccctgtcctgacttactagtgtatataacctttcttggtgttcatcagaataaactctgctgcctgcctcccttatgtccagggacctgaagaaggagacctgaatttagttcacattttgcttgtattcattcattcagtatttattaagcatcataaaatactgtgtacaatgagaaataccaaaggaggtagaaaagtaatcacttgtgaggagtttgctagtcatctttggcctagtttttcattttttgcttaccattctctctaaaatagtctaaacctctctgtcctccttccctcttaacaaagaacataaaaaagacatagcttctctatccgctgtgggtaaggcactaagtttggcagtgagtgggctagagctaagaattatgagatgcatcctgtcttcagaaagcttatagtttagcaggggacttaaaaatacaagtgattgaagtacacaaaacagcacagtgatgccttaggggaggtcaagtgaaatgctgtgaaaaagagaccttgaggaaaggacttccacctgtacctctccattaccttggctcaagtcagggatttttttttattgagacagtctcactttatcacccaggctgaaatgcagtggtgtgatcacagtcactataaccccgaactcctgggctcaagggatcttccctcctcagactcccaagtagttggaacaacaggtgtgcgccaccatactcagctaatttttaaattttattattattattattatttggaaacaggatcttgctctgtcgcccagggtggagtacaggggcatgagcttgactcatttcagcttcaaccttccaggctcaagtgatcctcccagctcaggctcccgagtagctgggactaccggcgtgtgcaaccacccctggctaatctttgtattttttgttgagataggattttactgtgttgcccaggctggtctcgaactcctgagttcaagccatcctcccaccttggcctcccaaagtgctggaataacagatgtgccccaccatgcctggccagattcttaagcaagtttcttaattattttgggcctcatttttccttctttgaaattgagatagtaacaatatccataccacaaatttgatactaggtttaacttaaattctgttgtgaatgtttctagctcagtgtctggcatctcatagcagctctagtaaagaaatgtttatgttaagtgtttggtaaaccgtaaaatattakgcaaaataaaactatatttctgtatattttgaatgttctgaagtcacttcttattatttacagcaattatttctgtagggcctagctcacaggaaaatttacaaattttccagtcatctttatttatttatttatttatttatttatttattattattttttttttttgagatggagtttcgctcttgttgcccagactggagtgcaatggcgtgatctctgctcactgcaacctttgcctcctgggttcaagcaattctcctgcctcagcctcccaagtagctgggattacaggcatgcatgcaccaccacgcctggctaattttgtatttttagtagagacagggtttctccatgttgatcaggctggtctctaactcccaacctcaggtgatccacctacctcccaaagtgctgggattacaggtgtgagccactgcgcctggcctcagtcatctttctttaagtggaaaagaaaggactttttagtcattatttctgtgttttagactagcaagatatggaacaccagattacaccaatctaggcttatatttatgtcatttttctgctgatatctttttgatatcaatttggaaatatgagagtatattatatggatgtgacttaaaatatgaaaagagcaaatgatgcttttagtattatgtgtaaatacaagtaccacttctctctttttcccacaatcctctaggcaggatgtagccaatcaaatgtgcaccaagaccaaggaggagtgtgagaagcactatrtgaagcatttcatcaataaccctctgtttgcatctaccctgctgaacctgaaacaagcagaggaagcaaaaactgctgacacagccattycatttcactgtaagtgcctccctatcttgataagatatacttagctcatccttgggccctgtttcagtagcagataaagagtgatttgatgacttggacagctaatgatatcacggaagataggaggagttagtatggcagctattgagagtcaggatcgacccrgcatggtggcttgtgcctgtaatcccagcaccttgggaggctgaggcgggtaaatcacttgaggccaggagttcaagaccagcctggccaacatggcgaaaccctgtctcaactaaaagtataaagattagctggacgtggtggcagacacctgtaatcccagctactggggaggccaaggcaggagaatcacttgaaccgggtaggcggagattgcagtgagccaagatcacatcactgcactccaacctgggtgacagagtgagacttcatctcttaaaaaaaaaaaaaaaagagtcaggattataatgtggcaaagaaggaacatactctaagggtcagagttctatacaggacatcaaggtgcttgaagccaatgtgtagttccacctaccttgagtcctttgaacatatcagttaacttagtgctttcctttgtaaaataagatgtcaaaaagggaaaaccttttctatgctattatgagtgcaagttttttttcaatccctttggagagcttatgattatacatatgagttgcttagagaatacagtatttgactcattattattaattgccttggtgtcaagcccaagaatcagtttgttatttttgttcgcttggttgtgtcagtgatggcgaactttttaatctcatgtgcgtgtgggaccagtgggtctcttaataaaatataaccaaaaacatgatgaattataaatgaccatctttcctgaatgactctcagggtacaagtaatgagatatgaatgttttcacttcccttttctctttcctcatactctctagaaacagttttatagctgactaacttaaaggctggtaatacctcctttttttttttttttggagacagagtctcgctgtgtctcccaggctggagtgcagtggcacaacctcggcttactgcaacctccacctccagggttcaaacgattctcgtgcctcagcctcctgagtagctggtaccacaggtgcatgccaccacacctggctaattttttgtatttttagtagagaaaaggttttgctgtgttggcgaggctggtctcgaactcctgaccttatgatctgcccgcctcggcctcccaaagtgttgggattacaggtgtgagccaccgtgcctggttgatacctcctatttggatagcactttggtgttagcactttgttctcaaatccattagaccatttgtttcctaacagcaacccagtgagataggcagagcaagtgcttttgttttacattcgagaagaccgatgcagacaggttagtttgtgcagggtcatgggactagtgtgtgttggagctaggacttaatttcagctaacttccaattccagtgtttgtttttttcccgtcttttttttttttttttttttttgcctctcagttggatgagttttgtaaattgaagttcatcctaagggataagggagccgaagccaacggtaaatatttaggttctgtaatattaaaggaaaaaagtcatgatttcctttcattttaggaaagcagaaatcagaagaaatttccccatatttacttaaaggattgcctgagtcttggtttttctttttaaaaaacctgttttcataatactttatctttttcacatttccttttataaaaaccattttaaattttatttattcttggactattatgtcatttttttcatgccaatattgtattagttaactcagaaaccttctaaattcttccagctacagatgaccctccccgacctacctttgactccttgctttctcgggacatggccgggtacatgccagctcgagcagatttcattgaggtaggataaatgtgtttttagcacaaagtaggaaaaattcatttttgtttctcatgagccttctgtctcacccatagattccataccactaaaaggagatttttcaaggcactataatttgtaggacctttaggcagccacattttcttaggtttgagtgccttttctcatttgtaaacattttcacatatggaacagtaaaaattctttaaacaaacaacctatttctggccaggctcagtggcttacacctgtaatcccagcactttgggagctgagaatggaggatcgcttgagtccaggtgttcgagactagcctgggcaacgtagtgagaccctgtctctacaaaaaataaaaaattagctgggtgtggtggtgcatgcctgtagtcccaactacttggcaggctgatatgggaggatcacttgagcctgggaggttaaggctgtagcgagtggtgatcattccactaaactgcaccctagacaacagagtaagaccctgtctccaaaaaacaaaaaaaccccagcaaacccacctcttaagttgcatcagtgctggcttccacttccttaggtatgaaattcctatagtctggttctttttttttttttttgagacagagtttttgctcttgttgcccaggctggagtgcaatggcatggtcttggcccattgcaacctccacttcctgggttcaagcgattctcctgtctcagcctcccaagtagctgagactacaggttcctgccaccatgcctggctaatttttgtatttttagtagagatagggtttcaccatgttggccaggctggtctcaaactcctgacctcaggcaatccaccagcctcggcctcccaaagtgctaggattacaggcgtgagccactgcacctggcttgtagtctggttcttattgtacatctaggggctttcaagattgtactgtatcaggggttgacaaacttattctattaaaggccagatagtaaatattttaggtttagtatgctataaagtttctattgtaactatactttgtcattattgtgctaaagcagcatgggataatataagaataaatgaatacgcctgtgttccagtaaaactttatgtacaaaaacagacagtaggctgaatagtagtttactgattcctgtactatatccacaagtatataaagaatgatgratgtgtataaaaactatatgttccttgctcagctatggaattaaaagacatgtgaatgtagccacaagtctcttgatttatcatctaattcacaacttgaaagatagtttggccaaatgsggtagcttacacctgtaaatcccagcactttgggaggctgaggcaggcrgattgcttgagctcaggagtttgagaccagcctgggcaacatggcaaaacgctgtttcttcaacaacaacaamaaaaaaaacccgaaaccaaaaattaacttgagtgtgatggcacatgcctgtagacccagctgcttgagaggctgaggcaagaggatcacttgagcctgggggttcgaggctgcagtgagccaagatcacaccactgcactccagcctgagtgacagagtaagaccctgtttccaaaaaaaaaaaaaaaaaagaatgaattgactttatttatttatttcagagacaggctcttgctctgtttcccaggcagtcttgaactcctggtctcaagtgatttttccacctaaatctcctgagtagctgggattataggtgcatgctactgtgcccagctcagactaattttagtttttagagcagtatgtttagcttcattcctaaactcataactattccaattttttgttgtcactactgcttgtaagcctcttagatttttcccatgacttcctattacctgtgccagtattgtggccttttgccatatttagactttttaaacaactgtttgcttgtgttttttctgtttacttctaaagcatggctgctgtaaagacactaatcaaagccgatgggtttggggtggggatttttttgttcccctaaacaggaatttgacaattatgcagaatgggacttgagagacattgattttgttgaagatgactcggacattttacatggtaacagtttattttgtcaaatgtttatcgagcgccaactgtgtgatgacrctgtcttgggtgctaggaattgaaggatgaatagaacatgtcccctgcccttatagaattcagaaatctagtggttaagttgctgaacttactgtgttgttggattttgaccacagtgaataagacttgtgatgagggtaaaaatattgattatataatagtagtaggaaatatctgttggactgtgtgattttacttttatctgaggtaaatctacactaaggtaattggttaaatggccctcacttgcattcttagaaggaagggaatcagtttgaattcttgggacttcactagcaactgctatcactaaatgttcactatattttgttacccggaatttcccctagcaaggaaaaagaatggaaattcctcaagagtttttaggcccaaatggggaatttcttgtttctcaggactgttgaattttcaacactgctggattcttttttatgtttgtttttgagacrgagtctcactctgttacacaggctggagtgcagtggcgcgatcttggctcactgcaacctctgtctcccaggttcaagggattctcctgcctcagcctcccaagtagctgggattacaggtgtttgccaccatgcccagctaatttttgtttttttattagagatggggtttcgccatgttggccaggctggtctgcaactcctaacctcaagtgatctgcccgcctcagcttcccaaagtgctgggattacaggcgtgaaccaccacgcctgccccagcattgctgaattctaatctttgattagccctctaagggtttatgttaactcttttcctaaaacttatgtggtgaatgccaaagagctgttaagagtagatagttagactttgagtcccttttttccttctttccattttcagtgaactacatactaatatatactaatactacataataatacccaatactttttttttaattttagttcagaattgaatatgatacagtagatcagtaattctctattggaatctgtatttcccaaagagcatcttcatgatttctgttaaatttacatcccaggcaggaaagacaagtagagtatacttgttaaattataaatcaagttttcatattgcatggactggtacactgtccctagaaggggaacttgattcttttctctccatagaagagctgcctggatatttgttataccagatctaagataaagaaatagtcttcctaaaaattttaccttaagaaatttttctctacacatttcttgagcggtgggtttttttttggggggttttttttttttttttggcaacattttattcctccttttctcccacacaactttaaggaaagtcaaagtgacgcagattgaactaaaagaggaaagcttgaaagcaaactactttagcattaactaaatccattgtatttgttcagtcttccgtgtcagtctcgtcaatcccagtgactcatgttatcttttctcacctcttgtggtgttccytttgaaggtagtatgcagactgccattcatagacaccagctttaattgaaatggtattgttttctggcttgtatctttcttatagaatgccagactactctgcacaaaaggggcagcttcataaatatcattcttttagattctgctcaaaaataccaaatttttggctgggcatggtgggtcacacctataatcctagcactttgggaggccgaggctggctgatcacttgaggccgagagttcaagaccagcctgggcaacacagtgagaccctgtctctaaaaaaaaaaacctttaaaacaaatttttaaaatattattattgtttttcctcctcctcctccctgctttttatttttacctatatatttattttttacagaattttaaagtcaacatctataatgttaataatggcttgacttggtgaatcacttctctagagcctaatccaaggtcttcattcatacttctcaacattattaagaaaactatagtaatggtcggtgtttaatttcattcttcattcttcatgggagtaggacttgcagttccttctggttcacttggggtcctttttgtaattaagtggggataaaaagaaacagaagcaactgattgatcagcaatttatagttcagttagcttttcaaacccataacatactttaggtatttgtactctccctgaagtttctatagccctgtaaattattgattttcatttgagctataactggaacttatgttattaatctttatacatagttagctttaacacaacataaataataattctttccctctgccccatagtaaactgtaagatgtttagatgagtgcttttattttttattttttttgtgacagactctcaccttgttagccaggcgggagcgcagtagcgtgatcttggctcactgcaacttctgcctcccaggctcaagcgattctcgtgcctcagcctctggcatagctgggattagcgccaccatgcccagctaatttttatatttttagtagagasagggttttgccatgtttgcaaggctggtctcaaactcttggcctcaactgatctgcccacctctgcctcccaaagtgctgggattacaggggttagccaccgcgtccggccctaaatgaatgcttttaaaaagatgataacacttcagatttgggtatggttggctcacacctgtaatcctaacactttgggaggccaaagtgggaggatttcttgagcccaggaattcaaggtcagcctagacaacaaagtgagaccccccacctctaaaaaataaaaaagatgataacagtttaaagaagcttgtcagcactacagaccaaaggaatgacttgctcatgccacagagaggtattttgtttacagctctgagtctttacagcagctcctgtggcagcatgaccatgtccaggagcatattgtccctgagctgtcactcgcagaacactcagtgaagtgcactaggagcccatggaaagtcaggaaggaatgaaaaggggctttataagcacacctggaacagttagaggggcacagattttgtagaaatcaggacactgattcagcctctggcttgcttctgagtcatggtataatcatgagtaagtgcttggaatcttgcttgctgtttctttatgtcctctgccattaaagaagaggtgacactgattagtcagagtgtaaatgtctctaatgaaacatggtacataattcagatttgtgttgttaccattccattataccattatgctcttaatattactgagcattaacaacattatttttatggttcctcatttagaactactggaaggttgcagactgtttggctgggttttgtatttagaacctatccagaatattggctgatgccaccaagaccttttcctcacccacacaaagatttttgccttgaatcatggaatttgtttaataaatttggtttgcatggttcattatagagacctgggacacaatggagggataattgtrttgcagccataccagaaggctttcagaatgtatttcaaatgtatactgcaagtgaagcagtatccaaggaaaaataaggaagttccgtgatccctaattggtacttactcatattttatkgaaataagcagaaatgtttggttcagaaagagagakagagaagactcatatcttagaactgtcttgtctcatgtatgttgtgagatctcaatgcacatgcttagtgtagttccttcttgctgccatctctttccccatctcctttcatttgtaaaaattcttcctaaatttttagagtactctttccctgagtttctcaggatcctaaagtcctggttgtaatgtcttccaagtcattgttgccccataacccaggcaagcaagagatatgatgagctcctcctatgtgttgggtctgtgtttccagtacttctcagggttgcaccttagtacagttcacaatttcttctccctctgttctggaaaggtaattttagaaagttttctctcctaggcttggatctgtggaccccttcacctttcactgtatttttcaaattgtatttctttggcacatattattagcctttaaatcctttaacaattagtagagcagaggtccagcctggtctctgtatattcacctactggcagttcctttcacttatagtgatttcactgtttttttttttattttttttgagacggagtctcgctctatcrcctaggctggagtgcagtggcgcgatcttggctcgctgcaagctccgcctccygggttcacgccattctcctgcctcagcctcccgagtagctgggactacaggcacccgccaccatgcctggctaattttttgtattttttagtagagacggggtttcaccatgttagccaggatagtctcgatctcctgacctcatggtccacccgcctcagcctcccaaagtgctgggattacaggcgtgagccaccgtgcccggcctgatttcactgttttatacataggatattttagacatgaatactatcagtaataattgctaatacatatagcatttactattagttaccattctaagctcttcatatatattaagtcatttaatcctcaaaaccttatgagttgcatattattattatcctcatttttgtggatgaggacattgaagcatagaaaggttagataacttgcctgagatcatacagccagcaagaggtagagtcatccccaagtctgtgttcttaatactgtacaatacttagctgtctttacaatcttgatttttttttttttttttgagacagggtcacgccctgttgcccatgctggagtgcagtggcacaatcatggctcactgcagcctcaacctcctgggctcaaactatcctcccacctcagctrcctgagtagctgggactccaggcgtgcaccatcacacctggctaatttttaaaatttttttgtagagacagggtctcactatgttgctcaggctcaaccttgaatgtttgttgctgtttcatttttgtgaggtttcacatttgttatcttctatagcttcaacacattcctgaggaatagatattttcctgttttacattcagggaagcagacaaagaagttaagtaatttgcctaatccaggggtgtcaatcttttggcttccctggcccacactggaagaagaagtgtcctgggccacacataaaatacattaacgatagctgatgagctaaggaataaaaaacaaacaaactcataatgtcttaaaaaagtttacgratttgtattgcgctgcattcaaagccgtcctgggctgcatgtgactcacgagcgacaggttggataagcttggcctaatgcttcctggttgcttactttagccattagatcacatgatcttccctgcacaaaattgtttgtgtgcatcttggccaaaagcttggggggaaatgacttaaatagtgttgcttctggggaatacctgtgtcacaggtttctacttgtttggtcgcagtagggattttgattggcctccctgcagttaaggcctctgagttggttttcttgccaagcaagcagtaagtgccttctgtcaagaaaacagaaacatgttgttagctattttgaacaatgttagaaatacattgcagtgggaaggagctgcctctgacttctgcccacttcttgaaatattttaaggctagccgtttggaaactttatcattctccagtgtaatcacagggagactgtgcttcccccaaagctgagatttcaggggccttgtagcaatggacaaattacaggtgattttggtttgtttgtttatttttaatgatctctggttctctgtttgctagcttatactgcagcttccagctgctttaagtagactgtgagcaagtgattctcattcttgtagattctgccttctcatttctgttctgcctgctgtgctgttgtcctccctaggttattcatacagttaagatattgtattcagttgctgctgagtgtgctcagagatagcttcaaatatgaatttttatctgggagaattccagttctcctcccatttgctcctatgtgtttcttttcttccttttgttctccagagccagttgtacaagtttaaactactgaagtgatcaaactgtagtaccaattatcagcagtatttattcagaggcttttttttttaaaagaaacagagtctcattctgttgcccaggatggaatgcagtggtacaatctttagctcactgtagccttgaattcctgggctcaaatgatccttccgccttagcctcacaagtagctaggacaacaggcacacgccaccacacttggctaatttataaaaaaaatttttgtagagacagaatctcaatgtgttacccaggctggtctcaaaactcctggcctcaagcgatcctcccacctcagcctcccaaagtctgggattacaggtttttttgttttttggctttttttttttttttgagacgccytctgtagcccaggttggagtgcagtggtgcaatcttagctcaccacagcctctgcctcccaggctatagcaatcctcccacctcagcctcccaagtagctgggactacaggcacataccaccatgtctggctatatttttggtacatttttgtagagacagggtttcactatgttgcccaggctggtctcgaactcctaagctcaacccatctgcccacctcagtttctcaaagtgctgggattacaggtgtgagccaccatgcctggccttttttaaaaattaaatcactcctacacaaatctcaggaaacaacatggcatcttgtatcttacaaaaatcgcagaaatgggcctggcgcagtggctcatgcctgtaatcccagcactttgggaggccgagacgggcagatcacctgaggtcaggagtttgagatcagcctggccaacacggtgaaaccccgtctctactaaaaatacaaaaattagccagacatggtggtgggcwcctgtaatcccagctacttgggaggcaggggcaggagaattgcttgagcctgggagacagaggttgcagtgagccaagactgcgctgttgcactccagcctgggcgacaagagcaaaactgtctcaaaaataaaaaataaatcacaaaaatgttttgttaaaattagcagtaattttactggctcttcaagacattttctttcctattaaattcatcttactgagtagataaatgagataaggcttataaagatcttgaaatatggccaggcgcgatggctcacacctgtattcccagcactttgggaggccaaggcggtggatcacttgaggtcaggagttgcagaccaccctggccaatgtggcaaaaccccatctctactaaaaatacaaaaattagctgggtatggtggcgtgcacctgtaatcccagttacttgggaggctgaggcaggagaatggcttgaacctgggaggtggaggttgcagtgagctgagatcatgccactgcactccagcctgggagacagagcgagactccatctcaaaaaaaaagatcctgaaatatggtaagtactyagtgtgttttagctatcattattgtatttgtttccctttctggctttaactgttgacttcctaatccttcctttctcttaagagatagagtccactataaaacttgtatttggttatactgtatgtcagaggcacttcctatccttgtttctacccaccacttctaccacataggcttgtaaagtgcatctccaccagcataacattctaaagcccatcattccacagcaactgtgttataaaacagtgacaggtataggcattctatgatatctggacttttatatgtagcaaccctataaatcaagaaatatttcatttgtagaaagagttctgctacctaaaaaaaaaaaagagtttgaaaactattgccttaaatcttggacctgacagtattgaattatttttagtttgtgggcaggataaggaaaagtaaaccaatgtttaaatatttgaacttgttagaaatraacaaaaagaatccatggtagttaatttttcttttttaccctaaacttttaaaaatactgcatttcctcccttcttcagattatccagataggacttaggttatttttatctcagacccaagggagaatgacctggataaagtactcctggacatctcccagtgattgaagttacatacatatatataggacatctgctcatagcccagcatgtaagattttggtattgaactttccagtctaagaatatccttcagatgagaacatgtagagagagagagaaaagaaaaagagagtatcttaagggcaggtagcagtgagatgcacagtaatgagtcagtatgtggtatcagaatttatctctattatcagrgttattaacagtgcatcagcattgtacattgctcaatttttgtttgctttcatgtaataaaagaaattattgattctaatgagccatcgtattctgttcttttacttgattggtcccactttttttctaccctaacatctacttccagcagaagtgtggcttccagttgttccatggaggcaccttcagggactacttctgggaaaggcagctggagctagaacaggcagaaggggttcagctagagcagatctgacttatctgttccaaataagattttatttgaacatacagtttaaaacttactgtagtagaacatgtaaataatgtgttgacttattgccctcatgggctaaactggaacttggatctcacattctttggatgaggaatgagattgtattactcttcagagttaatcagcattccagaggctttaggctctattttggattgaagcttactaccttgaaataactgatttttttttttttttttttttttttttgagacagagttttactcttgttgcccaggctggagtgcagtggtgtgatctcggctcactgcaacctctgccttctgggttcaagagattctcctgcctcagcctcctgagtagctgggattacaggtgtccgctaccacacccagctaattttttgtattttttagtagagacagggtttcaccatgttggccaggctggtcttgaactccttgacctcaggtgatccacccacctcggcctcccaaagtgctgggattagaggcgtgagccatcgtgcctggctgaaagaactgattctaatacgtagccaaattctttgttacaaaggttggtatgttattagaaattacctaacattgagcctctggagcttctgccctgaaagttgagctatgcagtttcagcaggtacaagatctaccccagacacaagaggcgctatgccaggaccgatgggaaggttttctagttccttagtgcaaaatgcgaggrcattactttctttctttctttttttttttttttttttggagtcttgctctgttgcccaggctggagtgcagtggcgtgatctcggcttactgccrtctccgcctcccgcgttcaagcaattctctgcctcagcctcctgagtagctgggattacaggcgcctgctaccacatccggctaatttttgtatttttagtagagacagggtttcaccttgttggccaggctggtcttgaactcctgacctcatgatccacctgcctcggcctcccaaagtgctgggattataggcgtgagccactgtgcctggccaagggcattcctttctaaggaatccttagcaaataaactggtcctctacagaagaaagcataaaaaagggacacttggaagaaattcaaaagaaaagaacctgctgagcagtcaaattccagaaggccattactggtgcatctcttgctaatatagtggccaagaggaatgagaaacatgaagttaaaaaggctcaatgaaaacaagctagcagggctgctaaggaagcaaaaaaggctaagctagcatctgaaaagaccgcaatggctgctgctaaggcagcatctacacaaaagatggtgaagcctgtgaaagtgtcagctccccgaggtggttcaaaacaccaagttggcagatcagattcttaaagattggactgtagaaaaatataaattatattacctaacatttgaataacgtattttagtttttcagaggacacgtggcaggttatattgtgctatagagcctcttccacaaatacattcagtaattaaaacaaaaaacaccaaactctcaacttacacaaagcttaattgataacttattaagaaaatttcagattctattgcaatcattcaatctcaaggtgctttcaggatccataagtgagaagaaaggtttaatgtagcatagtgccaagttttgcattactcatattttcttctagcgttgttactatctggcattcatttcttaaccctagaggtcttctggttattaaaaaaaaaaaaaaaacctgtgggagttttttgcttctgaagtttgtttttttgtttgtttgtttgtttgtttgtttgtttttttgagacggagtctcactctgtcgcccaggctggagtgcagtggcgtgatctcggttcactgcaagctctgcctcccgggttcaggccattctgctgcctcagcctcctgagtagctgggactacaggcgcccgccaccatgccaggctaattttttatatttttagtagagatggggtttcaccatgttagcyaggatggtcttgagctcctgaccttgtgacccacctgcctcggcctcccaaagtgctgggatcagaggcatgagccactgcgcctggccgcttacgaggttttttaaaatacacatttcattttcaattaaggcagatttagaatatagcataaacacagagaaagtaaacatttagacaatttcagtgtttttcctacttaatactctggaaccagactgcttatttytggatccctgctgtgtacttaacagctgtgtgatcttgggccatttgttttgtatgcatggtgtatagggcatatgcgggagtgataggaaacaagaatggggccgggtgcagtagttcacgcctgtaattccagcacttcgagaggccaaagtgggtggattacttgaggttaggagtttaagaccagcctggccaatatggcgaaaccctgtctctactaaaaatacaaaaattagccaggcatggtggcgcacacctgtaatcccagctacttgggagactgaggcaggagaatcccttgaacccgggaggcagaggttgcagtgagccaagcgcccctgcactccagcctgggcaacagagcgagactccatctcaaaaaaagaaatgagtsgaaaggtaggcataatcaagacaataaatagtcttgtgtaacatgcaagagtttgaactgtacgtggatgggaagccactgaagaattataagcaagggaattacaccattacattgtgctttaaaatatttytcaagtaccatttggaagaggtgagttacagtaaggcaagaatggagtcgataagtgagtaatgatgcctctcctacaagatagcatgaagatgacaggagagacaagatgcctgagctagggaataggattagggatgaagggatgaatttgagagatgtaagygttaagtgcagtgtggctaagactcatcgactatggaggagaaggaggaagaatccagattgagttctgtcttggatagctatctttactctgatgcagttatccaatataggagttttagaggataggaaaggggtagaatataagtttgcaactgaagggcatgtgagtaaattatatgcagtaggaactggagcttaaaatagataccgagtttgaaattaygcattttgatggtacttggacccatagaagtagaggaatttataggactaaggtgaggggtaaaaaggaattagaacagaatctttggaactctgaagatggaaagagtggctagggaaagaaagaaccagaactattacactgataaaacttctactatttacagcctctttcctccttcttccctgtgtctttaacatgagactaaagccaggaaaggattgggtcccaggaaaccaagcagggcttttacactggttagggtacttgatggaacttttcactacagaatgcaaaactctacactctaaacagttgctgctccccaactgaaaactcctactctgggaaaatgtctacactgtacctttattcacattagtcttgccttgacattgtctgttactcctgtgcagttatgaccacaatcattattcttttttttttttttttttttttgagacggagtcttgcagcaatgccctggctggaatgtagtggtgccatctcggctcactgcaacctctgcttcccaggttcaagcaactgtcctgcctcagcctcccgagtagctgggactacaggcacttgccaccacgcccagccaatatttgtatttttagtaaagacatggtttcaccatattggccaggctgatcttgaactcctgacctcaagtgatccatccatttcagtcttacaaagtgctgggattacaggtgtgagccactgtgcccaaccaacattaattcttttttttttttttttttttttgagacgagtctcgctctgttgccccaggctggagtgtagtggcatgatctcggctcactgcaacctcacctcctggctttgaacgattctcccacctcagcctcccgagtagctgggattacaggtaactgctatcatgcccagctaatttttgtatttttatagagatggggtttcaccgtgttggccaggctggtcttgaactcctgacctcaggtgatttgcctgtctcagcctcccaaagtgctggaattacaggtgtgaaccaccacgcccagcccaatattcattcttatgagtactctgatgcaatttctagcccatgtattaccaaagatcagatattcactatatatagtaatagttacataacaatgtccaaaaaaggtgtttaatagaaaggagaattttttttaacttttattttaaattcaggggtacatatgcaggtatattgcataggtaaacttgtatcatagggtttgttatacmgattattgcatcatccaggtattaagcctggtacccattagttatttttcctgatcctctccctcctcccaccctccaccctctgataggccctagtgtgtgttgttcccctctatgtgtccgtgtgttctcatcatttagctcccgcttataagtgagaacatgtggtatttggttttctgttcctgtgttagtttgctaaggataatggcctctagctccattcatgtcctggcaaaggacatgatcttattcatttttctgactgcagaaagcagaatttataatctgagtaatgccataagatatataaatagcggaaaaataactttacttattgatagacaaattcwttatgctggaatatttttatgttttctagactagtgagtgtggagtaattagcaatatgaggttcaaagtttgggtaaaagatttatttttgtcttggttttatttatttatataatatatatatgataygtatatatagtatatgtatgaatttatttgtagctctgaagatggctgtggtagatatctatcattccaggttaaaggagagacaaagacgaaaaaagtaagtataaaaaaccatcctggcctcctttcagctttggattattgttttttgtgtgtgtgtgtgtgtgtgtgtgtgtgtgtgtgtgtctgtgtctgtgtctgtgagagaggcaaggtctcactctgttgcccaggctggagagcagcagcacaataatggctcactgcagcctcaacctctcaggctcaattgattctcccacctcagcctcctgagcatgtgggactacagcagtgcgccaccatgcctggctaattttttgtattttttgtagatacggggttttgctgtgttggccaggctggtctcaaactcctggacttaagtgatcctccctcctcagctcccaaagtgttaggattgcaggcatgagccactgtgcctggcctcagctttgagtgattgaccacatatagtccatgagagaatgctccacttgtgactcatcttttgaccttggagaagactcttaccctccttagacctcaatttttccttctctcaattgaggatagtaattcctgtgttatttttatatcctctgyccttatcctttattgacgttatgatgaacaatgaataatatgggtacactgttttaagctatttgaagtaaaagaacaagataaaataaaggcatcaagacagtattgttacacttttttttttttaatatttgtgaatcattctttgcttttgtctttttttttttgagatggagtctcgttctgtcacccaggatggagtgcagtggcgtgatctcagctcactgcaagttctgcctcctgggttcatgtgattctccagcctcagcctcccaagtggctgggactataggtgtgcaccaccacgcctggctaatttttgcatttttaatagagatggagttttgccatgttgtccaggctggtcttgaactccccaccttaagtgatccatccccctctgcctcccaaagtgctgggattacaggcgtgagccaccgtgttcaacctttttttttttttgttaaataagagacagagtctcacacttactctgtcacccaggctggagtgcagtgtcactatcatggctcactgcagtctccaactcctgggctcaaacaatcctcccacctcagcctcccaagtagttaggactacaggtgcgcaccaccacacttggctaattttaaaacctttttctttttttagactgggcgcggtggctcacacctgtaatcccagcactttgggaggccgaggctggtggatcacctgaggtcaggagttcaagaccagcctgaccaacatggtgaaaccctgtctctactaaaaatacaaaaattagctgggggtggtggtgcatgcctgtagtccaagctactcgggaggctgaggcaggagaattgcttgaacctgggagacggaggttgcagtgagccaagatcacaccactgcactccagcctgggcgacagggtgagactccgtctcaaaaaagaaaaaaaacctttttttttttttttgagacagggtctcacaatgttgcctgggctggtcctgaactcctagactcaaggcatcctactgccttggcctcccagagtgctggaattacaggtgtgagccactgcactcggactgttaggcttttttattttatttttattttttattttattattattacttttgagatggtcttgctccgtcacccaggctggagtgtaatggcgcgatctcagctcactgcagcgtctgcctcctgagttcaagcaattatcgtgcctcagcctcccaagaagctgggactacaggcacgtgccatcatgcccagctaattttttatttttagtagagacacagtttccccatgttggccaggctggtctcaaactccaggcctcaggtgatccgcccacctcagcctcccaaagtgctgggattacaggcatgagccactgcccccagccctattgtgcttttttaatgttctctttctaactgttcattttttaatgagaagtctttcatctaaaaggatttcaaagaaattctgaacaagtttcaggcatactggttcttcctctctttgcaacatatcaaaaagtatacattcagacttagaaattatggatctcagacctctgttggtttcagagaagagtatgcagagggtataagtgtgcatgtgtgtgtatgtatgtgtaggcatgtatttactgtgatgttactaactgtagacacagtgatatctcagcaataaaaaggagagaagccaggtgtggtagcatgaacctctggtcctagctacttgggaggctaaggtgagaggatgacttgagcctaggagttcaaggccagtctgggcaacctaggaaaaccccatctcttaaaaaaaaaagcaaaagaaaaaaaagggacttgagattcactctggaggaactaagatgtgatctaaagcagcagtcctcaacctttttggcatcagggagtggtttcatggaagactgtttttccatggatggctgggggcaggaatggttttgggatgaaactgttccacctcagatcatcaggtattggttagattctcataaggagcacacatcctagatcctccacgtgagcagttcacaatagggatcgcgctcctgtgagaatctaatgctgccgctcctctgacaggaggcagagttcagacggtaaagctgctcacctgctgtgcagcctggttcctaactggtccatggcccaggggttgggaactcctgatctaaagtaaaacttactctctgcatgtctggagttagcttccatgaaatgctgaagaagcatacccagttgctcctatgagaagcttcattgctagttatgaatacctctggtataaatcagattcaagacacataactttgcctggtttaaattctcttttgcttaaaacacaattcgagctagagagtactgtagaactcagttgctgatgttgctatcaaatcttttgttttataatgccctttcattaaacatgcacaatatttatttctagtaccgccagtgttgtgtgaatgcacagttgwaaatgttgaatatgtgatcatggtgccctttagcagatttctctaaaatggctgttctcaattatttccacaagctgaatagattaactttatgacatggacagagattcctttcggtttcatcttaagtgacagacatgtgtttttcagcatttgtgagtggttattgattsattcattcgttcagcaaatagtcatggagagtctactatgcccaacaagaggaaaaacccgtgatgcctgagagtctaaaattgggttagtgattcactgacctgcagaaatttgtgggagtgacttctttggacctctgtattgtattccacctcagcatgtttatgtctgatgatagctatatgtgtaaagcattagtaaatgtgaaaataattctaatgcacaaattattgtggcttttcattctagaattataagagaccatggattaatcaaccttagaaagtttcaatgtaagtattagcagttttctttattttacaatttttttccaatattattgaataattttaaataaatcacgtattgtagttcttaatccaagttgcatattagcctggctatcactccagactaatgaagtaagaatctctggggttggaggcacagcacctgcatttttaaaaagtcttcagggcaattctgatccatagtgagagtttaaagtattaatttggggccaggcgcggtggctcttgcctgtaatcccagcactttgggaggctgaggtgggcagatcacgaggtcaggagatcaagaccatcctggctaacatggtgaaaccccatctctactaaaaatacaaaaaaaaaattagccaggcgtggcggcatgcacctgcaatcccagctactcaggaggctgaggcaggagaatcacttgaacccaggaggtaaaggttgcagtgagccgagatcacgccagtgcactccagcctgggcgatagagcaagacttagtctcaaaaataaataaataaattaagcaaataaataaatgtattaatttgtagtcaataaaacttgtattaaaattcttttttaaaaatttgtatagtaattacagtgtgaatattaatgaataattttctggatagagtcatgttttgcaactatgtgttaagcataacataaccttaatcttcaggttgtaaaaatattttagataaataacagaaagtgatctttattttggatggttatagacagacaaaataaatgatatttaatattatatgacggtgataaaaatacatatagtgatttttaaaataaatgccacctttgaccttactgtggttttttgttgttgtttgttttttaagagacaggttcttgcactrttgcccaggatggagtgcagtggtgtgatggtatcttgctgcagccttgaactcctgggtgcaagtgatcctcccacctcagcctccttattacaggctcgagctatcgtgcctggcctttattattttaaatatcagagatacctaagcagggcagaaaaagtccctgtactttttcttcttccacaacatagaggcttccacaactaagaaggatgatgtcataataacaatcacaatgtttgtattaaaatatttgtaatagttgtgtgtcataatattctttttttgtaaagaataacctaatggttaggtttgtacaataacctaatggttattgtaaaacatcccagttgatagattcttgtaggggtatttatttaataatatatagcatcgtagggttcagtcaacaaggttaagtgtctttttagtgtaaataaatatctagccaggcatggtggcttgcacctataatcccagctacttgggaggctgaggcagcggatcacttgagcccaggagttcaaggctgcagtgagctataatcatgtcactgcactccagcctgggcaacagaaaatctatattttttaaaaatatagccatcatcataagtatgttacattttaggtcctttattatttatttattttttgagacagggcctcactccagttrtccaggctggagtgcagtggctcagctcactgcagtctccgcctcccaggctcaggtgattctcccacctcagcctcccaagtagctccatctctactaaaaaataaaaaaaattagccaggtgtggtggcaggcgcctgtagtcccaactactcaggaggctgaggcaggagaatcgcttgaacccgggaggcggaggttgcagtgagccaagatcgtgctactgctctccagcctgggcgacacagcgagactccgtctcaaaaaaaataaaaaggtaagctaggaaaaaaaaaaatagctgtcataaatgaaagtctgtatcgttagtccaagagtagatagaactaacctaattactgattgaaacgacccaagtagcagttsgagagttactgactgctccaatctaccagttattgttagtcagttktactctccatcttctttgcagatacatctttggattagttgtttggtcagtagtgatccccagagttgctgctctggtgtctctgcatgatatttgcatgacagttgtcaaataaaacttcattagcagtaaattaagttgtagtagttaatttagtttggagaaaggyaaaatgacccatatgaaggatgaaaaaaatacttaccttgcttgaggatgtgtaggtgggacatgcaagaaatcacactttttctcagctaatgggaaatcttctggatggattattttgtctgtagcttctttgttttcctgtgggagttaataccataaattttggccataattcttcctaagaatgtaagatctgcctttaattgtctcgtccattactgccagcagttcctgcccctgtgtagtttaaaagacagtgaggtggccgggcgcggtggctcacacctgtaatcctagcactttgggaggccgaggcgagcagattgcctgagctcagtagttcaagaccagcctggccaacatggtgaaacctcgtctctactaaaatacaaaaaatyagtcgagcatggcggtgtgcctgtaatcccagctacttgggaggctgagacaggaaaattgcttgaacctggggaggcagaggttacagtgagctgagatcacaccactgcactccagcctgggccacagagcaagactccatctcaaaaaaaaaaaaaagacagtgaggtggctgggcgcggtggctcatgcatgtaatcccagcactttgggaggccgaggcgggtggatcacctgaggtcaagagttcaagaccagcctggccaatgtggtgaaattccgtctctactaaaaattcaaaaattagctgggtgtagtggcgggcgcctgtaatcccagctactttgggaggttgaggtaggagaattgcttgaatccaggagatggaggttgcagtgcgccgagatcaccccaacgcactccagcctgggagacagagcgagactccatctcaaaaaaaaaaaagacagtagatgtgggagatgagtagtgctcagtggtggagatgatctccagtgttaacaacatccctgtgggatagttgctatggtgctgtcattatgattagygttttgcattcttggctttcctgtttgcttcctgtcatggataagttagtcatatgaggttatgaataatgttcttccattttactaattgtaaaaaaaaaaaaatgctgaaaactcagggatccttacatttcccatgacacatttatgttttattttctctgtagtaatggaacggcggtatcccaaggaggtccaggacctgtatgaaacaatgaggcgatttgcaagaattgtggggccagtggaacatgacaaattcattgaaagccatgcatgtaggtggtttttgagccttgagcagtatttgtgtgtgtatatttatataaataggagagataatggtgtgttttatgtgaagttctataaataaataaatggatatttctctctttgttcccctttattaccatgagacaaatttgggactatgggggtggcagaagagaggttaaaaagccctaatgacttcccccattgccccagataaacaataatttagtagtttttctccctactttgtatcatgggaactttcaaatatatatagaagtagagataataatatgatgaactcccgtgtatccatcatccagcttcagcagttttcaacacatggccagtctggtttcatctttaccactcactcttccctcctgccctcaactggattattctgaagcaaatcccagacatcattttattttgttcataaatattttagtattaaaagtagttttaaaaatgaggacagagatggatagcttgtggagatagtacttccatcgatctcttgcctttctgtggtatttctrtgagagctctacatagttaccatttgatttttcactataaaaaattaaaagttgttatgaggccgggcgtggtggctcrcacctgtaatcccagcactttgggaggccaaggcaagaggattgcttgagtcgaggagttcgagaccaatctgggcaacatagtaaaactccatctctacaaaaatacaaaagttagccaggcatggtagtgcacacctgtagtctcagctactttggaggctgaggtgggaggattgcttgaacccgggtagcmgaggttgcggtgagctgagatcacaccactgcactccagcctgagcgacagagtgagaccctgtttcaaaacaaaatatgttggtatggcagtaaggcctagattgttaaaataatatggactctggcttgttctgtacctttcatcatgacatttgtgtatgtggcttctaagtttagttctgggaaggtagtctactaaggcccttattctcaccgtgaaaatatttcttacatagcattgcagacatttatctgagccaggttggttgtcctcaccaaacaccttgtttggttagcattctttgtgtggtttgtaccaggtgactgatcctttacttcctgtcccagtttgggacacacccctggtttatgtgtcattccaaaacactacaccccatggattgtccaggctcttccttcattctctgtttcaaaagcagccaaattagaatgatttgtagaacttttaatagaagatagttagagcagggaaacttggttgttaaaaaaattatattttgcccagtgcggtggctcattcctataatgccagctactttggaaggccgaggcggrtggatcacctgaggtcaggaattcgagaccaacctggccatcatggcagaaccccatctctactaaaaatacaaaaattagccgggtgtggtggtagatgcctgtaatcccagctactcaggacgctgaggcagggggaattgcttgaacccgggaggtggaggttgcagtgagccgagatcatgccattgcagcctgggcgacagagcgagactctgtctcaaaaaaagaaaaaaaaaattgttacttttgtagacaaatgaatttaaccatttcactaagttttctagaagacagttccagctgctgcatctggagacagcagctggaagatagctggagtaggttttcctcagctcttgggtaaaatttctaatgagaagttaccaacgagtaggattctccaaatgaacttccctagtcttataaggcagaattaatgaaaatgctcaatagcaaaagtgctcactaatgttgcttttgtttttgtaattttttccttcattccttttggggaaaacagtggaatttgaactccgaagggaaatcaagaggctccaagaatacaggacagcaggcattaccaatttttgtagtaagtatgcttcagctacataccgtacttgagggcaagtatcttccagacacacagaggaagtctctgaattgttgtgaatttttttttaaaaaacaagctttcctttaccagaatgctttaaacctttccagtaaagttttggctatttaatccctataaatacctttgtatagattatctttggtactacaaaagttgtgagacaaaggaaagagaggtgctgctttagatttaggattctgccgaggctctttaaaaaaagggaatcttgggccgggtgcagtggctcacacctgtaatcccagcactttgggaggccaaggcaggtgggtcacttcagtccaggagttcgagaccagcctgaccaacatggtgaaaccctacctctactaaaaataaaaaaactagccaggcgttgtgrtgcacacgtttaatcccaactactcgggaggctgaggcacaagaatcgcttgaacctgagaagcagttgttgtagtgagccaagatggtgccactgtactccagcctgggyggcagagggagattctgtttcaaaaaaaaaaaaaaggaattttatattttaggtgtgtcacccttttcaaatttaatgatacatggtcttagcatttttataaaataatgaagcttcaactggctccaggtgcttgcatcccagttacttggggtagtgacaataattatattattagcagctaacatctatcagatatttaccatgtaccagtctctatgctaaccatttcacttggatcaagtcaatgaattctcatgacaaacttataaagtaccgttacttccatttagtgaagaaattaaggtataaagaggttacagagctagttagtactagaaccaggtcataagagatagtgtattatagtagttaagagcttgggtctagacttaaaaagcttgagtataaattttggctctccagcttgccagctctgtgatgtgattctatccaaatttatttttctttccttttttttttttccctagagactgactcttgctatgttgcccaggctggtctcaaactcctggcctcaagcagtcctcccgcctaggcctctcagagtgctgggattacaggtgtgagcaactgtgcctggcctctattcaagttttaattttctaaggttcttagagttagtgtaaagatttaattagagatactgcataaagcatagcacagtatctggcacacaataattcctcaataaatggcagtttctgttgttttgctgtcattgttgaaatgatctttagcattccctccttcttcctatttgaagtttttgtgattattgatagctgtcacctactatctataagaaatagttggcttcttttttttttttatttgagacggagtctggctctgttgcgcaggctggagttcagtggtgccatcttggttcaccacaacctctgccttctaggttcaagcgagtctcctgcctcagcctcctgagtagctgggactacagtcatgcaccaccatacccggctaatttttttttttgtatttttagtagagatggggtttatccatgttggtcaggctgatctcgaactcctgacctcaggtgatccacccacctcagcctcccaaagcgctgggattacaggtgtgagccaccacgccyggcaatagttggcttcttaacacagccctgtgggtgcaacatagccttatggatgtaagttcagcctagtataatggctctttaacagtggaaaccatttttgaaattaaattttgtgtgagccccaatctacaaataagataaaagtgggctgggcacggtggctcacacctgtaatcccagcactttgggaggccgaggcgggcggatcacttgaggtccagagttcaagaccagcctgaccaacatggagaaaccccgtgtctactaaaaatacaaaattagctgggcatggtggcgcatgcctgtaatcccagctactccggaggctgaggcaggagaatggcttgaacctgggaggcggaggttgctgtgagccgagatcgcgccattgcactcaagcctgggcaacaagagcgaaactcygtctcaaaaaaagataaaagtggaattactttggttgaactttaatggttcaatttatgtgtagagcccaggacccgccggtatctggcagtgccctttctctttacattaacctctaagatactcttgtggtatcctggggctctgtggaacctagtttgaattttgaaacccactggtgcagtattttggaatctgtgaacctttgttaacatgtagaaaacaccacgcagctcttctgtttagcaagatgcatatagagactctgataactaattttggtttcctgatattggctgcctctaagaaatatggagaagaggtactacatgtcaaagagaactctttttttgtaattctaattgttttttaaggaaaggcatatgcttatagcacttgtgtgactttgaaaaaatttataaaaatagaaaaaacaggaagcaaatatgactatagtaaaagttggttactttttgagagtggaaatatgagcaattcttactttctttgtacttttctgttggtttttttccccttatttcttacagatagaaaaggaatacaaatrtttaatatttaatacttagtattaagaaaaggatttcagactagggaaaatctacttgggtcttggagaaataattgtgaaagcagttttgcaaaggaaacagactttaagaacaaaacccaaaaccggtttcttggtcagttaggaagcccttcagttctgctgcattgtcattgtggtcattgtgttttctatacccccaggtgccagaacstacgatcacctcaagaagacacgggaggaagagcgccttaaacgcactatgctctcagaagttctccagtatatccaggacagtagtgcttgccagcagtggctccgccggcaagctgacatgtgagtaattactccagggtgaaggaggcattctttctgggatgccttggccttcacatatatttttgggcaccctagatggcagagtaataataattgagtagctggaagaattcagaaatattttagcagtccatctcagaaacagtgccatactgacagttttgagaaataactgacctcctagaatcatactttactactttgatcctattttttaaaatgagtgtattttcccccagccttctacccatgacttcaactctctyttcatacmtagattttcactggggaatcatgtttgtatcccttccccttgagtggtgttagtggtgttctagattacaagctcttcttaacaaatctgaggaatttttcttcctcagaacagattttctttcctgctcaatacagtgagatatctgtaaaacatagttcagtctatctcattacacttcttcaaggtgacctacctgataaatggcacccagtctcaccggggcttttggaaatcaccttgtttgatatgacctaagtttaaattcctcttcttcgttgtagtgattccggcctgagtccttccatkccaatggcttcgaattcaggtaattatttctcaggccagaacaagtcttaattgtgaagtttgcatcgtaggggttatagtgacccagcaatcttccttcctctgtggtgtcagggtgcttaggcagagtaacagtaatcaagtgttagcccaatatrtaaacatcagtatgttttcagaaccttcatggccagacagagactatcctcagagtgmcagtatagagtatagmcagtatagagacaggggaaaaaagaacttcagagaggtaacttctttattttaccaatgttcatgagcagttagtttactgcagttgtgtctaccactaattttgagacttatttcacaggagataaattaaaagctttttattttattattttttatttatttacttattttttgagacagagtctcggtctgtcgcccaggctggagtgcagtggtgtgatctcggctcactgcaacctccgcttcccrggttcaagtgattcttctgccccagcctcccgaacagctgggattacaggcatgcaccacctcgcctggctaatttttgtatttttggtagggacggttttgccatgttggccaggctggtctcgaactcctgacctcaagtgaggcacccaccacggcctcccaaagtgctggaattacaggcgtgagccaccgtgcccagcctaaactttttatttttatataacatgagcaaagaagcatgttacttgccagaaacataaggatttctgagttagagacctaaagtatttctatttcttcgttttacctctttgagtatgtcctattttgaaattagtatacagagcaagattaagccatacgctatctgatgatccttggtgattggtaatcgatgactgggaattgggggaggtatgtctcagtagattcagaatctgggtctcagatttgtcygcgttagggacttttttttttttgagatggagtctcgctctgtcacccaggctggagtgcagtgacgcgatcttggctcactgcaacctctgccttccggattcaagcgattctcctgcctcagcctcccaagtagctgggattagaggcgcctgccactatgcccagctgatttttgtactttcagtagagatggggtttcgccatgctggccaggctggtctcgaactgctgacctcaggtgatctgcctgcctcggcctcccaaagtgctgggattacaggcatgagccactgcgcctggtcactgaagggacttttttttttcccccatttattcctttatttcaagtgattttttcttaatatggaaagaagaaaaaggtattgttttaggggagtggctaagacagtgaaatcaaagttttattttgtaagtttcttactgccaacactctacccccaaaatctaaatacaactaagttaatactggctaattaaaatgaaggaactgggtcaggtgcagtggctcatgcctgtaatcccagcactttgagaggctgaggcgggcagatcacctgaggttgggagtttgagaccagcctgaccaacgtgatgaaaacccatctctcctgaaaaaaaaatataaaaattagctgggtgtggtggtacacatctgtaatcccagctactccagaggctraggcaggagaatcgcttgaatccgggaggcagaggtttcagtgagccaagatcgcaccattgcactccagcctgggtgacagagttaagaccatctcaaaaaataaataaattaattaattaaattaaatgaaggaactggctaacatgatcatatattttgttctctgtactatctgcactgacttgttcattgtttcttttttctttttttgtgagacagggtctccctctactatccaggctggagtgcagtatgtgatcatggctcactgtagcctcaaactcccaggcctaagtgatcctcccagttcagctcctgagtggctgggactacaggcaaatgccaccaaacctggagaaattttttttttttttttttttttttttggtagaaacaaggtcttactatatcacccaggttggtcttgaactcctgggctcaagtgatcctcctgcttcagcctcccaaagtgctcagattacaggtgtgagcctctgcacccggcctcttgttcattgtttgttcctagcctgtgttagcctttctcaccccttatatttaggctgaggagatctcttgctctcctttatgttctgagttcttaaggcawctatgtattggaagcctggcatctttgattgtagcctagcctctggtgacttttgtgaggaaccaaatggttttatctccctttttgaggatttggaataatcccttatgccttttgttgatgtaacagagaagcctgttttccaccagtggagcttgtaacagtccctcccctttctctgccccacttgaaaagcaacctctataaaacttcgacattttctttgcttaactcagtctatccattcccagctgaataccaatccctartacacattcaaaacaaaaccaaaaaagttttgctcatcaagcttcccctcctggccagtgacctcctacttgggtttctttctcaggtgtgtgagttgacctcagcccctgctttgccatataatggctcattgttcctgtttgtggatcttgcaggtaaacagggctactttggaaggaacagatattccctcacataataaaaaagaagggccttttgctggcctaacagtctttctttgatctgaaggcacacagtacttggttaattaccatgtttgccttgtactgctggccgagtggcaaggattagggaatgtctgttctgcagttattatttccattcgtcagctgtcaaagcaggcattgtgtgatgtttcttaactggatgacatctgggcatcagattttagagtctcctacatggttaggaagaaataggtgatagtcgggcatggtggcatatgcctgtcttcccaggtagttgggaggctgaggcaggaggatcacttgagccagggagattgaggctatagtgagctatgatcgcaacactgcactccagcctgagcaacagagtgagaccctgtctcaaaaataataataataaataagagataactactgtggtgagtagttacatttgatgctaaggtatgtgtgactgtatgtgtattttagcagattatgggtaattcatgtgccctgaatatgtaattcattttcaagtgaatgttcgggtgcccatgttgttagctaaacaggcctgagggaatgggacaggatttcctaagctggatatagtgatcctatacctaactggcctggctgcactgaactttttaatactttacacctgagaaattgtcactcctattaaatctatgctgtttcctttctctgtctataggtagacggagtgcaccacccttgaacctcactggcctccctggcacagagaagctgaatgaaaaagaaaaggaggtaacaaaagggagggggctgggagaaagagaataggggctgattattcattgagttgtcattaaaaatccattacagggtcaaaccccttttgtttcattcatctaacatatatgcacagctctggtgaatcctagaagtccaagagctaaagagccgtttgtggcagatttcagagaattgcttaccttgtcaccctaccaccattcctcttttggggaaagcacatgtggtatgtagatgacataataatagcaactatcatctattgagcacttaccatgtgctactctactragtgctttatgtaaataaaattaattttttgtaaacctaaagtaacttytacatgaaaatagatatttcctattagaatggctgccttgaaaagttctatacttattccaacaacataatcattatttaaaacatttttgtaaattgtctccagagcatgtttataaacctaaggaaaagatttctacatcatatatagtcatgttaattttgattttaaaaattattttttatttttatttttttttatttatttattttttgagacggagacttgccctgtcacccaggctggagtgcagtgatgcgatcacagctcactgcagcctccacctcccaggttcaagcgattcttctgcctcagctccccgagtagctgggactggactataggcgcttgccaccatgcctggctaatttttgtagtttttagtagagatggggtttcaccatgttggccaggctgatcttgaactcctgacctcatgatccatccaccttggcctcccaaagtgttgggattacaggcgtgagccacctcacccggcctattttttattttttatttgaaagtctcgctctgttacccaggctggagtgcagtggtgtgatctcggctcactgcaacctctgcctcccgggttcaaacgattctcctgcccctgagtagctgggactacaggcgcataccaccacacccggctaatttttgtatttttagtagagacggggtttcaccttgttagccaggctggtctcgaactcctgacttcaggtgatccactcacaccagctccaaaagtgctgggattagagatgtgagccactgcaccggcctgattaaaaaattatgtgacctactttttccagttgcaatcatcagacatgtcttcatattgattttatctgtttctaaaatttaaagccagcctcataagagtcatcatcaggagttttcagaaaactttgtcacatctctgaagtctgttcctcttttggaggagttcctcttttgctcctcatatgctccttttataattcccaaggtcagttccccatctcccaccatatatcattagttcagttcagataataaggaagggtcatagtgtaggggatagtgttagtcttattttatccaccaggaacagtaaggattagtttgggagtggaaggaaatgtatgtagtatctatgtattgctgaaggaggtcataggtcagcctgattcaaatattgaatggcctggaatttcaagctttttttatccttacccacataatggtgacctcagactcctcattgctggataatgtggcaattttctagatttttagcagttaaagttacctcctcttagcaaggtctctttatctcctttccctttgaagtaggaaatgtaatccccaaagcagggactactgctttatgctgacactaaaaacaatgtgatgcagccttgagaatccaagtgtctgtgcattctkcccccactgtgccccatggctcttccctgaccattggtgctgggactgtacctgggcatttagtgtttgactcctgaaagagccaggctgctcctcaggagcacatagttgtaaatccctaacaaacccaggcccctgagccagctggcatgtgctaaaggctcttctagtatcacaccctggctttctcttcctgggtgtgtgtccttagggagtgttctctccagagaggaagagactaaatggaatgtagtccagccacccatcagctcctataaatagttggaggttgatgtcactttaaaaaattttttgctatacctgctggattaaattacaaaaatgacagatgttaatgtttattaaatttgccgtgtcttgcagctctgtcagatggtgaggttggtccctggagcctatttagaatacaaatctgctctattgaacgaatgtaacaagcaaggaggcttaagactggcgcaggcaagagcactcatcaagatagatgtgaacaaaacccggaaaatctatgatttcctcatcagagaaggatacatcactaaaggctaaggctccaagagcttgggatcagaagtcagaagtttggaatgtggtgggtcaaaggacaatatgggtgggcattctggagagttgtttttcagctgaattctcatggtgaaaacaggggaaaggacaaaggaaaccttaagttgtattgtctactttcttctccatcctgctttaaaacactcctgttgttggtattatgctgcagagttgtgtgctacataagctattattaaatgtgagtgggcattcattcctaacacctcttgtaactaaaagaaccatagtacctcacatcacagtgctggtagaaatggaactaaaccacagtctgtaatcccaggagtccagctcagatccttatattgcgaggtaagtttgctgattatctgtcttgccttcaaacactgcagacagatttaaaataaagagaaaggttttagagcataagaaagctctcgttgaaggattttttaagctgacaactttttttttttttttttgagacagagtttgctcttgtcctccaggctggagtgtgatggcaagatctcagctcactacaacctctgcctcccaggttcaagtgattctcctgcctcagcctcccgaatagctgggactacaggtgtccaccaccacacctggctaattttgtatttttagtagagacagggttttgtcatgttggccaggctggtcacaaactcctgacctcaggtgatctgcccgcctcagcctcccaaagtactaggattacaggcgtgagccatcgcgcccggcctaagctgacaacttttatgagtaaaggggaagaaaatatccttatgatggtcttatcccaaactgcatctttaacttcggccgggcaaggtggctcacctgtaatcccagcactttgggaggctaaggtgggcggatcacgaagtcaggagttcaagaccagcctgaccaacatggtgaaacagtctctactaaaaatacaaaaattagctgagtgtggtggyacacgcctgtaatcccagctactcaggaggctgaggcaggagaattgcttgaacacaggaggcagaggttgcagcgagctgagatcacgccactgtgctccagcctgggcaacaaagtgagactctgtctcaaaaaaaaaaaaacaaaaaaaaacctttaatgtctggctttgtactttgcagtctgcctgtctaatctgcagtagtcttttgaggaggtggcaccggatataacatgtctctgttatttttagaattaattaaaatgttttgctatttaatttgtgggtgtgtcaaatattctggtaactgaaacacacttaaggtgttggatgcctgccccatcacgctgcactgtctgctgtcacatgtgtcctgaactcaccctgtttttgccctgggtttcccaggataccaagcccctgaggatggagatgatgcaacaaacctcagctttgcttggattgtgacttgaaccctatttctcaatggtgaaaggctagcctgcaataaaagctgcttttaaaacagaagtaaagcagctttatatatgggactcactagatatgagggtaagtagccccaccacatgtaaaacttggtcctcaaacgtttctgcagaataagaagccaaacttatggttatcttgtttctgttagaaacaaagttgtatatagaaataacttcgtcagaatcgacacaaatcacatcgaatagttgactgtttaattccttctacattcaaatatctaattaaaatactgtgtgctttgttggaagcatctgctcaaacttttgactkttgtaaatatgcatgcagctgggaagggattcatctaagggataagaaatgaaaaagacactctaaggacctgagggaattcaaatagaggacttcgattttttaaaaagaatgacgtggaaatgayctgttttccttgtaaaatcatatctcgtagaaaacattttaccaytaccatcacccctagttggttgtgaagtgattgcctcttatccctgaaaggaaactcctgttctgaaaagttgggatgcattagccatcagtgttaggtgacgtctgttgtagtctgaagagtccttaaccttgattaaggaaggcttcctgggagaggtgggcttttggggcaattatatgatagagaagagagagaaaaatggcagatggaagtgggagacaattccacacacagggggtggagaatgatgtggaggcagcagtgggtgtaaggacaatggtgccaagagatttatttggctagaacacaaggggcagctgggtagttaggagtgggaggatggtaggacagtctgacagaaaccttggaaacagttgaactctgaaaagctgatggcaaatcagatttcatgaggaaaatggcatggttgaaaatagtaatagaaaaataagactgaagttttaaatgactggatttttgaaagtaggattattatttctttggtataccgaactttgcaaagatacgtagcattgcatccttcctctttgcttctagacagggttggccataaaccaactacactgatagaggtctctccagattgtctcagaagagagagtttaccctgaaacttaatgacatgaataaaacctgtttactgaaatttttattgcaatttaacgttaaaagtttctgctggagttttatgcatatttttctctctaagtggtgggaaataaagaacaaatctctttccatgtaatgactcttctctgtgctcaaagaccaagactctgtctcttgcgataccaattaatactaaatattcagtttatcttttcctgggtcccagtttctttccttttattgttaaccgtcttcacttcccccgcttttaaaaatctgaactcagttaagcaaccagtcattgaaatgactgggggttagctggaaaagggagaaaaccaatggcattcatcaataacaacaaaatcccagtttgtaggacattctagctttaggaaatatgtaggtatgtaacaagagaaaaaatctgcattgaagaatcagaggccacattacacagcagtttgggaaaactcactcataaatatgtatgagttttattatttctttggtaaacccagctttgcaaagctttatgcctagaatccctccaaaaaacactttttcacccatctttaagcaaacagtggtactgtattctcaacagcattctggggaacttcgcccattcatttttaaggatatctttgtggacaccttctaaatgtacattgcattattcttgacaacacaaaagggttttctgtatcttatatgcacctagctttttgtttgaatttctaaaaattatattgaaataaaagtttgattcaagaggtgctgctgatctggaagctttgctttcctttccaacgtgcttagccaaatgcagctaacctttcccacatctgccagaagggaccatctttggaacacgaggacactgccatgtctgtggccttgcatagaagagttggccaagctaaaagaattctttttaatcagacactggctgggtgcagtggctcatgcctgtaatcctagcactttttgtggctgaagtgggagagtcacttgaagccaggagtttgagaccaggctggacaacacagcaagacccccatctctacattaaaaaaaaagaaagaatgctgggtgtggtggctcacgctttttctcctagctacttggaaggctaaggcaggaggattgcttgggcctgggtagtcaaggctgcagtaagccatgatttgtgccattgtaatgtagcctgagtgacagggcaagaccctgtctctaccaaaaaaaaaaaaaaagacgatacctagtccttttgagccaaatgtaagtgaaacagagcaagagcagggtcacagcagcctgaatagtaatagtcctgctgacataggcacttgatttgggagtgagaacaatagtgaagagtttttaggccagtggctcatgcctgtaatcccagcattttggaaggatgaggtgggcggatcacttgaaatcagaagctcaagaccagcctggccaacatagcgaatccccgtctctactaaacatataaaaattacccaggcgtgctggttcacgcctataatcccagcctcagggaggctgagacagtagaatcactggaacccaggaggtggaggttgcagtgacccgagattgcgccactgcactccagcctgggcaacagaacaagactgtcaaaaaaaaaaaaaagtgaggagcttttaacttgggaatttggaacctaagtagccagtccttgaagtgtgcatcagaactgacgtgttagtgtgctgtgtttgaggagggaaaaatgaacagttgctgagaggtatggaaaaccagtttctttgtctaatggcagggagttctttttctgttgtttgttgccttggcttccagcagttaaggtgtactgcaatcaaactgccctttgatttgattgactaagctacaaatcagagacattatttaagggaaaggtgaatgtcgtgcatctgccatcacaattcctttgtcacttgagtagcttgttatgcattgtgtcctaggcccccttccctgttgacagtaggaataaggaaatggagatagcacaggaagttaaccactaaaaggttccaacccctgaaaactacaaaaaatttatttcatagatgtagccctgaaggtcactgtacttacccttgtcttggaaaaccctgtagttaacttttgccagcccagacttggtctggataattgagtctgatgcacctattttctacgttagagcaccagaatggatttttgtggcaccaaactaatcatttggttgaattaaccccctcttcttaaccaagcaacacttttttcatcttggtctggtctcccctgaggctgtgggtggcaaaaagcttccaggtagcttataataatcctgccttggtccagagttgtgttgaacagaatcagcatcttaggaaatgtggaaaggagaaggtctcacagttgttttaagaaaccagcactttcttaagcagaaatgctgaaatgctgccatcaaatcacccttattcagtgaactgacagccaagtgccaactcatgacacttctaacatatctctcctcttgttggaaagctagctgccgagtatactctccatttctgaaattgttcgcaatgacgtaagactttcttcctattgaacaatatataactattgatttggatccttccctcgcccctcacctttcattatcatcatttagggaattcctttaaaacagaaaaacatattaagaagttaaaaatcaacggagggcaggcgtggtgactcacacctgtaatcccagcactttgagaggctgaggtgggcrgatcacttgaggtcaggagttcgagaccaaccttgccaacatgttgaaaccccgtctctactaaaaatacagaaattaggcgggcgtggtggtgcatgcctgtaatcccagctacttgggaggctgaggcggctgaggcaggagaatcgcttgaacccaggaggtagaggttgcagtgagccaagatggtgccactgcactacagcctgggcgacagagtaagactctgtctttaaaaaaaaaaaaaaaaaggaatttgggctgtgggctcttaatcatttctgataacagttactaccagagataactagctcctggaccgagggagagaatagtgcatttgcccaattgatgtccccctataagaaaactgatgtttttatttcagtttctaatcttatttcagtttctaatctttaggaagttgtccaatttttggggtaatttaatagcttttcccaaaaattattgaaaaaagagcaaaaagttcagaaatgccttgaagactctagctgagatggatggactgatttgaacttttagtagcagacgagacagcaggattccgaccctgagatcaggttatttgctttggagaggtggggtaacagcttttccacacaatatccctagtaggaacctctttttagcctttttaagggcaaacggcagctgataaagccactcccgtggaggcagaaacatttaagctctagccacagacaggtgataggaatgtcaacctcacctggctgtcaaccccaacaagaaaatcttggccttgttctgggcgtgcatagcttcagattcaggacacttgtcagatctaagatgggcataggttttaatttcatttaatttcaacttccaatgatacaaatggaagatgcaaagtgaaatgcttttgagagcaaagtctcccaggggtgcctccacccacccccagcgactgtgcaaaagaaggcgtttgtgggagagaagggtgactatagacgtcattgcatcatccagatcccagctgtgacctggctcagagttttccagttaaaaataaccatggcttacaattgggggaaaagagtaaactgttccgtctccatggaaactaggagtgtgtgttgaggggtggggggaagacaagctacagatttctagcacatgtggcaagatggggtggatgtagggaccagaagcttagaggccctctgatgaaagttgatacccctatttagcatccaggatgtggccagacactgctccagggctctggagacactgcatcaaggatttgtttacaacgatgtgtacatcttgggtctggtgatgaattaatttgagtcttctgacttcctgtaacagatttgctactatttggcaaagcaaagagcagatgagcaagactgtaggttagatgttgccttttaatcaatctgggaacctccactacctttccattcacattctgtttcttagcatattcagcacaccttcatttgcatattcagtagtttggttatgacacatgtagtagtttataactagaggagaagtctccaggttttttgggctggtttggaaatttactccccttcagtaagaccaggttttcttctttgttccatgagtttacgcaaagcatcattcattagcttgtttgtctttaaaggtaggtctcttaccatttctggtatacttactaccagagataactgactcctgagggaagaatagttcgtttaccctttttaaaaaggtctctttaaaattttcttttcttcaaatacattccagttgtaaacaaaatcgttttaaacactcattttatttttattttttttgagacggagtcttgctccctcgcccaggctggagtgcagtggcacaatctcggctcactgtaacctctgcctcccagattcaagcaattctcctgtctcagccttctgagtagctgggactacaggcgtctgccaccacgcccagctaatttttatatttttagtagagatggggtttcaccttgttggtcaggctggtctcgaactcctgacctcaggtgatccacccgcctcggcctcccaaagtgctgggattacaggcgttgagccaccgcgaccagccatttatttattttttgagatgcagtctcactgtgtcacccaggctggagttggagtggtgtgatctcggttcactgaaacctctgcctccctggttcaagcaattctcctgcctcaacttcccgagtagctgggattacaggtgcacaccaccacacgcagctaatttttgttatctttagtagagacaggatttcaccacgttgggtcaggctggtcgccatctcctgacctcaagtgatccacctgcttcagcctcccagagtgctaggattacaggcgcgagccacctcgccccaccaaaacacccattttaaaattaagatttacagagcaggctgggcacagtggctcatgcctgtaatcccggctactagggaggctgaggcaggagaatcgcttgaacccgggagttggaggttgcagtgagccgagatcgcgccattgcactccggcttgggcgacaagagtgaaaactccgtctcaaaaaaaaaaaaaaaaaaaaaattatagagcaaataactgaggaagaagtagggattgttgacattactggctctctacagctaaatgctttcttgtttacctgcctggtgtactgaaaagatctgagcactaatccctgttctggtatttaataataatgcaaccttgggcagtttcttaatacttatgtctaaagtgtggttggtaatacctacctgactgggttgatgaagattaaatgagccgggtgtggtggcttacgcctgtaatcccagcactttgggagtccaaggcgggtgaatcgcctgagctcaggagtttgtttgtttttttgtttttttgttattgagacggagtcttgctctgtcgcccaggctggagtgcagtggcgcgatgtctgctcactgcaagctccgcctcccgggttaacgccattctcctacctcagcctcctgaatagctgggactacaggcgcccgccaccacgcccggcttttttttttttttttttttttgtatttttagtagagacggggtttcatgttagccaggatggtctcaatatcctgacctcgtgatccgcccgcctcggcctcccaaagtgctgggattacaggcgtaagccaccgcgcccggcctgagctcaggagtttgagaccaccctgggcaacatggtgaaaccctgtctctactaaaatacaaaaaattagc

SEQ ID NO: 95401 - DNA, 45704 bp, Homo sapiens
caaagtcctcagtatatacaaaaggcccgtcacaagctggtccctacctacctgtccagctccaattcttgctgcagcatccacttccagctttgttgagccactagtagttccccaaacacaacagcgtgtttcatccctctttacatttgttgcgctgctctcctctctacttaaatacttttacctgtgttttctaattggtcaacactttatttgttaaggctatgccagctttgtcttctctataaagtcttttctaactttccacaaagcccactccatcctgccacccttactccctcacttcctacacttatactgcagtgcctagagaatttccttgctctgtttgcaaacagttctctgtcccttgcaaactcaaagctacttgagaccaaggactgtgtctagttcatttttggatccctaagccctagtccatgccagaaacactgtaaaaacaaccaccaccaagtttgttgaatgataaacaaggagtggagaaaaagttttcaaaaacatactcttaggacatagagtgatcactctattcacaacaagttatcccaaatagcttttccactgcagtgttatacagactttgtgttctcacttgctacagctgagaaaccatgtgtgtctaccagtcagaccgtactggtttttagagaaattccagttatacaaaaccatgattcagtttcctcaccacttttgttgacaatgcttttaagttgttttgtttcgttttttccccaggaggaaatggtcctttaatgagtcagctggacattgtgagggtatgaaatggtctaagtctaacagtttctatttgtcttctttcattcattcatctaaaatttatcacaaagcaccaagcaaaaaacataaggtccattccaaaattcattgaggttggcagtttcagggatctttgtctatttcatttcacttcattaattggacaagattactgaccacttactgtgaaacagactccatgagaagcaaacaatatgaagataaatgagatgtaggaacagccctcaaaaagctcaaagtctgtggacatacatggaaatatcatttcaatgctataggaaaagagctaaaatagaggtacttatgaagtggcatgagaactcgaagaaagatggactatgtcaaggaggggacattcagggtaagtttcactcaggagaggacatgtaaactgagtattgaagaatataaggagttatccatggaggaaaggaacagaggacattccaagaagaaaaaaaaaataagtacaaaggttctgagttggaagcaaagctgaaatgaggtgagaaaactaaagcttagagaggatacgtaaccacacagctggttaagtgataggactgagagttgaacccaagctgaagctgtttatggcagggagtcatatttcttgagaatgctgaagcagataaaatgttgagacccactgcttagggactgacatacaagttatagttcagactacattcagcagacaatggggaatcaagagaggtttttaagcagagaagcaacatggtccacatttgggcttcagaaatataattccagcaggtggattcttaatgttgactacaattagaatcacttgagaagctttcaaaaattacaggctagggaaccagtatagaacaattaaaccagaatttctgggggtgggaatcagttttcttttgtttgtttgttttgaggcagggtcttgctctgttgcccaggctggagtctagtggtgtgaccatggctcattgcaacctcgacctcccaggctcaattgatcttcccagctcagcctccctagtagctgggactacgggtacaccaccacacttggctaattttttaaaaattgtttggtagaaatggggtctccctatgttgcccaggctggtcttgaattcctggcctgaagcaatcctcctgccttggcctcccaaagtgctgggattataggtgtgagccactgcacttggtcacttgtttcataagttcttcagaagattctattgtgtggttagggtcaagaactattgctctagaaggaagaactgaaagatgggaaagaactactattgcttaagaacctactatgtgtgagattttgttccaaatgctttatacaataactacagaatatatatatctatatatctatatatctatctatctatatatatatatataaggattttatacatatctagtattctgacccatctcaaccattttgagccctgtgtggtgaaaagttatgctactcctaacctcaaggtagatattataatcctataatcactattttaccaacaaggaaactgaggcacagaccagtgaaataactcatttaagattatcaaattactaaatgacacaattggactcaaacattaagtatttctgatgccccaaacctacactccttccactacacaccactgcctatgagcctagcttaatcttcagaacgattcccaaagtagctatcatgatcctcattttacaaacaaagaaattagtcccagaaagattaatgtgaccaaatcacaaatcacagctaataggtgaagaggctgggagaatttaaactcagccctatttaactccaagtccatgcttatgaaggtaaataatatagtacatattcaacactcaatataattcttctttcctctgatcggaaagcagcaagttgagttattactataacacagagtattattcctagtggcttcctcttccttcttcggtcctaggtggctaaacttctattgaactatcaatctcaggtgcttttcttgttggagtggggaggacagaactctgccataaccttccatgatattaacctggaaaaagtttaaccctggccaaatctaacactatacacttcacacccttatttaagtggctgaatcatgctaatttgtctccttttacattaattgccctgaacctcaaatgggcatttattgcccagaattattaccgcctttcttcagtaagttcattttcccactgttagagaatattatttcacaccacttctcttctcagccctccaacacaccctgacaaaatttcatcccacccccatctcataattctcccttctctgttgcagcaacaatttatacctttccactgggtcatcccatataatttacaaacatctcctagcactcatatttaaaaacatcaaaaaccaaaagcaaaaccctcctttgaatccacatctggctatagctaccaccccacttctctgctatcctgctcagctaaatctttggaagagtggtttcatccatctccatttcaccaccttcaccaatcatctctattcaccaatgtccctgaaactgacattatcaggggctctagtgacctccacgttgccaaatgcagtgatcttttctgtcttcagcctctcaacagcctttgaaatagctgatcactaccttcttaaaacttctgtctggctttggtgacaccaaattcctggtcttcctacctcactgcttgctttctacttcacttgcttcttctcagactcttgttttacaggtgtctcctcctccacctcatctccaagcattagagtaccatagggtcagtcctgggtccccttctcttctccattcacacattttctctaagtgatcacattcatgctcatgcttttggagatgggtttgttaccacttacatagggattaggttctaaatcagctcataaagaaaaaaaaaatctcataaagttgaatttttttttaaattccctaagtcatccacaaagtatggtagttgccatttcatacatattaattttatatatggctatggccatatttatgtgccaaactgaagatcaacacactaatattgagtttttcctcttatgttgaaatagattaattttatttatttttgagacaaggtctcactctgtcacccaggttggagtgcagtggtgccgttacaagtcactgcagcttcaacctcccaagctcaagcaatcttcctgcctcagcctcccaagtggctgggactataggtgtgtgccactacacccagctaatgttttaattttttgtagagatggagttccgccatgttgccccggctggtttcaaacttctgagctgaagtaatctgcccaccttggcctcccaaagtgctaggattacaggtataagccactgcgcctggctgaagataaattatttttattgaacaacagatgaagtacttgggaagttcctatttttaaagagtagacacacttgggacaggaagaccacccccccacccactgtaatagggagtaaggggctgaattcatctgagaaaccgcagattcacctcccccatcacatgctcacctcacacctgctttccttgattgtaaaggactcacccatacaatttcaagtatgtttcattctctttggtcaaatacatataactgaatttttataagttaaatgcttatatggtacaactcctttgtatcatttatatgttgatgacttccaaattaatttctctagccctaatttttgttcctgagcttcagattcagaaccaactacctacttggatgtctccacttaaagtcaactaggtaggcatcttaacacgtccaaaacataacaattgattccatcctccgtatctcacttgtaccagaaagcccttcttctctcaggctttcttagctcagtaaatggcatgccatctactcagccaaaaaactaggagtgatctttgattcctccctttctctcacctctgcataaaatccgtcaggtacgtttagctctacctccaaaatacatgccagatctaatccatttatctctctcagcacagataccaacctagacaagccatgatcatcattctactttgactaacctgtttccactcttagcttttctatggtccattctccaaatagccagtgtaatcctttatgaaacatccacgcattcattcaccaaagtgcacagaaactggggatacataacgaagcaaagtatatccctgtgctcagggacttacattccagaagagggagaggcaataagcagtaaataatttcgtacagatgtaataaatataaaaaattaaatgtgataaactaaatcatgttcttctctccataaaaattttcaaatagtttcccaaggtggaagtccaaattccttactatgaccttgttacaagattctgtgagatctggcttctgtttgtccctccaaccttatctgtactactctatcagactgcaacttggctctagtcgcaccggcattctttctattccctcaaggttccaatttttttcccttcagccacgtgtttcccctatctggaatgctgttcccagatcttggacaggttgcttcctcttagctcaagttttcacttcaacagagtgaatttcactaagtcagctccctcatcattttctctatcaattacacctttttgttttatagcacttattactttacagagattttgcttatttatttgttaacaatatctgttgtccctactaaaatgtaagcttcgtaagaagaggaatcttaagatgttgtttactatagtatccctcaaagtctagaacagtgcccaacataagaggatactgataaatattttttaaaagaatttacacacgcctgtagtcccagcagtttgggagaccgagatgggaggatcacttgagcccaggagttcgaggctgcgattgcgccactgcgctccagcctgggcgacagagagagaccttgtttcaaaaaaaaaaaaaaaagataaataatgacggagtacacgataataaaatagcctcgtttctcacccagccaggctccgcctacaggagccaattatgctcacgccctcttccgacgctgcccggggcctgggaagtagtctgcgcaggcgccgtagaactgtggcgctttctgggtaaagatggacgtccacgatctctttcgccggctsggcgcgggggccaaattcgacrcgagacgcttctcggcagacgcagctcgattccaggtaytgtgcccaagggaccgagggccgagtaactgagaaggagcaggagcccgggaatgaacccgctgctgggggaggccggcgcacwtggacacccgtggcctggctctcgccacccttggggtattttgcttccttttgtgttcggcttgcctgcacggctgctcggttcaagccttttgaataagctctttaactatcctgttgtagacctagttgggcctggcacggaaaccctctttcctccctcttattcaaagcaaagttggaatcctcctttcaaaaggaactttttctccraacctagaggaaaggaatttcgaaaacagaaacaaccaaagatggagaaaacagattctcttactatagtctccccaagtttggcttggcatgcgtatagttgtactgggcgtgattctttttattgcttcaaccccatggcttaagtaaccaatgagaagagcgattaagaaatgggggctcttacctagagaagtagtgagtgatacatcgggggaggtcaattggggcccaattctggaaaatcttgaatgtctactttgttgtttggatgtgtatatgcgtgtgacatgtgtttcttctttctctaactggtgagtatgaactctggagccagattatctgggtctaaatgctaagtctgccagttactcatttttagacctacctcaagttacttaatttccgaatgccttggttttctcattcgtaatactgctatttaccttatagagttgtaaatgtgaagcaatttaatatgtataaacatgcttagaaatctgcttgacatttagtaagcatatatgtgttcattgctaatattaatttgttactattatgaggtcagagaaggtctcttcagattccatttgtccagacacctgttagctcgacagatacttggtgaaagggtagaaaagatgaggagtcattgaacagtcttgcttgaatgaaagcaatggtattctgtcagtaggtttcattttacattttttgggttttagataggaaaaaggaaatatgactttgattcttcggaggtgcttcagggactggacttttttggaaacaagaagtctgtcccaggtgtgtgtggagcatcacaaacacatcagaagccccaaaatggagagaaaaaagaagagagcctaactgaaaggaagagggagcagagcaagaaaaaaaggaagacgatgacttcaggttagtgtttgatttctgtcatgttttttctctttaatttttttcagttataaaaataatacaggcttatggctacaagtcagacaataaggtcatttgtcagctgatggcactcaggttgtttccaggtatttgtcattagaaatattgttacagcaaaggtaattttaagtaaagatatttatacataaatccttttgtacaggtactgttatttctgcagaataccatccgaaaagtagcatcatatggtgaaagggtatgtaccctttctctgaaaaatactacaaagtgacttcccaagtccttgtcagtgctgaatattattggtgttaatttttttgccaagctaatgaatgaaactttttttttttgagacagagtctcactctgtctccaggctggagtgcagtggcgcgatctcggctcactgcaacctctgcctcctgggttcaagcaattctcctgcctcagcctcctgagtagctgggactacaggtgcgtgtcaccacgcctagctaatttttgtatttttagtagagatggggtttcaccatgttggccacgatggcctggatcacttgacctcgtgatccgcccgctttggccccccaaagtgccgggattacaggcctgaaccaccgcgccctgcctgaaacaattttatattttactgataactggtgaggtcgagcatttttttttttttgagatgagtctcgctttgttgcccagtctgtggtgcagtggtgcaatctcggctcactgcaagctccgcctcctgggttcacgtcattctcctgcctcagcctcccaagtacctgggactacaggtgcctgccaccacacctggctaattttttgtatttttagtagagaccaggtttcatcgtgttagccaggatggtctcgatctcctgaccttgtgatccaccctcctccgcctccgcctccgcctcctaaagtgctgggattacaggcgtgagccaccacacctggctggtcaagcatatttttgtatgctttactggacattaatatttcaccttttgtgaattgtttcttcttactctttgcccattttgacagaggtttttgtttttttgttgtttgtttgtttgcttttgagacagagtctcgctctgttgcccaggctggagtgcaatggcatgttttccgctcactgcaacctctgcctcccaggttcaagtgattcttctgcctcaggctcctgagtagctgggacaggtgtgccccaccacgcctggctaatttttgtattttttagtagagacggggtttctccatgttggtcatgctggtcttgaactcctgacctcgtgatctgcccgcctcgacctcccaaagtgctgggattaaaggtgtgagccaccgcgcctggccttttttttttttttttttcttgtactgtactctagggctgtttatatttttttaatctataatattaagtttcctagtcatttacctttttttggtaaacacttgagttatacaatgatgaaaagtaaagttccttcctactgtttctctccagtcccctgtttctccacacgcagctactgttaatcaatttcttttgtatttttctggggacactattcctatgtatttatgcctgactcaaaaaaaaacaaatactcctcatactttgtttatatactttgattattttatatacactctgttgggaacctctgctactaccttccccttttttaaaaacaatgtatcttggaggttgtttggaatcagtaggaagtacattgccttgttcattttaacacagcattgtatcccattgtgtgtattgcataattgatttaacaagttcctgtgtgatggataattatagtttgttttcacatttttgctgttgtagttttgcagtgtcattctacttatctttgcatgtatatgtgagtatatctgtcccataaattcttagaagtggaattgcagagttaacaaatagatgtatccaccagaaacactgcatcagtaggaagtactttgccttgttcattgtaacacagcatagtagcccatcatacattgtagggatgccccatgatcaatttgacatgttactgtgtgggcatttagtacattgtttgcatgcttttgctgttaagtgctgcagtaaaagtcattcttccctggctgcaaggaagtttgataaaacctttaccaataagaaagacacgccacaaacttaggaaaaggattcaaattttgggccaccagaaatatacagctatgtactgtaaccattgtggcaacaaatgtatttaggccgtagatctatgataaatgtgtaggcatgtatcaattttttttttttttttgagactgagtctcactctgtggctggggctggagtgcagtggcgcgatcttggcacactgcaagctctgcctcctgggttcacgccattctgctgcctcagcctcccgagtagctgggactacaggtgcccgacaccacgcccagctaattttgtttttgtatttttattagagacagggtttcaccatgttagccagtatggtctcgatctcctgacctcgtgattcacccaccttgggctcccaaagtgctgggattacagatgtgagccaccacgcccagccaggcatgtatctatttttaactggaaaattgaatagcttgtgaattagtaatgatttgggtcatttagtaccaactgtctcataaagggaacaaaatttttttaaagttattctactttgcgatgccttccagcaaggtatgagacttttctctttttgtaaatttgtctcttcgtgtacgttgtacccttattgtattacattgttcccttatcatattacgttcttctgtttcttcttaatttattaaacctcatatattgaggaaattagctctatgtctgccatattatgtttacaaatatgtttccagattgtcatatgtcacttgtcttatttatttactttttggccttctgcgcattaygtttttttaaaattctaggctgggtgcagtggctcacttctgtaatcccaacactttgggaggcggaggcgggctgaccacttgaggtcgggagtttgagaccagcctggccaacatggtgaaactccgtctctactaaaaatataaaaaaattagccagatatggtggtgcacgcctgtaatcccagctatttgggaggctgaggcaggaaaatcgcttgaacccaggaggtggaggttgcagtgagctgagatcatgcctctgcattccagcctgggtgacagagcaagactctgtctcaaaaaaaaaaaaaaaagaaaaaaaacaacttccatgttttcttatttgtagtttcaatttgttatattaaaatctttgaccctgtgaaattttatttggtataaggagtgaatagggaactaaaatttttttcwgatgtctgaataattgtcttaataacataattgtcttaataccatatgttggtgttttatcttatgttgactaattgtcttaataccatatgttgataatccgtgttttctctattggactttaacgcaactttaattgtatacttattttccatatacattcaagtctgtctctggacctcttctattctgtttctgtatttgtacaccaatactagcttgttttaaatactatggccttatatgttataaaatccagtagagtggagaggcataccaatattttaggcaactcaatgttttctccctacagtgatctacagaatcattgcaatcccaattagaattctagcagaattttttttgtagaaatttctactaaagctttggctaactttcttcagacactctcataataagcagatactactctttggccttccagaaagtcaacaagtgaagtgccttgagcatccaaaaaacctgttgctgttgcctttgctcttgactggtcaacttttgctttgactggaccacttccacctcttggtagccattggtttaattgtgctttgtctttatgatcaaactggtaaaaccatgtttcatcttctgttacagttcttcaaagaaatgctttaggaccttgattccacttgtttaaaatttcttttgaaatctctgctcttgtctgcagctgatttgggagcagtggttttggcacccatcatatggaaaatttgctcaactaatttttcattaagaattggtgggaagaaggctgggcgtggtggctcatgcttgtaatcccagcactttgggatgccgaggtgggtggatcacctgaggttaggagttcgaaaccagcctggccaacatggtgaaatcccgtctctactaaaaatacaaaattagccgggcgtggtggcgcatgcctataatctcagctacctgggaggctgaggcaggagaatcgcttgaacctgggaggcagaggttgcagtgagccgagatcacgccattgcactccagcctgggcaacaagagtgaaactcggtctcaaaaacaaacaacaaaacaaagaattggtagggaggccaggagcagtggctcacctataatgccagtgctttgggaagctgaggtaggaggatcagttgaggccaggaattttgagaccagcttgggcaacatagcaagactccatctatacaaaaaatagggccaggagcagtggctcatgcctataatcccagtactttgggaggctgaggtgggtggatcacctgaggttaggagttcgaaaccagcctggccaacatggtgaaaccccgtctctactaaaaatacaaaattagccggacgtggtggcgcatgcctgtaatctcacctacctgggaggctaaggcaggagaatcacttgaacctgggaggcggaggttgcagtgagccgaagccgagatcacaccactgcactccagcctgggtgacacagtaagactccaaaaagaaaaaaaaaaattagctgcacgtggtagcacatgtctgtagtcccagctacttgggaggctgagacaggaggattgctttagcccaagagtgtgaggttacagtgagctgtgatcatgcctgtatactctagcctggctgacagaacaaaaccctatcttgaaaaaaatatatatgtggtgtaagccaaaccatatatatatatttgggattacaagcatgagcttgtaattggttatatacactcagatgtctgtggtgttggctattgtttctgctgttaatcaacagtcctcttcaattagggcatgaacaagatgaattttttccttataaattgatgcgggtggtctgctgctacagacttccatcttcaatattatcttgttccttcttaaaacaagttatccatttgtaaacaggtgatttctttgtccccataaacttttcataaagcatcagtgatttcactattcttctaccgaagcttcactgtaaatttggagtttgttcttgcttcagttttaagcagaattcatgttgctgttttcaaactgctgtcttatccttcttagtgtctcagactagatccagttcacccgtattgtaacaagttggtatgagtttattttggtgcaaaaaattttgaaatttttgcatagtttcttcataatacggattttccatgaactttttgaagacccccttatatatagatcagtgaaacagaacagctagtccacaaacccatgcatatatggtcaattagttctcaacagaggtaataaggtaattcagcggggaaaagaaagtcttttcgacaaacggactggatccatggggaaaaaagtgaacatcaaacctaactttatattgtaagcaaaaattaacttcaaatgactcagactgaagttttaaaactataaaagttccagaagaaaacaggaaaaaaatctttgtggccttgagatatgtcaaggttccttagcacaacaacaacaaaattctttaaaaagaaaaaattgatatattggacttatcgaaactaaaaattttcattcttcaaaagataacattaagaaaatgaaaaggcaagccacagatgggaaaatatttgcaaaatgtatatcaaaggacttgtatctactcactaaagaagataatacacatggtgataagcacataaaagatactcaacatcagtagccatcaggcaaattaaaaccacaatacagtactactacatacccattagaatggctaaaaataaaaaagagtgaccataccaagtatgggcaaggatgtacagaaacaagctctcacagtgttgatggtaaaatggtacaaccactttggaaaatagtttgggactttttttttaagttaaacatatatttaccatattacccagctattccacttggaatatttacctaagagacaggaaaatatacatcttcaggaagacttgtacacaaattttcatagcaacattgcttatagccaaaagctggaaatgacccaaatgtccctcawcaggtgaatgatgaactgtacatccattacaatggaatactacctagtaataaaacggtaagttgttgatacatggtgcaacataggtgaatttcaaaacaactatcttgagtgaaagaagccagacaaaaattagtacatatgacatgattccgtttatataaaattccagaaaaggcaaactagtctatagtggcagaaattagattggtggttgcctatgcatggagtgatggattataaggtgtcatgaggaaatctggagaagtgatagaaataaccttgaatgtggtgatagttttttgggtgtgtagatatgtcaaaactcagcaaattagatactttaaatatatgcagattattgtatatatttatgcctcagtgaagttgaaaaaattaagaaattagaactagtctttgctagttttagaactaatttagaaattagaactagtctttgctttgtagaactagtctttgcttgttaaacttaaaatgtttttaggttaggccaggcgcggtggctcacacctgtaatcccaaaactttgggaggctgaggcgggcggatcacgaggtcaggagtttgagaccagcctggccaacgtggtgaaaccccgtctctactaaaaatacaaaaattagctggacatggtggcatgcctctgtagtcccagctactcgggaggctgataatcacctgggagacagaggttgcagtgagccaagatcatgccactgcactccagcctgggtgacagagcaagactccatctcaaaaaaaaaaaaaaatttaggttagtcttacatatttattctcccatacaaactgttaagtcagctgatctagtcaccaaaacaattctgccattacttttaattggctagtgttcttcatagattgagggagaaaggctatctttataatactgagtagttcaaagtattgtgttatgttcattgctatttatttatttagagacagagtcttgctctgttgccgaggctggagtgcagtggcacaatcttggctcactgcaacctccacctcctggcttcaggtgattctcctgcctcagcctcctgagtaactaggattacaggcacctgccatcatgcctggctaatttgtgtatttttgtagggacagggtttcatcatgttgtccaggctggtcttaaactcctgacctcaggtgatccacccaccttggcctcccaaagtgctgggattacaggcatgagccaccgcacctggccgttcattgctattttaagtgagatctttcattatatttattttttagttgttggttgtttacatatagagaacgtggctgccttattgaaatttctcatttggctgggcacggtggctcacgcctgtaatcccagcactgtgagaggccgaggcgggcggatcacttgaggtcaggtgtttgagaccagcctggccaagatggtgaaacctcgtctctactaaaaatacaaaacaaaattagccgggcatggtggcggattcctgtaatcccagctacttgggaggctgaggcagagaatttcttgaaccagggaggcagcagttgcagtgagccgagatcgcaccactgcacttcagcctgggcgacagagcaagactctgtctcaaacaaaaaaaaaaaaaaaaaaaggaaagaaatttatcattgtttaagttgcttttcaattaatcccctgttgttttcaagtatactaagtacactgctgaaacagccaacaaagggaagatagtaagcttcagaactctgatcataccaacacagaacttgccttttcatttccatttttatacatcctattactttctcttatctagttggatcagctgtactttttccttttttagtgtgaaggtatggctttcttgctacacatacatccaagattaaaaccttttttctttttttttttttttgagacaaggtttttctctgttacccaggctggaatgcagtggcatgatcacagctgtctgcagcctcaacctcccargctcaaatgatcctccccactcagcctcctaagtagctgggactacaggcttgcaccaccacccacccttgactaatttttaatttttttttgaagagacgggtcctcactatgttgcctagactgttaaaatcttttactttttaaaaatatattttagaaattgcttcccaagaagaaggtgctactatacagtggatgtcatctgtagaagcaaagattgaagacaaaaaagttcagagagaaagtaaactaacttccggaaagttggagaatctcagaaaagaaaaggttagaaaaatattttggggccaaaagtatatatattttctgacctagtgacttattcgctggatttgggttattctgttgttaatgtgaatatagttttgttaagatagaaggttaattacattcatttagattttactttaatgaaaacttaaagcaaagtaggcatttgtgctgtgggtgaacattttaaagtttaaattgctgatacatatataaaattcttgacctgctcaagtttcaagattgatagtatgtttagaattaaatttttaaaatttcgtaactgctttcgataaacaaacaaaatttggctccctttcttctctgttgagctcaccggtttagaaggatttcctctgacacagattagagggttagaattcttaagaaaggtattttatgacttgggaataagaggagtaggatatggaagaaacaacaaatataccttttttgtgtctgctgtacacctgccgtattcctgatggagaggtgtattcagctcacttcagggattactatggcaatgcttcagtaacccagaaaccagaatttggctgtctctggtccagagaatggggaaacaaaccaaatcaacactactagactccactttttggcactcagttttaataatcagagttttagggtaaatcatcaaaaagcaatgatacttgtatgttaaccaccatattaaaatagtagatgggttcaatgcctgccttctaagaagtttatttaaggttagaagttatgactatgacaataacacattaatatgaagaaagcatagacattttatgaaggttttctatgaaagggcatgaaatgtacctaatatctgtgatgttttgattcttggatttaaccaaaaagtttcatatgctgctaaaggttatcccagaaactgttaatgttgctttataacatctgagaatgtatttatttggccatatccatggtggcctctttacttcacttttcagataaacttcttgcggaataaacacaaaattcacgtccaaggaaccgatcttcctgacccaattgctrcatttcagcaacttgaccaggaatataaaatcaattctcgactacttcagaacattctagatgcaggtttccaaatgcctacgccaatccaaatgcaagccatcccagttatgctgcatgtgagtatgaagatctagaatgcctgtaacattccttcctctgtgtgtttgctcattctcttccctctcttcttgaactctttctttccaccttatctcccctgttaaaatccttcacttccttttaaggttcatcaaatgcctgtgcctccataaaagttgtcttgatcactccatctagatgtgatcttcttccttttctagtaccctttcccccacactgcagttcttccatggtatttggtgtgttcttttccttgcaacatttattttacattttaaactactttgtattcgcaccaatcatatttatctttttcattttactagtgtgtaaccccttggagaatggggattatgttctattcattcatacattcattatttagtttataatgcccaggaactactccagaaatacaaatgctttctaaagttcttgtacataaactgacttatttttccgaatactttttattattaaagtatactttacatacaataaaatgcatagatttttaagtgcccagtttagtgagtttcagcaatgcatgccctgtgtaaccactattccagtgaagatagagaacatatgtattaccccagacaattttcttgtgccctttccattcagtcctcaccctgcccctgctcagaggcaactgctattctgatttctactgctgtatattccttttgcctcttctagagttttatatgagtggaatcacacattaatcttttatttctggtttctttcactttgcgtaatgctttgagattcttctgtattacatagagcawtagtttgttaccaagtagtattatgttgtatgaatataccacaatttgttatccagtcacttgttgatagaggtatggattaacttaggttttcggacgttaagtttttctgaggtttgtttctgtagcaataagagttgggttttttccccatgtaaccgagatggccttcagttctggtttccaaaggatataagataccttttcatctctatactagtccttttcattttctttgagagatgaaatgagaatacattcatacatttaaatgatgctgttgacttatgttatagtaaatttgcttttaatttttgtttaagattgtttctgtcatggctttagcttaaagcttaaaaaatcacagtgggccaggtgcggtggctcacgcctctaatcccagcactttgggagaccgaggcgggcagataacgaggtcaggagttcaagaccagcctggccaatatggtgaaaccctgtctctactaaaaatacaaaaactagctgggcatggtggcgtgtgcctgtaatcccagctactcgggaggccaaggcagaagaaccacttgaacccgggaggcggaggttgcagtgagccgagatctcgccactgcactccagcctgggtgacagagtgagactctgtgtcaaaaaaaaaaaaaaaaaaacacagtgagtttttgaaaattgtctcctgtaaattactctgccctcaggtcattgccattttttatttcttcagccattttgttgttcaataaaaccttccctagtgattgaacaatacagataccaggacaaaaagttggttttataattttattttgacaatagtttagtggaaaagaaaaattgaaataatggatataacttaggttatggattatctttgggttttagttacccgtattctttacactcattcaaagggaatttaagggcaatgctcagaaactttgttggggtgatggtggcatggatggatgatgttaggaaagcagatatgacttgaaagattagattcattatgtaaaattgtatttgtttttttctatggctggtagcgttatttgaccaggstctgaaaaatttatgtactttctttgtagtatttaatataccctatgtttttagggtcgggaacttctggcttctgctccaactggatctggaaaaacattagcttttagcattcctattttaatgcagctgaaacaacccgcaaataaaggcttcagagccctgattatatcaccaacacgagaacttgccagccaggtatgacttgtagcttttgaagagtatgcgattggtttttacttcagtgatctttcttatttgaaggtaataaaaagatcttaaaaagcaaggcccacgtcttctgtcatggtcaagtatcctctacacagcacagtgctccggatcttactccatgtgggcaagtcttttaagtctttctgtaagtttctaaaacacagtgattttaatatttacacttctttggtaaatgctttaaggtctttgaagttgaaaggctaattaaatatagccctgcttggacatttatttttctcatctaaaaaaaatgaatactcatcttagttttggtttttatttatttatttgtttgttttttagccacagattcttactctgttacccaggctggcatgcagtggtgtgatcatggcttactgcaacctcgaactcctggcctcaagagatctccctcttcagcctcttgagtaactgggactacaggcacatgccactgcgcctggttaatttttttctttttgtagaaacaaggtctccctatgttacccaggctggtcttgaactcctgggttcaagtgatcctcccaccttggcctgccaaagtacagggcttacaggcatgagtcattatgcctgactcatctcagtttgttttttttagaagggaaaagtatacagtgatctgttctaccctcccaatgtgcttaatatgaaacacatatcaagtatgaaatagtcttgtaatagtactatgtgtgtgtgtgtgtgtgtgtgtgtgtgtgtgtgtgtgtgtgtattttttcttgggacagtcatgctctgtggaccaggctggagtgcagcggcgccatctcggctcactgcaacctctgcctcccaggttcaagtgattctcctgcctcagcctcccaagtaactgagattacaggtgcgcaccatcacacctggctaattgtttttgtgtttttagtagagatggggttttaccacgttggccaggctggtctggaactcctggcctcaagtgatccacccaccttggcctcccaaagcgctgggattacaggtgtgagcccccacaccccggccagtagtactgtattctgaaaacaatacaaaataggttagttttatctctgggaactagtttattccacctgaagaaattattgaatcttattaggcattgaartttcaaaatgctgagatttcaggttaatctacagattgttatgagtttaatttcagatattcatgggttggtaatagatttatttcattaatcatgtaaaagagtatacatcttgtccaagtatgttagcagctaatgtttttaatctttttttttttagattcacagagagttaataaaaatttctgagggaacaggattcagratacacatgatccacaaagcagcagtggcagccaagaaatttggacctaaatcatctaaaaagtttggtaaggaattcatacatgggatgtagatagagcatgtaaggaatctggaaattataaatatcctaattgctatgtaagtgttgttaaagtatagtcatgtatgtataaaatttgaattttagaagaactaaagcgatccccttctcactctactgagaagttatacataaatatataccagtagttctcaaatagagacaatcttgccccccacctttcaccacagggacatttggcaataatttggagacatttgtagttgtcacaactggggagaagtgctactagcctgtagttactagcctatagccaaggatgttgttaaacattctgcggtgcacaggacagtcccctgcaacgaacacttagtggcccaaagtggtaacagtgctgaggctaaaaaattctgatttataccattgatttttaatctgccatggaaatactctggcagacaggaatggcatgcatagctgggtgcagtggctcacacctgtaatcttctccatacctatagctatggagaagctgaggtgggaggattgcttgaggccaggagtttgggaccagccttggcaacatagcgagactccatctctaaaagaaattttttaaataaaaaaaaattagccaggcatggtggtgcatgcctgtagtcctagctacttgggagtctgaggtgggaagatcacttgagcgcaggagttcaaggctgccatgagctatgattgcaccactgtactccagcctgagcaacagagtgagactccatcttaaaaaaaacaaaaagaacggcttacatcctcacccttatatcagccagagaatctgctttcattttttttttttttctttttgttttttgacattgtccacttggagataagctttcatctgttttgttttgtttaaatcttgggcctctgcataaaattccatgtaaaaaaaatgattttcctgggggaaaaaaagatttgaaaattaaattgttctttcctcttagaaattgagaagaggctgggtattgtggctcatgcctgtaatccggcattttgggaggctgaggcagggagattgcttgagcccaggaattcgagaccagcctggacagcatagggagaccctgtttctacaaaaataaaagtaaaaaaaaaatttaccatctctactaaaaatacaaaaaattagccgggcgtggtggcgggcgcctgtagtcccagctagtggtagtcccagctactcgggagtgagaatggcgtgaacccgggaggcagagcttgcagtgagccgaggttgtgccactgcactccagcctgggcgacagagctagactgtctcaaaaaaataatagtaataaataaaaattagccaggtgcagtggcatgtgcctgtagtcccagctactcagaatgctgatgccagaagatctcttgagcccaagagtttgaagttgcatgcagtgagctatgatcacacattgtactccatccaggctgggtgacagagcaagaccctgtctcaaaaagaaagagaaagctgctcagatatattaaaaggaaagtagggatataatagttttgtgttgttggctatgactacttcccacttcaggttattaactgaagttgaggaggcttaattcctagttcaagagggataaatcctgtttttgcaatttctaccatttgtttttcctatagatattcttgtgactactccaaatcgactaatctatttattaaagcaagatccccccggaatcgacctagcaaggtatagatgatattttcatgtctttcgtgtgtatttttaatttagttaattatattttgtcctctattgcttgtattttttgtctttggagcttgctgtttgccaccttcagtcagtgttggcactgagaataatggttttttaaaaaaattcatagaaaagaaatggaacctcrtatctttgaggctattggaataggtacattaagctatgtttatcttccttttacctttttcctgctgtgttagtccgttttcatgctgctctaaacagctacctgagactgggtaatttataaagaacggaaggtttaattgacccacaagtcagggcatgactggggaggccttaggaaacttacggtcatggcagaaggggaagcaagacatatcttacatggtggcagatggggaagagagagagagagtgcccccatgagccggtcacctcccaccaggtccctccctcaacacgtgaggattacaattcgagatgagatttgggtggggatacacagccaaaccatgacacctgcttgtgtttcttattttttttttttggtatgataaagtggatctgagaagcagcattatagtttgacttcctcatgtgtccactgtccccacagtttagtgaagtgtcttggatctttcagttcagtatccacaagttgttttgttatttcttagtgttgagtggcttgtagtagacgaatcagataaactgtttgaagatggcaaaactgggttcagagaccagctggcttccattttcctggcctgcacatcccacaaggtccgaagagctatgttcagtgcaacttttgcatatgatgttgaacagtggtgcaaactcaacctggacaatgtcatcagtgtgtccattggagcaaggtatttaattgtttctcaacattatcacactgattttttttttaaatacaagtcttttttaaagactgaaggagataggtttcttggcctgagactagcaagggagagagttttactgattgaaatgtgttcttttaagccaagattgtttaaggattttctattttagagtaatctaaaagaaggtttttacattgtcatattaacattcctgtcatcatgcttttaggtgtttttttccatccacagagtataacatgagctctgtggccacctagaagatttagtttctttgatggcttaaataagtggaccacagaggaagaacctgatgtcactgagccacttgatatatatttccttttaaaaaatattttggggagcattttatgctaaataaatgctcagtgacagaaaaaagtttaaagaaattatgatactgctacctgatggattattatgtaacccctgaaatgatgtaggaagactgtagctatatgaaaaagtgtttgtagtaccatattaagtgaaaaagtagccaatggaacagtaaagaataccctattttaaacctaaaattcctgtttataagaagaaagcaaggttgggtacggtgcctcacacctgtaatcacagcactttgggaggcagaggcaggtagatcgcctgaggtcaggagttcgagaccagcctgaccaacatggcgaaaccccatctcttccaaaaatacaaaaatgggtgtgtgcctgtaatcccagctacttgggaggctgaggcaggagtattgcttgagcttgggaggtggaggttgcagtgggccaagatcgccccactgcactccagcctgggtgacagagtgagattccatcttgaaaaacaaaaaaaacaggaaagcagaatgaattcaccataaacataatttcaatgggaaattaaacatatttaaatatggttaatgtatatttaaatatatttagataaaaataattaaatgggaaaaatatttatgatacaacacagtacattgtaacatcttacagagtattaataaagtcttaatatatctcacccctaactgttggtctataaataaatctttgctaatcattatgaaaaatgtttaaccatgtgtaataacaaccttaaaaatatttttattattttactcaataattttacagttagaaattttttataactaatcaaatacctgaaaatttatgactgaaacataagttttaatgggtggcatttcaagatatttttaaaattagaagaaagcatttaaaaataacaattttgtcttcaagttaaagtataaataattcagtacttattaatattgacagtggaaaaattgattttgttggagttgtgtgtaaattttttcatttatttagagttcaggggaaaaagcaaaaattaactcttacaaactacaaggtatattttcttcccaggaattctgcagtagaaactgtagaacaagagcttctctttgttggatctgagaccggaaaacttctggccgtgagagaacttgttaaaaaggtatatttgtattaccttcttgaattttggtaaagtttgccaagtcttatattactagtgggaggctattacagtggtagcactgtatcatcatcatcttggctcgtattcagtaatccattggtaaattgataagaaagtacattgtgctaactatatgatcatcctgcatcgtatttagtaatctaggagtaaatggttaagaagcgtgttgtcccagctcttatcccaagggacagaagcttgcctctcagaatatggtaagttgtcttttcgcagctcagattaggctaggaaacgatctatctgatgccctgagaatctcatttttccacatttgcctgctccatccctcctctggtttcttatagaagaactggggtgttgtaggacactgagtggggttttctgtttttatcctttcagtaagaactgagtagaarccatagttaaaaagtactgaggtgtcagcactggacaatacaagaaatctcctaagccctgcccctggaatttagtcttgtttagagggataaaataaatacacttgtgtaagatagtctctgataaagtgtcataaagggctaaagagtacttttttaagcatccatatagtcataatggggccaccagggtgagccaaattggttgagccttatagaagaaatgctactaaactgatccttgaaggattttcaggataaaacgtggaggggaagagcattgacggctgggggagcagcttgagtaaacccttaagaggtggaagtgaacaccatgtgtttgaagactaatgaagcagttacctgtctaaggcaaacagtttatggtatggaattaaagaaaaccaggtgggacaggaaagctggggtcaggatatttttgaagaatgtgactacataattttgtttttgtttttgagatggagtctcgctctttcacccaggctggagtgcggtggcgtcatcttggctcactgcaagctctgcctcctgggttcacgccattctcctacctcagtctcccgagtacctgggactacaggtgcctgccaccatgcccggctaattgtgactacataatttttaaggaaaattagttaaacagtaatatgtaaggtgaattgtaatgggaaagatggaaagtaaggaaaccaatcaggcttttaaactggggtaggcagagatgaggaagaaataagggcagcagccttagtggtgagacattaagtatagttggaggctagaagggaaaagtttgcaagtacctggtgactatagaatggtttgctttagtggttaagaccatggactcaggagccaggctacttgggtagttctagctccaccactatagctttrcacaacttaacctctcttccacattttccttgtctgtaaaatgggataataatatctacctcatagagctgttttactattaattcattagtacaagcatagtacttattatataatagtgcttggcacatagtaaatgctaaatgtattttattaatattcttaagagaatcatttggtactaggaaatttaaggttttccaggatattccttggagattatacaccagaggttttcagccatgtttgagctttgggaggtctgcaaaccctctaaaattatacgtaagatttttgtgtgaatgagtagttacttattagaaagtttcttagctttcattagattccaaaagagatgtttaagccatcataaaaaggctaagaaactcggccaggcgtggtggctcaccggtgtaatcccagcactttgggaggccgaagcgggcggatcatcaggtcagcagttcgagaccagcctgaccaacatggtgaaaccccatctctactaaaaatacaaaaaagttagccaggcgtggtggtgcacacctgtaatcccagctactcaggaggctgaggcaggagaatcgcttgaacctgggaggcagaggttgcagtgagccaagattgcaccactgtattccagcctgggcaacatagcaagactctgtctcaaaaaaaaaaagaaaaaaaaaggctaagaaactctaatatgaacagttaaaaagatagctggtttgagagagagtaagggtttgatagtgtaaatgtaaaaataatttgtttagattcacagacatcagatgtagtaaaaaaaaaaatgtttacttagagatagtagtagagattcaactcagtaaaataaagattatattgaaagaactgagaaccaaggactaagcttggggagagcaccagagttaggataaataatgagttaatgagggatgaagtaccacctgtggggttcagtgtacaccattggggtgatgggtacactaaaagcccagatttccccagtatgcaatatatctgtgtaacacaaatgcacctgtacccctaaatccataagaataaaaaaattaatttcaccccaaaaaacccaatgaattaaaaagataattatttcattttaagcagaataaaaaaaggttttgaggcacagaagtcaagagatgattatttcaaagttgaggcatctgttaccatagtggggtgtagggggattgattagacaacattattggaattagcaagatggagaatatatttcaagttgagtggaaataaccaattggagagaatggtgacgaagatggaggcagaattagaccactagcccaagaaatttggccaagaaagtacactaaattgaattgggttcttaaaagctacaatcaaattatgaaataatgaccaattgtattcttgattgwgttatgtatgccaatttttgtcttcttttagggtttcaatccacctgttcttgtttttgttcagtccattgaaagggctaaagaactttttcatgagctcatatatgaaggtattaatgtggatgttattcatgcagagagaacacaacaacaggtaaagtcaaatatatactttgaaactcagaagaactacttgattttaaactattgacattaaatttatgaagtacctgttttcattctaaaacaatttaatatatattctgttaaccagagagataacacagtccacagtttcagagcaggaaaaayctgggttctgatttgtacagccttgctagcaagagggattgattttaaaggtgtgaacttggtgatcaactatgactttccaactagctcagtggaatatatccacaggataggtgagttgtcttttttttccttcccctctgtcacccactgatctgtcttaggacccctgctattccctgcacatatgctcacttcttagtgctgtgaaaatccagtgacttttataaatgaattttgagagcctccttccccccaaaatgtgttttttaatggtctaatttttcttaggtcgaactggaagagcagggaataagggaaaagcaattacatttttcactgaggatgataagccattattaagaaggtaaattagaaaaaataacctagtgttattggcaaaattgcttcattattcttatatgtatattcaattaagagataattacaaaatggctatgtcccaaattctactgataatggtgttagttgaccaaattttagccatgggaaaggaaaaatgatcaaaaggccttgtttttgcccttccgttattagaatttggaaatacatattcaaaatggaatgttcattgtaagtttcagactcaggactctttcaatggttgatgttagattttaatgtagaagatgagtttcctgcattttgactgcctatagtaatttttggttgatgatgattaacacttcacatttctagctaatctagttttggccaaaggaggtttgtacttagatctgtttatcagttttggtaaatattttggttgtgctttctgagctttggctctgccacctgtcagcctttatatcgctttaagcagattcaaatgtgcgtgtgtagaggggtatattccaacaacctagatccaccataggcctcagcaactccaagcatgtgaatcccatgacccaaatattagtgtaaaactatgcacctcagttttccatctgtgaaatgaggacagtgatagtatttacaacacaggcttgttgtgaagagtgaagaagttactatacacaaaaaacttggcaacggtgccaaccccatagtaggcactttcacttaatgaatttaagcttgactctggcttcagtcagtgcttcctccaagattgagtttaccagttttgtagggcttgataaatgttgaaatagctgctatctatagttattcatcagtgcattaatttcagcccagtggatagttctctctgtaatccaatgtgcttacatcaggtaataattgataatatatcagaacactttgtggattactttgtgtagttttagttccctgtaaggttgtgcagagggtttacattcataaacatcaatttagcaaagatacaagtttatgtttatgggtttctttttcagcgttgctaatgttatacagcaggctgggtgtcctgtaccagaatacataaaaggttttcagaaactactaaggtacaatcttgaatttacctgtatctttgtctgtctctttgtatatacattcttttttttttttttcttgctctgttgcccagactgcagtgcagtggcatgatcacagctcactgtagtcttgatctcctaggctcaagtgatcctcctgcctcagtcccctaagtagctgagactacaggcatgtactaccatgcctggctataatattttttagatttttggggagtagaaatggggtcttgctgtgttaaccaggctagtcttgaactcctggcctcaagtgatcttgctatcttatatccttgcctcccgaagtactaggattacaggcttgtgtcactgtgcccagtccaaaactgcttgtgaatattacatgttatttccttgccagttttttatcctttatttatttatttttttccttgagatgaagtctcagctcattgcaacctctgcctcccaggtttaagcagttctcctgcttcagcctctcaagtggctggaattacaggtgtgcgccaccatgcccagctaatctttgtatttttagtagagatggggtttcaccatgttggccaggctggtctcaaactcctgacctcaagtgatctgcccacctgggcctcccaaagtgctgggattataggcatgagctactgcacctaggcttatccttgaaatgtgaagtattcagattcttttaaaagtattcagtataagtaaaatatgctgagaattattttagttcataaagctggtaaaaaacttaattgatcaaaatcaaactctgatgcttgttgacacaggatataaggttggcacaggacatattttaatcacagtcagtagctttctaaaaggttgattgaatttatcatccctttgagttagctctgtaaatcctattaggcgatctcgtttattaaagtagttacagccccaccttaaaccagtaaatggttttgaaaaatgaattttgtggctgagcgtggtagctcacgcctgtaatcccagcactttgggaggccgaggcgggcgggacctgaggtcgggagtttgagaccagcctgaccaacatggagaaaccccatctctacttaaaatacaaaaaaaaatttagccgggcgtggtggtgtatgtctgtaatcacagctacttgggaagctgaggcaggagaatcgcctgaacccaggaggcagaggttgcagtgagccgagattgtgccattgcactccagcctgggcaacaagagcaaaactccgtctcaaaggaaaaaaaaaaaatgaattttgtgatcaaggatcaaaactaattttagctttaactcttctaattgaagttgcacttaattcttttccttttttactttgtaactttcagcaaacaaaagaaaaagatgattaagaaaccattggaaagggagagcattagtacaactccaaaatgtttcttagaaaaagctaaggataaacagtaagtatgtggtaagaaaaatggctgtttgacaccatcataaagttatagtaggcattatttttccttaggtaaatttttagaagtagaattgatactacagtctgttataaaacgttataaaaataatatattttaggttgcctataattgggaaatttgtttgtttgtttttttgagacagtgttttgcactgtcgcccaggctggagtgcagtggcgtgatctcagctcactgcaacctctgcctcccgggttcaagccattctactgcttcatcatcccaaatagctgggattacaggctcccgccaccacacccagctattttttttttgtatttttattagacacggagtttcaccatgttggccaggctgagctcaggtgatccacctgccttagccttccaaagtgctgggattacaggcgtgagccaccatgcccagccaggaatttgttttaatattggaatttttctgtaccaatatgttgatgatctgtttttttccgtcttggaaaatattatttcaattctctataaattcgaattatactgcccaccttctctacacagcccacattaggacatgctactaaggccaatagttaggaccattgacttacatggatctagtcttctttgaagctccatattctgggcaggatttcaatatgatctcaggcttacgcagatgcacattgtaacacctgtaagaagtattacttaggtaaatttgtgctagcttagctgagttttatgagaatattaaagtatagttttttagcattcatacaggctaccttattttgcccagtaatactaggaagctttatattttgaaaaggataggccaagatattttgaacagttatactctatccactatttaaggaaaatggcactcttcacattctaccagaaccaggttattatatactctaatagaattgttcaagtctataatttattgtttttttctcccctgagagtgctatcaatggcctaggatattaccattgtgaaatatgctaatgcttatatccagttatctcacatctgttctatagaagtcattagaaaaaaactgtttccatcaaccagtaggcatttaccaagttgttctgcaaggtacttggtggtggtagtgtatacaaatgaatataaaatgagatcctttcctgaagttaggtaaagaagattcgtgtacatgacagaaaattagagactggcttttaaataaaataggagataagagaaagatgattgtgaattggtgtggttacagaagtttcaacaaagtagaactatctttaaggataggtaaaatttaggcatggagaagggaacaagatgaatagaggcatgaaaattagagtgtgctttgtaaataagtgaacaagagttttcacatgttggtattgtctatgaggaataaaagtcggttcaaatatacagtgtatatatagtgtctcaaaattttatcatacttttaataacttgggaaggataagtgctacaaactgaaaaaagtatatttgaatagtcaatcaatcaataagtacaaattccatttgtacttattcagttttgggaatgcttcacaatcacatttactttttttttttttgagatggagtcttgctctgccaccctgtcrcccaggctggagtgcagtgtcgcaatctcggctcactgcaacctccacctcccaggttcaagtgattctcgtgcctcagcctcctgggtagctgggattacaggcacccgccaccatgcctggctaatttttttgtatttttactagagatggggtttcaccatgttggccaagatggtctcgaactctcaaactcctggcctcatgtgatctcccacctcggcctcccaaagtgctgggattacaagtgtgagccactgcacctggccaacatttttaaattttaattttctgtcgcaacagtttctgggtgacacttagaccagtggattggtagcgaaccttgttatgcttggccactttggtcacctaatctgtcttaatagacttgttggtaggagaggagtgggtcacatcagaactgttgtgtatgtgttactctttggatggtcttaaagccaagataacaaatgcagtcctttcaggcactgagcagcaactgatgaaagtttttacaaaggtcaaaaatcaactagaacataagatggtggctatgttgaattttaataagatacatcagtattttaaataattatactttaaatgctgatttgtttttgttttgagatggaatctctgttgctaggcgggagtgcagtggcacgatctcggctcactgcaaccttcacctcccgggttcaagtgattctcctgcctcagcctcttgagtagctgggattacaggcacacaccaccatgcccagctaatttttgtatttttagtagagacggggtttcaccatgttggccagggtggtcttgatctcctggccttgtgatccgcccgcctcggcctcccaaagtgctaaggcatgacccaccgcgcccagtctaaatgctgatttttataagtttatagcatttatacttctggggttttttgtttgttttttgagacagggtctcaatctgtcacccagactggagtgcagtggcacaatcagggctcactgcagcctcgacctcctgggctcaagcagtcctcccatctcagccccgtgagaagctaggactacaggcttatgccaccgtgcctggctaatattgttttatttttagtagagatggggttttgccatattgcccaggctggtctcaaactcctggactcaagcgatctgcctacctctgcctcccaacatggtgggattacaggcatgagccactgcacctgccttcttctgaggttattaaaacttaatttgtactaagacttcgaagacacttgatataaatcttgtcatatcagccccctgcttaaggtgctttggttgtgtctccattttcttcatatgtaaaggccatactacttaacatagcatacaagcaagacccatcatgatccaactctggcttacctctatgctatagatgtttccttaatgatcccacccatgcctataggctcagctcatatttctgtgctgatcgctcttaaggtcgttatcttcagccccaacttccccattgagctacaaacctgaatccttgctgcctagtggacctcacttcaggcatcacaaactcagccccatgcagtgagtcggggaggaactggatttggagccagaagaactggttctaatatctacttccctgtgtagagttgggatttgggattatatgagttaatatacaccaaagaactttgtattactataataatagtttgcaaacattgattattttctcaaaacttttttcctttgtctgttaccacttagttaatgacattcaaccttcactaggctataggatcagactgataggattcgtgtctaacatggattaccagtgagtgatgactggcaagtcaaccactctgtgcctcattttcctcatctgtaaacggaggataataatacaatactcctcataagttgttaggaaaattacccgagttaatacatgtaaagcacttagtaaccgtttctagcatgcagtaagcactgaatcattgtgaactcattaggtcaggatccgaacctatgtgtcataccatgtagtaatgtagtttactgtgatggttctgcctcacttaggtgattgtgattttctaaagggcagagaccatgtctaatgcatctttgtgttcctagtgcctcattatttgatacacagtaggtttcagtaaatgtttattaaactggtggtagggttatggaaagtaaatatacgtagaattttttattcamtttttcttactttgctctttacaggaaaaaggtcactggtcagaacagcaagaagaaagtagctcttgaagacaaaagttaaaaacagactttaaaaatactgtcccagaaatgtaattttatgatcccagcatgaatgttattttcatggaatacttgaagtcttayagtcacctgtaccaaacatttgaaatcaactacaagtacatgggactggtgataaatgatcctaaactatcaagtcagtttcaatttgtaggtgccttttttttttcctgtagagatgagggtcttgccatgttgtccaggctggtcttgaactcctgacctcacacaatcctcctgccttagcctcctgagtaactgagattacaggcacaagctgctgcacscagctctgtaggtgacttttaaatgattatacaatggaaataacattcattgacatttctgtggtttgaatccagagagatacttcttatagaaaaacaaatgtttatgctaaaaataacaccaaaatgtggtgaactcttaaggacttttcccttcaagtgtgaaggaaggtgtgatgaatgctgtggagaggcatctggaacagaaattcaaaataaagccttgacattaaataccccttccactgctcactttgtggatggtagcatgagctgtctaccaagaagaaacctgctgctctcttaattttaatatttcctaatttgttgatggccttttgtgttgtgaaccacaacaaagagaggcctcttttgtggctggttattccagttccctgggattttaaattctttggtctattaagtatccttgtattggatacgtaataccttagtgctgtcataatgttgtacaagatcatgatcagcttctccctttcttcattttctgtgatttaaccatgttctttcctgtctctttccatttaagatattttatttgaatactgataaacattttatcctgataaggaagaatgttcttgttacttgatatacctctgtcttcattctcttacagcttatctttccttaggttgatggtgcctcatttaataagtagatctctacttaagctaaaggattatgatcatatggtgttggagactattagctattagatttttctcaaaatatgagttttgtacaatggaatgaaaaagtgacttcatatacgtaagactggtgcctaagaatgacttgaatgttatcagtactaccacagaactataatatacattgccttttctcagcagcatttgaattcaacttatttatttcctctatttgtagctttttgttctagagtcagaacaggtggactttgctttgaatattttagatgggacaaaaattgttcatcttcggaatttatttaaagaaagatctactggtacagggtgtaaaaatacttacaagaatatgatttttttgtttgttcatgcaaacagatcctttacccaatatatattctggaggtaggtatactggtgcaacccatttgccagctgtgtgactttgagtaagttcttaatttctcagagtttcagtgttctcatctataaaattatgtctccaattgtgagtacctagcactgtacctgatacatagtaaactcacaataaatatttcttaaacatagattttgttaggaatacaggcttgataacacagtccttacccttacaatgtaatgttagagataaaggagcaaatagagtcacgcatcacttaatgacagagatatgttctgagaaatgcatcgttaggtgatattgtcattgtgtaaacatcatgttgtttacttccacaaacctagatggtatagcctaccagtacacctaggctatatggtatagtctgttgctcctaggctacaaacccgtatagcatgttactgtcctgcatgctatagacagttggaacatgtagacttgtataaacactgcacacttaacctatactaaatttattgaaaatatttttcttggccaggcgtagtggctcatgcctgtaatcctaacacttcgggaggcctaggcgggcaggttgtctgagctcaggagtttagagaccagcccgggcaacatggcaaaaccccatctctactaaaaaaaataccaaaaaaagttagccgggtgtggtggcatagtcccggctactcaggagtctgaggcaggagaatagcttgaacctgtgaggcggaggttgcagtaagccgagatcgcgctactgcactccagcctgggcgacagggcaagactgtcttgaaaataaacacacacacacacattatatatattatgtattatatatattagatatatattttttcttcaataaattaaccttagcttactgtaacttttactttatgagtttttttgttttgtttttttttttttttttgagaaacagggtctgttacctaatttggagtttagtggcacaatcatggcccactgcagccttgacctcttagactcaagtgatcctcaaacctcagcctcccgagtagctggtactataggtgcgggccaccaacactcagctaatttttaaattttgtagagacgaggtcttgcttgttgtccagttgggttttttagacttttttttttttttttttttggagatggagtcttgctctgttkcccaggctggagtgcagtggcatgatctcggctcactgcaacctctgactcctgggttcaagtgattctcctgcctcagcctcccgagttgctgggactacaggcatgcgccaccacacccagctaatttttgtatttttagtgacagggtttcaccatgttggccaggctggtctcaaactcctgacctggagtgagccactatatccggcctttataaacttttttgattcttgtcataacacttagcctaaaatgcaaatgtacagctgtagaaaaatactttatttctttatatccttattctagaagctttttttctattaatttttgtttgtttgttttgttttactatttacttctaaaacttttttgttaaaaaccatggcacaaacacacacattatgctaggcatacaaaaggtcaggatcatcagtctcactgtcttccacccccacttctcatcccaccattgtatctgctgtctgtggctgaccaaaacatcatcatgtagcacatgactagtgtggcaagtgctctgttagatgtaaggccatgatgctaaagcatcacaagagggcatctaacccagattggggatgtcatggaaggccgacatcctgagttgaatcctgcaaatgtaaaaaccaataggcaaagaagaggaacaaaaaggattccaggacaaactgaggtcacatctatgatccttgactttattgtgtctgyttaaagtatctacagtaacctgtatcaacttagtcagtgtattaatactaaatttagctccttcaaagcagttggaactatgtgctacataaatttcagcttcacacaaggaagggaaggagtgaaattagtgaacaggcagttacagcaaaagaaaaaacataaaaattgaatagctggctctggtgaaatgagcaaggactttagagtcaaactggcctggatttgaatcctgatcctcattgcttgtagctgtatgatctggacaaatgacagtarctgtttctaaccttgattttctcatctgtaagatgccaattgtaactcctaaggatactgaggattttttaaaatgcgtgtacagttcctgaccagtggtttgtgcctaataacttattacaaattattacccagtaaaaaccttgagacaagagtgaaaacgtaaagctaattaatccattacttgttagcaagcaaactacgtgcttgagaaaattactcaactttcatgttttacttccagacagtagtttgattaaaagaaaaaaaaaaatcacagcccaggcatgtggctcacaccctggcacttggaggccgaggtgggagcatagcttgagcctagcagtttgaaactagcctgggcaacatagatcctatctctacaaaaaaaaaaaaaaaaaaaaaaaaaaattggcccggtgtggtggtgcatgcctgtggtcccagctactcaggaggctgaggcgagaggatcgcttgagccagggaggctgaggctgctgtgagccatgatcatgccactgcactccagcctggacaacagagcaagaccctgtctcaaaaaaaaaaaaaatcagtaaaaaatatgccgaaatagcttcagagtaattatgaattgccttccaaaaaccactgttttgcacttgcctgcaagaataggaaaaacaaaaggactgtaaggtggcaggatggcagaaccaaacaagagtagtacaccttggagttttttcgaaatatgggttgggtttttgggctcttggttgatttaaaataaaatttaaatgccttcagcgtctgtgataggtgccaacatgaagctaccgagttccagagaaagaggggagagctgatcactcatcagtgctgcgagactatcaaagggcccttcaggacctatctgttctttgtgtgtaaagagtaacaataaaagaacaccagtgtacccaccgtatagtttaaaaatcaggactcagcctactctttccactaaccgcgatcatggttttcaaacggaggaccaacggcgctttgccactgggccgccagctgggccctgcagagggcctaccagacaatgaatcagctcccttggagaggcgcccgcgaccgccccaccagcccgagagctagaattgaatctgggggacccctgcggcgccgggtcacgtgccgtgggcgcgccacgcctccccgagggccgggggagtcacgtgggcgcgaggccccgccccatcgcccggtccgcggcgaggtggggcctggtgtttgacccggaagtggctgtgttcagctgacagctgctgataaggtggcggcggcgaaggcagcggcaggtcgggagcaagatggcgctgcggccaggagctggttctggtggcggcggggccgcgggagctggcgcggggtccgccgggggaggcgggtaggtgtgaagagccgggcgggagcccgctggcctccgcgggggcggcgaggggcgcttggcagttatggcagttttctccagccctgatccttttccttggaactgggctgcgggaggagggtcatcccccagggacccaggccgaaaggggcgtgtggagcccaggtgctggacgctggtgttccgggatcagttgggggcgccggccgcctggaatcgagcggggagcgagcgcgcgcccagtgtgggaggggagagaagatgagggtcctcttggggtgggggggggcggggcaaatcaggaaccgcgactccgctcctagtcctagctgcctctgaagcgaccagggtcttccctttccttgggctttctagacttaaccggatatgttggagggagggctttaaaaatctgttcacaaagctggaggactgtttccaaggggggtgtgtgtgtggackatttgtctcttccccttttagagtgtcctgtcctctttatttccttaacccgcgacaaacagcaggaacatctaaagacctctgaattagtaatggtcttgagatagagttcttgtcttgtacactaactcttaagacttgtctgtcttctttttaaaaaggcatttaaaaacaaagaaagtgcactgttaaacagcagttgcgcatttattagaacaaagcttccagactcagcccttaaacaaatctgccctctgccacatttcagccaagaactgccgtggttcttatacccagaatggtaagggagatgtacgttttacaagctgacagattcgttatcatttaaggaaatattttattctaggaagttttcactccacttctataatgacctagtctgattttgttttactaaccaacacacaacagcacacacatttggaggtaaaagtagctttgcatcttcagtatcctaaattgtctttggaaaacgaagtgttaggttttttttttatatgcagtgtttcaatttcggagtcgtgaacactacaaaagtgtaaggaccttaaagttatcacctcttgcaggtgcttgtcaggaaacgagcagtggctgttcaataaaccacctgtgtgtaaccccatttttcatttcctctgcacatctttaactttagatttttaaactttttgctttctcttttgttctctccgttgtttcattagagggttttttaaaaaataaatacttcgtgtaagccagtttctggctggagaagaaacatatgtaataattcccttctatttgttttttctttttcttttgtcttgtttktttttttttttttttttttttttgagaggaagtcttgctctgttgcccaggccagagtgcggcggcgtgatctcgacccgctgcaacctctgcctcctgggtccaagcgattctcttgcctcagcctcggagcagctgggattacaggtgcgcgccaccatgcccggctaattttgttgattgatcgattgagacagagtctcgttctgtcacccaggctagagtgcagtggcacgatgtcggctcactgcaacctcgacctcccgggttcaagcgattcttctgcctcagcctcccaagtagctgggattacaggcgtgcgccaccacgcccagctaatttctgtatttttagtagagacggggtttcaccatgttagccaggctggtctcaaactcctggcctcaagtgatccgcccaccttggcctcccaaagttctagaattacaggcttgagtcaccacgcccggcatcctctatttatttcctatatgtgattacagtttctaaaatgtccctggatggtattaatttgatcaagtatatgattaatcatggcaccaagttctgggaaaatgtaaacttagaagaattgatatctaggcccaaatttttatttacttaaaaaatgtttttggatggggaggacctcaggttcagaaattcaagtgcattattccctttagtttgcagtatttgagtatcattggtccatggacacaaatttttaaaataaatatgggttgaattttgatagaaattagaatgattttaaaatttcccccctttgtaaatgtagcaacatctgcattctaaaactgtaaacgatatacaggagagaaagaagtggttaaaatgattcttaccttgaaaaatgtatggtacatatgttacatatattggcaactttctgaggctgagaagctgtatcctcaatagaaaaaggaatattattttttttagagagtaatggtgtaaaggctgaagttattttatttcctttttaattttctttttgccacccaccctccctgaaattattttataaggaaacttaacattatggcaacctaagtatatttgaagaaaaaaaacaggcaacttctctacacctttaatggagaaaatccatgaactataactgactgtattgtttagatacttctctatattctaagaggctaagcaaaacacaataacgttttccaaatttaatattaccctacttttgattggtgtcctggatgagctactttagaataaatggtagagttgtataaagggcaaaatttgcccaagagatgagaagtataaattttttttttctttaatcaaggcagaaaaaaaaaagagttgaaagatctggattagtctgtagtcattgaatgcttacatgggtaaggtactgttcttgatgctgtaatgaattaaaaagacatcaaaacatggtccccatccttggagaatgtacaaaataactgtggtacaaagtaaagtggaacaaagaggtcacgttcttctgggatgttatcatttgtgaacttgtctattttttcctgatcttttacaagcttttagagggcttcctcatcttttcttctttcactgcttctagcacatttttgcacataaaaaacattctgtaaatatttgtggatttcagctatatcaaaggcaaagaagtggtatttcatttggcccacagagttagaggaagaggaagcggtcaagagatcgtcacagagatgggaaggcctagtcaacactaaggaaacgatgtacctgcagtgccagatgactgtggctctgagtggcagagaagagttttgtgagataaaactgcaaagtagagttgtgcccaaactagagagggccttgagtttaaactaaggaaattcagtttcagggaaatcatttcatagttttaacttcaggggtgcgtcttgctaaaggaccatttaattattgcgtaatggtccatcatttagaaagatgtctctcacttgtgctgcatcagatgaattagaaaccagagtctggaggtggggagatccattaggaagtctttatgtaggagtttaggcctaagaagtgaagcctagtgtcaaatctaggttagtagcaaaggtaactgaaaaggagggacggatgagataggtaagtgacagagctctgctttcataccgagatgtcagtaatataagaattagtggttttacctttgaaattaaattgttggtcaccttcctgcccagttttttgccaagcttttactgtcttattaatgccttaactgcttatctaaccaatctttaagcatgttgttattagttgtctaaacatttcagagaaaaatatgaatttttcataggtcactaagcagttcgatttgctaaattcttactagagaaagtcatgtttgacagtattttgtttttatttcattttcaaagtaacctttatacatctgtttatgtattcatgtctatgtgattgtcttagctgagactttagcagccttgattctacgtcctcatttgacagaggggaaaccagacagggggtaaaggagattgcacagagcttcacagttactttatggcaaagctggaagaaagaaaatatacacgagtttccaattcttttgagcctctaggccatatgactaatttaaatgtttaagcctgatttttaaaaatcttgacagcttgattacttaaatgtattcattgctcctgaatgtatcaattttagcatatgagtaatgtctttaaaaactgaatacaggcatacctcattgcagttagcagatacagtgttttttataaattgaaggtttgtggcaactctgcattgagcaagtttatccgcgcaatttttccacagcctgtgttcacttcatgtctctgtcacattttggtaattctcacaatatttcaaactctttcattattattatttgttatggtgatctgtgatcagtgatctttgatgttactagtgtaattgttttggagcaccacaaacccagctcgtataagacagcaaacgtaattgataaatgttttgtgcagtctgactgctctacctaccagctgttccccggtcttcctctccaagggcctccatattccctgagacataacagtattgaaattaggctgattaaccctacagtggcctctaagtgttcaagtgaaaggaagagtcgcccatctctccctttaaatccgaagctagaaatgataaagcttagtcattaagtgttgaaagctgaggtaggtcaaaagcgaggcctcttacaccagttaactaagttgtgaatgcagaggaaaagttcttgaaggaaattaaaagtcctrttccaggaaacacaaatgttaagaaagtaaaacagctttattgctgatattgaaaaagggtgagtggtctggatagaagattaaaccacccttaacattcccttaagccaaagcctaatttgaagcaagatccttagtctcttcaattctgtaaaggctgaaggctgagaaataggtgaggaagctgcagaagaaaagttggaagctaacaggtcagtttatgaggtttaagcaaagaagctatctccataacaaaaaagtacaaggtgaagcagcaagtgctgatgtagaagctttagcaagttattcagaagagctaagatcattgatgaaggtggctacgctaaacaatagattttctttttttttttttttatagacagagtctcactctgtcacccaggctggagtgcagtggcgtgatctcgcctcaatgtaaccttcgcctcccgggttcaagtggttcttctgcctcagcctccccagtagctgagattacaggcacgcaccaccacgccaggctaattttatatttttagtagaaatagggtttcaccatgttggccaggctggtcacatactcctgacctcaggtaatccacccacctcggcctcccaaagtgctggaattacaggcatgagccaccatacctggccagattttcaatgcaggtgaagatgccatctaagactttcctagctagagaggagaagtcaatgtctggcaccaaaggacaggctgactgtcttgttagggcctaatgcagcaggtaactttaaattaaaccaatactcactgaccactatgaaaatgtcagggcttttcaaaagtatgctaaatctactctgcctatagtccataaattgaaccacaaagc

SEQ ID NO: 95402 - DNA, 46219 bp, Homo sapiens
caggggttggaggttacagtgagctgagatctcaccactgcacagcagcccaggcgacagtgcaagactttgtctcaaaaaaaaaaaaaagtctcttaacaaaaaccaagccagacacagcagtccatgcttgtaatctcagcgctttgggaggctaaggcagggaggatcacttaaggtcaagggattaaggttgcagtgagctacgatcaagccactgcattcttgcttgggcgacagagcgagaccctctcttaaattaaaccctctttaaaaaacccctcaattattctctctgggtgtggtggctcatacctgtaatcccagcagtttgagagtccaaggcaggaggatcgcttgaggccaggagttccagaccagtctgagcaacataataagacactatctctacaaaaaattattttaaaaacatttaaaaaaacaaaagctagtagttctttgccctgcctgatcccacttttagtcatgctacccaaaggcaactactttcagctttttcagtagtttcttttcatagctacatattcctaaaaatacaaatatgttgctgcctcttcatccattaattttagatattagatattttcttttttctttctttgttttttttggagacagcatcttgttgtatctcccaggctggagtgcagtgccacaatcttggctcactacaacctctgcctccggggttcaagtgattctcctgtcccagcctcccgagtagctgggactacaggcacatgttgtcacgcccagctaattttttttttttttttctgagatggagtttcattcttgttgcccaggctggagtgcaatggcccaatctcggctcaccacaacttccgcctcctgggcccaagtgattctcctgcctcagcctcctaggtagctgggattacaggcatgtgccaccacacccagctaatttttgtatttttagtagagacaggctttctccatgttggtcaggctggtctcgaactcccaacctcaggtgatctgcctgcctcggcctcccagagtgctgggattacaggcgtgagccaccacgcccgggcttccttttttttttttttttttttgtctcgctctgtcgcccaggctgcagcgcagtggcacgatctcggctcactgcaacctctgcctcccgggttccagcgattctcctgcctcagcctcccgagtagctgggactacaggcgcatgccaccatgcccagctaatttttgtatattttagtagagatggggtttcaccatattggtcaggctggtcttgaactcctgaggtcaggtgatctgcccgcctcagcctcccaaagtgttcggattacaggcatgagccacagcacctggccctaatttttgtatttttaatatagatggggtttcaatgtgttgtccaggctggtctggaactcctgagctcaggcaatccacctgccttggcctcccaaagtgttaggattacaggtgtgagccaccgtgcccggccagatcttagatattttcttactgttatagtaaataatctgttagtgtaaatgagctctcatacactcctagtcccatgtttcttctatccctatctttccaatatggttacatcagaatttttggttcagtgagtatgtggattcatacttgtatgatatataaatattgtttactgatacttttcattcctaagccaagcagaatatggaggttacatttcctttcttgtatgatttgtatattttttcctagtgtcagtatttgcttcctgcaatctaaaccatgtctttgagttctaggaaattttcttgtattatttctttgataacttctttcttctccctacaaggtctcactctgttgcctaggttggagtgcagtggggcgatcatggcttactgcagcctcacactcccaggttcaactgatcctcctacctcagccttccaaatagttggggctacacgggtgccaccatgcccaactaattaaaaaaaaattttttttttgcagagatgggaggtctcactttgttgcctaggctggtcttgaactcttggactcaagcaatcctcctgcctaagcctcccaaagtgctgggattacgggctagagccactgtgcctggcaatcgtttttgttttttttttttaagcctcctactctcatttgaatgctctaatatctttcatttattatctgaagcagatttttaatagtaaattgtttttcgtttggaggtttttatttttttttgagacagagactcactctgtcacccaggctggagtgcagtggtgcgatcttggctcactgcaacctccgcctcctcggttcaagcgattctcctgcctcagcctcccaagtagctgggattacaggcacacaccaccacacccagcttatttttgtaattttagtagagacagggtttccccatgttggccaggctggtctcgaactcctgacgtcaggtgatctgcccgccttggcctcccaaagtgctgggattacaggcgtgagccaccatgcctggccctatttattattttctgaggctaagttattccttcagcttctggcttctagcttagtcctaaagtagtgtactcatgggctgtgtcatgaatttctagtctccaatgggtagttagatggtagatgttaacagttacatggataacctagtcttctgttcttctgtcaattgttgagcaaaccattgggatataattgctacaagtttaggttcctgatgagttcccaatttatttcatatttcatatttcagaataatcactctagagattactgagtgagattatggaatactttactaaaagcctttgaaatttggatgaaacctcctgaccaggacgttagaagggaactcaggctggccttgcacttggagagagcagtgaactggagagcttggggtcccacctggcttctgtgcttcttgtgctgcttctggtttttttgctggaagagacctgatcgtatggtttctgtgctcaacagaaaactctctgcagaggaattagagcgaaaacggcaagagatgatggaaaacgccaaatggagggaggaggagagactgaacatcctcaagaggcatgctaaggatgaggaacgggagcagaggctagagaagctggactcccgggatgggaagttcatccagtgagtgcatcttcttcctgccagggtctttcatggggaaggtcttaagaggcaggctggcagctggttcccgttccagtgtttctgtgtttgcacatggagcccagccttcagaccaccttggctactactcttcctttctgaccacacagtgggatgtttttcatttgaggggaggagaagtgaatttggtattttctaaatcattgaaattccttgaccttccttttwartaagaattcatggcccaggaagcctttttccartgaggctttgacttattttccaaaacagatacattttcccttatggacactggtttaaaaacatttggttccaggtggagtcactcgaaagttatctatgggagcttaaaagaggttgtgtttttacagctgctctatggctaacaacccatttcttctgaagctgccagaatagttgactgattgaaaatgtttttgacttgcatttgcctgtcttctcttcctagccgcatgaagctggagagtgcatctacttcctccctggaggatcgggtgaagcggaatatctactctttacagagaacttcggtagctctggagaagaactttatgaaaagatgaaaactgtcccctctcttattggttttcctgcattttccagggaagctgctgaccccttaattctctttataagagttcaaatgacttctttcacagatgtcaaaccaccagtgttcaaagtgaccctgcttcattgagtcctgaaacagctcacttcctttgagagctagtgtgacttgctttgtgggacactcagtaactttgggttttgactctttaacgggtgggcactggaccatctcggtgggagtgcttgtgccactctggaaggctgttccctggggttgtgatgtttatcatgccacttccttcttacctgtgccaacagacctatttcactgcctcagcgtacaccagacccttcagaaacctctctggtgtcacccagatagattgtgcttactgagacaaatgaacgtttacttgatttagaagataatgtgacagaatgatgtcaggttaggtcaaagccaagggagtgacagaatctggaaaatcaaacaatacaaaaagccctaaatgaactgttaactatttgatctttggatgtaaaattgtaatgcgtatatgtacaaatgtacaatttttacatgcttttaaaaaaggttagctttgtgaaaataccttgtttggtcaatgactttactgggtaatagaaccacattgaaccttgatggcaagtaatacaataaggcaggccagctcgtttttctctctgaatctggctggtttaggaggagcctgggtttatcgacgagatctggagtatctattcttttccactgcttgcagtctccaatgtaggcagtgtaaaggtatagtaaaatgattttaggagtcagaaccaaattgccaatatgctccatggctcctaaaggaaaataaaatggaagtttttattttgcggcttcayttcttaccgtgtagtaaccttactacaattacagattttcaggagttgtttgctagtctctttcagtcaggtactaaaaaaaaaacaaaaaacaggctgggcgcggtggctcacacctgtaatctcagcactttgggaggctgaggtgggcggatcacgaggtcaggagatcgagaccatcctggcgaacacggtgaaaccccgtctctactaaaaaaaatacaaaaaattagccgggcgtggtggcgggcgcctgtagtcccagctactcgggaggctgaggcaggagaatggcgtgaacccaggaggcggagcttgcagtgagccgagattgtgccaccgcactccagcctgggtgacagagcgagattccgtctcaaaaaacaacagcaacaaaacaaaaccctcgaggggccactctcctgtctttactccttttcccttctctattctttcaccagaagccctcatttgaccagtgaactcctaggccctcttgacccgcacattagctgggcgatttccttgttctgctaattcctaattctgcttaaaatgtatttggatttctgtttttgaacacttatgatgccaggcactgtaatgcttgaaacccgatctttccctagagaatgtaacatacgtttttattcatttaatcacttcattatgccggggttaattatgtttattttataattggtaataaaggccacatttatttttgtaactgtttaaagagcgaccacctgtggagtaccgtgtttacgaatttccatgcagaaagaacaacgttgacctgtaatttgtgtcgaatatatggagatccctcatctgagaattatgtaacaaagcgtggggcagtttactcaaagattttacgaaatgagccagagtaagacgattagtgggataggtgtctgaaggtgctggcggcctctgagctctgaccctttgcggggagaacaggcagcaggtgggtgggcgcggggcccattcataaaaaccagtgttcctggcctgcttctctcattggccctggrggcaaggggcgtgccccgcgggtggakcgcgcccggggcccagcagagtgggyagatccacgcttaggtggagcgagggggcgttccttggctttctaggctggactttctcttccccttgctgcgtccctcctctcccccggggtgggcatggtacgtcccgccctcctcgcattcccgtccctccttcccttccggagcggtggcatcgccgccatcttggcattcgggttgcgggaaagagccaaaccctggcgttggggggcccgggcggggagcccctcccgcggtccacagcgacgcctgcccagccctcctccccttccggctccggcacggggccccgaggcgttcggaggccaggcgggtttctgtcaggcccggggaggaggggcgggcggggcggccgctgcctccccgggacgggccgtaccacgcggacggggaggacggggccaggggactgcagggcggctgcaccgcccgggggcggggtgcggagcgggccggcgggctccccggggcggggcgggagggcggggcgtggggcggacggaaccaccggggcggggtgggaggtaacgggacgggcgcgaccatggcgcggtgagggagcgggggtggggatcggtccgsgggaggcctgaggccgctggcttgtgcgctgtctccgccgcccccctctttcgccgccgccgccgccgccccgggcatgtcgtccaactgcaccagcaccacggcggtggcggtggcgccgctcagcgccagcaagaccaagaccaagaagaagcatttcgtgtgccagaaagtgaagctattccgggccagcgagccgatcctcagcgtcctgatgtggggggtgaaccacacggtaaccagctcctgcgcgcccctctgagcgcggccccgcgcgctcccacgccccctgcagccctgggcccttgccccgcaggccctgccggtgacgcctgccacccctcgccaagccacttgcacgcccaccccacccttgcacgcctttcggccccgtgtgcactccccgcacgccacgcgaggcctggtgtctctgtggtctgccgtcgccacctccccttccctccagcccttctggcttcctgcgtgtggcgtgctcgcttggggcagcccatggagcgcaaaggcaaggcctcagtgcagtggagtcgctttcatccctgcttctcctcctcccccctcatcctgtttgtgagggtgtatattcccccttgttccttacagccggctgccagctctgtcaagtagcagtggtctgcccaaatagtcctctctttctgatcgtttggttgttgtggctgctcaaattctyccatcctccaggcctccttacctttgaatgtagaactccaccctgggtttccttttttttccctcttgaacaagatgtatcaactggagaagcacaggcttccttgaaccagacacttcacctgggtctctctgggttagggagaagaaagaatggctattaaccatttgagagaagaggatgcctggttataaggagggactattcatagtagaaataatatgtcttcccatagtttttgaaggtgatcattttaaagatgttgacttatctgttgtgtggctgcaatgttgtgatgatgcatagtgattatggtcctagataggagagataggtcccctgggtccttagggtgctttgagattgttcaacagcccctgccaggaagttggatcctgacagtttaagctggaagactgtttatgtggtgtttgttcagggtctttattctccctcttccaaccacttgctctttgccttctgaccatttctttatgaatccccacactaggaatgagcagaggaagtaaaaggacccgaaacaccaacttcactaactagaattttggaataagsaggatcaagcttgggtttcctgtggatttcagttctttaggttcacttgtgagtgcttgaaattgctcacaagaccaagcgatgacaaagagggccagcaagactttgcattgctttggcagaggagctgaaggtgcctttgggtggagatcgatgaaccgtaatctgagctagggttttagatcttgacctgtcatttaggaaagtgcatgtgtaaattgaggtctctgtggtttcttggtcttgggcaggttactgttttcactgtcatcactggtgttagtgagggtcctgccaggatagcgagtaccagtggtataatgcccagacctctaggagctgcttcgggccaacaatccagcccagtttgttactcggtcttcctgctgtcccaggggtcatctgacaacatttctagggaaactgggtgatcagaatatgaaccccatgtccctttctggaagtcartccttgattttgttctgcatcctgcttctcactctaccaggcctctctctgctggttctgtttctcacagaaagcaacctgtctgtagagaactggtagaggcctgagagtcaggagtattacagctarctgcaatgaaccttgggtcccttattttacacatgaagaaaaggaggcctcaggtggaggattagcttgcctgtggttacagcaagagatgtcgcttattgtctagcaccatgggactgtatcggccaagggtggtgcctgagtggctggtcttgttttctttgcctcctgtttcttttcctctccctcagccaagtctcaggatagatgcgaagtatagtccggttagagaaggtgaatatatgctctgggttatacgcctatgcatgtcaggtcctgggagtgtgtgtgatgcatggtgttccgataggcaggcatgagtctgtccatatgtggttatgaagtttctcaatagctgatggttaggtatcacgagtcaggagtcctgtgagtcctactctgttggacaaagtggtcatcttttttctttgctaactttaagttgaaagtttgtttgaggggctagttggaaaggcattgactttaagcaagatccgtgcctctggacataatgaacaggcatctcatgggaacttcccaccactgccctggacaggctaagcttcagaggccagttagtcgtaagttttattgcttcatcctggtctgcagtaaggtctgatacttcagtgtccccatttgggaactgagacatctgcctagaagaagagtgtaatcttgcactcgtctaagggatcaggaccacattgccctcggtggactgctgcacttttttggagatttcctcccttcaaaaaaagcctactttgtaacattttgtcatctgagatttcagataccaccttttctttagtttctcacctgtttaggcatttaggcatgctggtctgtggctaatggtgtttcagataggaaggatggatatgtctttatctacagcagaagttagttaccctttcatgaggtgattagtttacttctaggtggaaaaagagaggactttgaacttggtgttgtcacaggagctgctctcatggacaagagcccatggattttgtggaggaagaatgtgtaggaaacaaggagaaaaatcagaagactttgcacctgtcagggaagaactagtgaagagcaaaaaccagtgttttagtggatgaaatacagttccgagggtttggaattagggaagagatggcctcagagaggagcatggagaccatgggaggtagacctgacttgatacttgttggccattttaagaaccaggtatgtgtgaagccttaccacagggatcagaggagcaggagcagttgatggtgactctgtatttaaccatttgagaaactgccaaactgttctctaaagtggctgtaccattttacatgtctaccagcagtgtataagagttccagtatctgcatccttgtcaacacttgttattgtctttttaaagttattaaagccattctgttgggtgtgaattcgtatctcattgtgattttktttgtttgtttgtttttgtgatggagtctcactccgtcacccaggctggagtgcagtggtgcaatctcggctcaccgcaacctccacctcccgggttcaagcaattctcctgcttcagcctcctcagtagctgggattacagatgcctgccaccacacgtggctaatttttttattttagtagagacaaggtttcaccatgtcggccaggcttgtctcaaactcctgacctcaggtgatccacctgcctcggcctcccaaagtgctgggattacaggcatgagccatcgcacccggcctcattgtgactttgattggcatttctgtgataactaatgatgttgagcattttttcatgtacttactggccatttgtacatattcttttctttttttttttttcttgagacagagtcttgctctgtcgcccaggctggagtttagtgccacaatctcagttcactgtaacctccgcctccttggttcaagcgattctcctgcctcagcctcccaagtacctcggattacaggtgcctgccaccacacccagctaacttttgtattcttagtagatatggagttttaccatgttgtccaggctgatctcaaactcctaacctcaggtgatccacctgccttggcttcccagagtgctgggattacaggtgtgagccactgtgcctggcctgtacattttctttttgttgttgttgtagagacagggtctcgctttgttgccgaggctggtcctgaactcctggcctcaagtggtcctcccgccttggcctcccaaaggactgggattgcaggcatgagccacatccccagccttcattggtatcttttctttggagaatgtctattaaattttttgcccatttacaaagatctttttgcccattattaaattgggttatcttcttattattgagttacaagaattctttttatattctagatacaggtcccttatcagatatatgatttgcaaatattttatcctattcattgagttgtctttttcatttttcttttttttttttttttttttttttgagatggagttttgctctgtcgccctggctggagtgcaacggygygatcbtggctcactgcaacctctgcctccygggttcaagcrattctcctgcctcagcctcctgagtaactgggattacaggtgcccgccaccacaccaggctaatttttgtatttttagtagagacagggttttgccatgttggccagactggtctcgaactcctggcctcaagcaatccccccgcctcggcctcccaaagtggtgggattacaggcgtgagccactgcacctggcctgcctttttcatttttcttatggtatcttttgaagttcaagtttttaactttaataaagtccagtttatcttttttgttgttgttgtgtgtgcttttggtgttatatctaagaagacattgcctaacccaaggtcatgaagatttactcctttgttttcttctaaaagttttatagttctagctcttttttttttttttttttttttaatgaattggggtytctctgtattgcccaggatgttctcaaacttctggcctsaagcaatcctcccaactagagttttagctctttctttcttcttcttctttttttttttttaattktattgtggtcagaacatttaacataagatgtactctcatgacaaaattttaagtgtacgattatgttattgmtgaccatgggaacagtgtcatagtgcagctctgtagagcgtattcatctcgcttgaatgaaactttatgcctaccaattaactccccatttcccccgcccccagcccctggcaaccaccattctactctttgtttctatgaattggactgttttgaaaccttatataaggagaatcatgcaatatatgtttttctgcgactagctgatctcagcgtaaggtgctcaaggttcatccatgttgcacatagcagaatttccttcttttattaaggctgaatagtattctgttgtatatgtataccacattttctttatcatctgttgatggatttgttttcacaccttagctcttgtgaatagtgctggagtatgtatagttttagttcttacatttaagtctgtaatccattttgaattcacttttgggtatggtgtgagggacagatttattctttagtctgctcaatttctctcctacattccaccccagttctgttctgtccatacattttctttctttcttgtttttttttttgtttgtttttttgaggcagggtctcgcgctcttgcacaggctgaagtgcagtggcacaatcacggctcaatgaagcccctacctccccatgctcaggtgattctcctgccttagccacccgagtagctgggactacaggcacatgccaccacacccgactaacacttgtattttttgaagagtcggggttttgccatgttgcccaggctggtctcgaaatcctgggctcaagcgatttgcccacctcggtcttccaaagtgctaggattacaggcgtgagccactgacctcctttacctgtctttttatcttgccctactgctttaaaaatcttcagaggggcctggcatggtggctcacgcctgtaatcccagcagttagggaggccaaggtgggcggatcacctgaggtcaggagttcaagaccagcctggccaacatggtgaaaccccgtctctactaaaaatacaaaaattagtcgggcatggtggcgcatgcctgtaatcccagctactcgggaggctgaggcaggagaatcacttgaacctgggagacggcggttgcattgagccaagatggcggcattgcactccagcctgggtgacgagcaaaactccgtctcaaaaaaaaaaaaaaaagaaaaaatcttcagagatggctgggagcagtggcttacgcctgtgatcccagcactttgggaggccgaggcaggyggatcacttgaggtcaggagtttgacaccagcctggccaacatggcgaaaccctgtctctactaaaaatacaaaaatttgccgggtgtggtggcatgcgcctgtaatcccatctacccaagaggctgaggcaggagaatggcttgaatccgggaggcggaggttgcagtgagcagagatcgcgccattgcactccagcctgggcgacagagtgagactccgtttcaaaaaaaaaaaaatctttagagaacattcctactcaggcctttgaatgaagtttcttttagcaggccttcccacctcacagggagcagtgggactcaaacagcaggagaaggagaaagcaagatatggaaaggaggagtaaacaccrgtagatttattggctcctgtggccctctcttcctctctggagttgcagttcttgctttggacctcctyggtcctgtgagtgtatttctagcatgtcatgttttctgatggtggcaggtaacaagtgattgctggtggtggccagcccactgctgaaccgacagcagaggactggaacatgtcaggaaacctgcatgcctagtccaggcatcctaggtaacaattcctatgaaggtcgcacagggaagtggaggcttctggacacacaagttcaccagactagaactagctgctgaattttcatctccatgttgcatattgcagaattttcttcttttttttaaaggctgaatagtattctgttgtatatgtacaacagaatcatacctctcactttgagagactgaggtggatggattgcttgagcccagggctttgaaaccagcctgggcaacatggcgaaaacttgtctctactagaaataaaattagctgggcatgatggcacacctgtagtcccatctactagggaggctgagatgggagaatcacctgagctcaggaagttgaggctgcagtgagctgagatcataccactgcactctagcctggcctatggaagtgagaccctgtctcaatcaatcaatcaaggaattttcatctccagtagatcagcatagagtgaactcattgcttttttttttttgagayggagtctggttctgtcacccaggctggagcacagtggcatgaactcggctcactgcaagctccgccttgtgggttcacgccattctcctgcctcagyctcccgagtagctgggactacaggtgcccgccatcatgctccgttaatttttttttgtatttttttttagtagagacggggtttcactgtgttagccaggatggtcttgatctcctgacctcatgatccgcccgcctcggcctcccaaagtgctggaattacaggcgtgagccactacgcccagctctgcagatgtctttttggttttgtatccccagctcctagcatatagtaaggcccttaatacactgagtagaagtaaattgaatagaaatttggcagtctggctgggcgcggtggctcacgcctgtaatcctagcactttgggaggccgaggcaggtggatctcctaaggtcgggagttcgagaccagcctggccaacatggagaaaccccatctctactaaaaatacaaaattagccgggcatggtggtgcatgcctataatccgagctactcaggaggctgaggcaggagaattgcttgaacccgggaggcggaagttgcggtgagcacgccattgcactccagcctgggaaaccagagcaaagctctatctcaaaaaaaaaaaaaaaaaaaaaaaaaaattggcagtctgagccagattaggaaaggccttgaatgccaggctaagcagttaaaactttaccctgaggttgagaggagcagccatggaagatttctaagcaggagtgtagcatgatcttgtagattctcctaatgtcaagtgctcttggtgcaataccaggagaggcattaggtgccttgtttctggcctgatgtatgaggactgggagcctgaccctctggccatgctagcctcatccttctctgagcctctgctgttcttgatgtctgtatccctggattctcacttaattgcatactgctttgactttgagkgtgtcagggttttttttcatctccctgatgagattataagcctcctgtttcttttgcatgtacaacactttctccccttgtgttctcctcctcccacacacctacctaacagaatgaagcacgtagcagatatttcaataggaacagttcaattgaaatggaatagaactctctgggatataaaatttcacacaactaaaaaaataataataatagggctaatccctacagtgaatcatctacatgtggcctagtagaaatgaggggtaagtctcccctagttgagatatggattgttcaccaatgttagctgagttaaaaatttcctaggctgggccaggtgcagtagctcacatctgtaatcccagcattttgggaggctgaggcaggcagatcacgaggtcaggarttcgagaccagcctgaccaacatggtgaaaccccatctttactaaaaatacaaaaattagcagggcatggtgacatgcgcctgtaatcccagctactcaggagactgaggcaggagaatcgcttgaacccaggaggcagaggttgcagtgagcggagattctgccactgcactccagcctgggcaacagagcaagactcgatcttctgacctcgtgatccgtccccttmggcctcccaaagtgttgggattataggcgtgagccactgcgcccagccgagccctgaactctttgtctctgttttccctttaagtctcggagccaggcttgatatgccaggaaaaaggaaatgggacagccaccacgaattgtttctgttggcagaaaaacaaagaagtggaatggtttcctctgtaggcacagatttgacagtcacattctcttgtgagcaccccctggaataggaactggcatgactcttctggggttttttttggctattgggagggtttagccaatgaagggtatcacagagcttgatgctgggaatttaaaaatcaactttattgaggaataatttatgtatattaagtgtgcgtattttaagtatacaatttgatgaatttcagcaaatgtatttgctcatgtaaccatcaccccaagcaacatataaaacatttctgtcaccgtagaatcacacttctcatgtccctttacactcagcaccccccgccccctggccaggcaactcatctcatttctctcattatagatgcctgctgtagaatttcatataaatggaattatacaggatacactcttgtgtctatgccagtttttgccagcagtttacctagtgtctgctccactgccaacttataaactaccctgcccccagcatccctctcaaagcacgtgcattcctatggcttccttcatttctccatgagtaaattgggttttttcccaactctaggaagatatggttccccagcccagttactgcattaacttgaacttcctccattctctgacatttctaaataaaaaaggtttgtaacataaaaggagcagcaaattaaatgccatttcccccatttatgctcctggaggagttctaatgactctaggttatcccctcactgccacctggggcctcattgagataacaggatttgcaaggaaagtgggagacacaaggctgtgccccctccccccagtccattaagtcaggactaaggtttcctctgtaaatcctgaatgcattagtggcaactgggttgagggtcaaatgtcaaatactctgctgtgatgggagaggacatctgtggttaattagaccactaactggctaaactcgaggtggggaagggcaggatctgccctcatctctgcaccaatggaaagctagctctctgtctaggatccagctccctgaagggatgaaagtcagaaggtttgtttgcagtagaggcaaggcatcctgccccatctcccttagtttagtgtatggcaggacttgacatcaggaactggccctgctttattttattttcttttttgagacaagatctcactcttgcccaggctagagtgcagtgcagtggtgcagtcagctcactgtaacctsaaactcctggcctcaagcaatcctcccacctcagcctcctgagtagctaggatgataggtgtacacgactatgcctggctaatgtgtttaatttttttttttttttgagacagagtctcactcttgttgcccaggcagtggcgcgatctcggcccactataccttatgcctcctgggttcaaacgattctcctgcctcagcctcccgagtagctggaattacaggtggcttccaccacacccagctaatttttttgtatttttagtagagatagggtttcaccatattggccaggctggtcttgaactccttacctcaggtgatctgcctgcctcagcttcacatttaattattttttttagagatagggtcttgctgtgttgcccagggtggtatagaactcctggcctcaagtgatcctcctgccttggccttccaaagtactgggattacaggcatgagccactgtgccaggcctggccctgcttttatcaggagggtccaagtggggcagtggccagacatttactactgctcactttaatctattacagccgggcgcagtggctcaygcctgtaatcccagcactttgggaggccgaggtgggtggatcacgagctcaggagatcgagactatccaggctaacatggtgaaaccctgtctctactaaaaatacaaaaaattagccaggtgtggtgtcgggcacctgtagtcccagctactctggaggctgaggcaggagaatggtgtgaacccaggaggcggagcttgcagtgagctgagatcgcaccactgtactccagtctgggcgacacagtgagactctgtctataaataaataaataaataaataaataaataaataaataaatttaatctattaccttggggatatgagttacaagtccacacaaacccatccagctttttttcttccttgagctaatttcttgagtgacccacaatttgtatgaagatattcaaaggccttaattaatacccacttaggttgggagacatttatctattgatcatttattattgcatatgacaaatatttattgagtatctgccatatatgctagtaatggtgccaagcactgtggtgccccaaagattagtaggatgctctttgcttagaaatataattaaagccgagcgtggtggctcacgcctgtaatcccaacactttgggaggccagggcaggtggatcacctgaggtcaagagttcaagaccagcctgaccaacatgatgaaaccctgtctctactaaaaatacaaaaaaaaattagctggacatggtggtgcatgcctgtaatcccagctacttgggaggctgaggcaggagaatcacttgaggccaggaggtggagattgcagtgagctgagatcgtgccattgcactccagcctgggcaacaacagcaaaactccgtctcaaagaaaaagaaaaagaaagataaataatatagtattgcctagcttaactctagcaggtgaggtttataggcattaactacaatatgagagactgtgagatggccagaagacagatacaaagaaaacttcaggaattccaagatgggaaagggtattgatggtctagagaatcttggaaaacttcatggaggaggtgccttttgagctggcccttatcaggtggagagtttcaataggtaaaataggacaaggttgggaacttacttgaagagaagaacagaaataaaggcagggaggggccaggtgtggtggctgacacctgtaatcccaataatttgggaggccaagtctggaggattgcttgagctcaggacagtgagaacttgtctctacacaatacaaaaaaattagctgggcgtggtgatgtgcacctgtagtcccagctacttggggggctggtgtgggcagattgcttgagtccaggaggtgaaggctgcamtgagccattgtcatgccactgcacttcagcctgggtgacagaatgagaccctgtctcaaaaaaacaaaaaaagacagagagggaaacttggacatgcttttagcaagattgtggcatccacattgtagcttagtgtctctgaggcaggtggcctcctggctgagagccttacgttctccttgcttttcagatcaatgagctgagcaatgttcctgttcctgtcatgctaatgccagatgacttcaaagcctacagcaagatcaaggtggacaatcatctcttcaataagtaagttgtctactgagtggactcaggttttgtgggcagtcctttccctcaagtcagaggcttctgaagcctcatgcatggtgggagccaaggcagcacctggcagggtgtgacagcagcacctggatctcagagcggacaaactggctaggaaaatgcattcgttatgtgcctctcatcctagtattgtcgtctcactctattatcagcctacctccggtggcccttggggcatgtggctgggcccagggtgattcatctrgagccagctcaggtggcagtgagctgctctggagctgaggtattcagtgtgaggctgtagcagtggccccatcttggtcttagtctgaggcaggaggttgccaggcatgttcttggtctgggatgccgccaggctcttttctgtctggctggtgtatgagcaacaggcagagcatggggctcragggcactatccagagtagcacttcccatttttgtctgctgtcgcttcttggattagcaccagtgtctgaaggttgtctcagatattgttggaaacactagcggccgccacacctggcacaattttgggcctgctttaagccctttggggcctggattttccatccctctgtggaccaccccaggactatttgctgcttacactttctcctttctgcatgtgaatcctggttctattcttcattgtctcacagtccccaccacctcactagctgggttctgtcaccccaccattcccagactgttagtccagaggagaagattgacttgagaacatcccttagtgacctccctctgccatagtaagtaataccatcttgttctagaagccgtctgtctccatagctgccacctgttaagtggccacctaaggagggagaggcagccctcaactcagagaccagaaagaaggttgttctgacccagaagaaagaaggttgttctgactcagaggtccgggttctcgaagtgggcattgcaccactacccccttcagggtccatggcctctggtgaggtgctacctccttgatatcttggcctaaagcagagaacccaatctcttattttcttctatctttattccttttgtccttccaacaactgtgtatgtgtttttgttgttgttattggtgttgttttgagacagtttcactcttgttgcccaggctgtagtgcagtggcrcgatcttggctcactgcaacctctgcctcccgggttcaagtgattctgctgcctcaggctcctgagtagctgggattacaggcacccaccaccacgcccggctaatttttttgtatttttagtagagatggggtttcaccatgttggccaggctggtctcgaactcctgacctcagtcagggtgatccacctgcctcggcctcccaaagtactgggattacaggcaggagccaccktgcccagccctgtatgtgctatttattagattctagcactgtttactagaagacggggtagataaggcagataggccacttcctttccaagaagacattccttttgatttccttaaagcctgtcatcctggagtagtcactgggacatatttctgaaagggggtccctaaacaggatagctgttgtaaagatggaggattggtaagagtcatcatttcaaggtgattctctttcctcctgggagtctgtattgatgagggagtgggagggtggagattggtgccagcagccagcagacagggctctgtggtcccactcagttgactgaagacctctttaactcaggcactcttttcctacgtcccagtggaagcccagggcagggcttcctgtaagtgaccatcttcaggatgcttccacaggaatatggccagaggagaggggccctctgatgagagaggtttttccttgtagcattcaggctgatttcacctcacagcagatgttcacatgcaggttcccactgtagtaagcacagtgcttgtgaggtggagcctgcactcaggcttatggcccagcgggtgagagtttttttctttaatgtatgttttattgaagggcagcacacacatagaaaatcgcacaaataccagttatactgctggattacttttacaaagtgaatacaagatgtaaagtttttaaacttttacatgctcagaatcacctggagtgtttgtttttcgactcaactccagaattcctaagagcctagaaacctacatgttaagtatggcagatgttcagatccaggcaatctgtggaccacactttgaagagttctgaagtcagaatatagatgaggctgggtgtggtggctcatgcccgtaatcccagcactttgggaggctgaggtgggaggatcgcttgaagccaggagttcaagaccagtctgggcaacatagcaagactctgtctctattacaaaaaataataataataatagaattaagatgagcaaggggcagttcacaaagacatatctctgcttttccctagggagaacctgcccagccgctttaagtttaaggagtattgccccatggtgttccgaaaccttcgggagaggtttggaattgatgatcaggattaccaggtatggaggctcctggcaacatcagtggattagggaatggaatggggtcaggaagccacaggacaggtagagaatcaaaacgtgttggctgtttttgtgctgtgtctccctgtcatgccttgctccagcccaggcggtctctcccccagcactgggggccccttgcagggcgagggccttagaaatgcttctgaggatgctgcacacactcaggttcctctccctcagagggagggcagcaggagggagaggggtctgcggaagcacctttattttagtctgacattcccagtctaggctgaagaacccttctcattcgtagtttgacttcaaagagaactgggtggggcatggtggcttatgcctgtaatcccagcactttgggaggccaaggcaggtaggtcacctgaggtcaggagttygagaccagcctggccaacatggtgaaaccctgtctctactaaaaaatacaaaattagatgggcatggtgatgtgsgcctatagtcccacctactctggaggctgaggcaggagaatcgcttgaacctgggaggcggaggttgcagcgagctgagatcacgccattgcactccagcctgggcgacaagagtgaaactcagtctcaaaaaaaaaaaagagagagagaattgttgttagcgagagatgaggcctcttaaagcagatgaaatagattagaaaaggaagacttcaagggtagtgtaacctcttgccaggtatgagtgtcacctcctaaacttgtgccctatcctggtggtgggagtggggagttggtctgccagggcaactgcccccttcagggcgtgacagtgttgtagaggccattggcctgttgggaggaatcaatcccagtgtcagggacattagaatctgactcagtccatggtttctgtcacttctcctcttagcacatctccttggatcttcttccttggcagacagccttgtggtgaaggtgggcgaattttccacttcacctttacagctgtaagaaatatagctgactttttttttttttttttttttttttgagatggagtttcactcctgtcrtccaggctggagtgcaatggcgcgatctcggctcactgcaacctctgcctcccaggttcaagtgattctcctgcctcagcctcccgagtagctgggattacaggcgcccaccaccacacccggctaattttttgcatttctttttttttagtagagacggggtttcaccatgttgaccaggatggtttcgatctcctgaccttgtgatctgcctgcctcggcctcccaaagtgctgggattacaggcgtgagccaccgcacctggcctgaaatatagctgactttcattcatctgtggagaaaacttttccccatagcacagtgaaacctagtgtatagcacagtgaaacctagaatggatgcccaaatcttttctaacactgtagttcctcccaccccacccctttgatagagtagttcacagcagcagaaggggccttgggttagagtctcctcccctctctcctcctctctggagggcttgcatgcaaagaaaagtatctcgaagaagagggtgagggtttgtgagaggaggaggagatgccttgggcttgaatgcccaggagtgcctacacctaagaggtactgggaggttcctccagcctgctgttaggattgaaccctgaactcaatcatgacttgactggggctggaggttttctggaaacttcttgccactattgcaaccccaagttgctcagacagattccctccattgttccttggtgaggggttgcaagtgaggggttcctttccctcccctgggctgtctaaccacatcctctcagtgtctgcattttgcccctagtagccttgtgggcgcatgcccgtgctcaagactgaaatgagggcagggaggatggtgctcagggaggggaccctatattcttggactaccagccacttagagagtcaggggatgctgcctctacctcccaactaggcttgcagcctgtaagtcttatggtagagaggccaggctgggaggaagaggcgctcagtcacagagtctactcaacctttctgtaacgggaacagcctgttttttggggtgctactttagcacctttgctgaggaactcccagagctgcttaccacctctgactttagttttccccatgaaggtggtcctcacttctccaccagggttttctgaggaggtattaggggaaagtaaagagtaggatcctgatcagccgggmatggtggtgcatgcctatagtcccagctgctcaggaggccgaggcgagaggatcccttgagcccaggagttcaaggctgcagtgagctatgatcgcaccactatactccagtttgggtgacagcaaaacaccatctttaaaaraaaaaaaaaaggctgggcacagtagctcacacctgtaatcctagcactttgggaggctgaggcaggaggattgcttgatctcaggagttctagaccagcctgggaaacatggcgaaactacatctctacaaaagctacaaaaataagccrggcatgttggtgcacacctgtagtcccagctacttggtaggctgaggcgggaggatcacttgagcccaggaggtagaggctgcagtgagctgagatctcaccactgtactccagcttgggtgacagagtgagaccctgtctctacaaaaataataacaggatcctcattaagagatggggaaacatcttggagaggagacatttctgtgacatgatccccatgtatgttttcttgggaacagggacacttgggatctcccctcaccgttgcttcccagaggtcccttggcatctgcttggtgaacatatccctttggttgactcacgccttcccacaccctccctcttaaggcttctactgctctctgatcctaatgggagtaggaccttgaggaggagcagggatacagccaggaaagctccccaaaactgcctcccagccttgcatagacaagcaggaggttgaggcaaggggaaaggtgtcaggctcagagatgaggatcagcttcctgctttggggaaggtttttcagcattagggtagatccagggacaagagacgaatgggcattgcttctttgtgctagaccccttgaagacagtattttctaagcttcatctttgctacccccaagagactgggagaatcagctcagtctgcatctttgtgttcctgatgaggaaatgcaggggtagagaagttaaatggctcacccaaggtcatagtgcgtgtgagagtccagatkagactcagccccctccatcagaggcagaattttagttggtaggatagctatctgggatcaggatggaaactttcacagtcagtcctcttcccatcctagactgggatgaagagcaggtggtaaggaacaattcttgtcactttggaggaagacttagggagggatgtgaacaccctgtgagaaaaggggagggtaaactcccatctgggagtccctctatctcagtgttgttggctttcaagcagtccagcccctgagggaagactcagcgaaagtcagaattctgttcccctgccaagcccagccttcttttgtctcgattatcagaattcagtgacrcgcagcgcccccatcaacagtgacagccagggtcggtgtggcacgcgtttcctcaccacctacgaccggcgctttgtcatcaagactgtgtccagcgaggacgtggcggagatgcacaacatcttaaagaaataccaccaggtatggtgagtcccaagcctgggctgcagaggatgggttggaagagggagaagagagccctgggggagcttcttagggaggggttggtcctctctggtaatggcagctgcttctgatcaccaagcagtgggactctcctgcaacygtatttctgtgagctgaaatgcctactttaaaaaagaaaaaaggagccatgaaggctcatcgctgactgactcccagttggaaagtgttcacgcactggcatccgccccgtttcttctgaaagaggccccctcagctcggcaggcttgtttcttttcccgtcccatctctccactcatctggaacctgtccatgaggaaggcagggagccccgtggcaccatctgtgtgtctgtcctcagcctacttgggtcttcatttctggggcacctgagaagggccgaagggagcttctggtctttcaggagttatggcagaaaccctggggcatggcatggataagagctttggatatggagctgttctcttctcccagatggctggatccctggcctgcctctgcatcctgtctcttccctgcggcattcccatatcaggctggcagaagagatgcaaggtgtggatcagggattttcctgtggtagaatcctactttaaacaaaatcttaggtgagatactaataatatgaacccacaggggctctgagccacctgctcagcttgcctctccctctgccatgccaacaggaggctggaggtggctgttgcccattttaagcctgagaaacccctattacttcatagaacccagctggagaactactggtctagaggttagaatcccagggagccagggagcattttagtctggggtgagccccatccatccctggcactgcctgttccttagtcctctctcttcttcctttccattctagtttatagtggagtgtcatggcaacacgcttttgccacagttcctgggcatgtaccgcctgaccgtggatggtgtggaaacctacatggtggttaccaggaacgtgttcagccatcggctcactgtgcatcgcaagtatgacctcaaggtaaagggctctgtgtttgcyggagctgtgcctyccctctatctgagccccgaaggggccactrctccaacttccatgtaattgggaagctggagcctatgtgttggcatggacagggaactctggagtggatatgcctgattcttgtggaccaaaggcagtttgaagtccaggtgacagtaacaggagattatttaagccctaaatgtgccatatttatgcagcagttgatgttcctgtctgtggaatgtgcacagtgagggaggccgtgctgacgcatgcactttagcatccatcaggcccccatggactgccagcacaagtgcatctctagactctgagaaggacacacttgtggctgtgaactagggtgctccgtgttcttgaacctggcttctgacttctgtcaccttatgccgccatcccttccctctgtgctgcaactgggctggtttcctctgtgttcctgcagtgcctgtgctcctcttcccaggatttcacatctgctgtctggaatagtctccttctctctctccacccactccttcccccacctaattgcttcctccttacccttcygagctcagcccaaatactacttccaggaagtaggtaggccctggccactgtccctccccaggccgggcccgtgtggtwtgtgctttcagagtgtcctgtctcctccctgtaccactgagcaccgtggtagtgaatgaactaatgacttgtggaaccactgctgaatatctgtctcccctgttagaaggaaagtagctcaagggcagggactgagcttctccagtgcagtcctgtttgctgagcacctaaaaagtgtcttgcacatagagctctataagtgggcttgacacagtaaatgaacaaggtgctgcctcctggcccctctaggactctaacaagcctacttgagttcacctgctggctctcccatgtttgctcatgcagtcgactttgcctcagcttgacttcccctgatggctcttatcctttcagggttctacggttgccagagaagcgagcgacaaggagaaggtatgctggtgctgagcaggaatggaagggtcgcttggagtcagaaacaactcctgtcggccatcctgtccctcgcccaccccagcccctagcccagctcccagacatgccrtctgtcaacatgaaatgccgtgtgtcatgaatcacctgtctgtccttgtgctaggcctagaccttggtctctggtcttttacctctgccctcactacgttcttcatagtcctgctgggatggcagacatttctatctcatagtccagcctgagtcagtcagtggctgcctgagccctgagctggtccaggctcaacaggaaagaatcctttagtcattcctcatctttcatgtgtttgccctccctgcccacccaaagcctgggactagaggctcctgcactgctgatttagcaggttgagggtcggtacactgacaacccctccttcccctttctgtatagttgctcccrgcagaacagttgggtgtccctggggtgaattaatcaggcttacccagcctaactgctgttgctctcctaggccaaggacttgccaacattcaaagacaatgacttcctcaatgaagggcagaagctgcatgtgggagaggagagtaaaaagaacttcctggagaaactgaagcgggacgttgaggtacttactaaccttcattttcacctgcaaggctccttctgtacctagagtaggcgcctcttaaaccttaagaagaatggaattcagtactttccaggagtatggacaaaagggtggtgatttgagcagcgtgggcacttatgggcacctaaagcaagtgcaaatgatcattccacctgacggagcatagttggcgccagtaggacctttgtaatttagtttagaatgcttttcccttttcactaattcattccaacacctttttcaaactcccttctgctgttgtccctacaatggagagggcatctggccatcagagctgtaggaacccagctattaaggtcctgtaaccccaacattttgggaggctgaggtgggaggatcgcttgagctcagcagttcaataccagcctaggcaacatagcaagacctcatctctactaaaaattaaaaaatttagccaggcgtaggggcacacacctgtagtcccagctacttgggaggctgaggcgaaaggattgtttgagcccgggagatgaggctgcagtgagctgtggtctcaccactacactccagcctgggcaacagagcaagacattgtctcaaaacaaaaaccgaaaaagttggctaagcatggtggcttactcttgtaatcccagcaccttggaagggtgaggcaggaggatcactggagcctggcagatcaaggcaacatgagctgtgatcatgccactgtgctccagcctgggtgacagagcaagaccctgtctcaaaaaacaaaaatccactaatcaggttcttctctggctctggctctgattctccacttacctagcaaacttctgtttgtaatctggggaggacaggtgctaaatagtgaaaatgttatctggaccacttgataactcagcgtctccttctcttttaataaattgagaggctgctcgttaaaaccaaatcctacaaacaaacttgggaaaaaaaattttttttaattgtggtaaaatacatataataataggtgttttttttgtttgtttgtttgtttygtttttttttaggagattctcgttctgtccccaggctggagtgcagtgcagtggcacgatctcggctcactgcaacctccgcctcctgggttcaagtgattctcctacctcagcctcccaagtagctgggactataggcacgcaccttaaccattttgatatatagttgagtggcattaagtatattcacattgttatgcaaccagcactaccattcatctctgaacttttatctttcccagctgaaactctatacccattaaatactaattcccaattccccctccctaacccctggcaatcagtgttcaattttctgcccctatgaagttgactactctaggaacttcacataagaggaagcaaacagccaagcgaggtggctcatgcctgtaatcccagcactttgggaggctgaggtgggcggatcttctgaggtcaggagtttgagaccagcctgaccaacatggagaaacccagtctctactgaaaatacaaaattagccgggcatggtggtgcacgcctgtaatcccagctacttgggaggctgaggcaagagaatcgcttgaacccaggaggcggaggttgcggtgaccctccagcttgggcaacatgttatgaatgaaactccatctcaaaaaataaaaaaaaaaaaaggaagcaaacagcagttgtccttttgtgactctsttattttgcttagcataatgtcttcagggttcatccatactgtatcatgtgtcagaatttttttctttttattatttatttatttgttttgagacagagtctcgctctgttgccaggctggagtgcagtggtgcgatctcggctcactgcaacctccgcctcccgggttcaagcgattctcctgcttcagcctcccaagtagctgggactacaggcgcgtgctgccacgcccagctaatttttgtatttttttagtggagacggggtttcaccatgttgaccaggatggtttcgatctcctgacctcgtgatctgcctgcctcggcctcccagagtgctgggattacaggcgtgagccaccacacctggccagaatttctttctttttaaagctgaataaggctgagcatggtggctaacacctgtaatcccagcagctcaggaggctgaggcagaaggactgcttgaggccagaagttggagacctgggcaatttactgagatcctgtctctacaaaaaattaaaaactagctgggtgtggtgacatgtgcctgtagtcctagctattcaggaggctgggtgggaggatcccttgtgcctaggagttcacggttgtggtgagctatgatcatgccactgtgcatcagcctgaactagagggtaagaccccatctctttaaaaaacaaaacaaaagctaggcgcggtggctcacgcttgtaatcccagcactttgggaggccaaggcaggcggatcacgaggtcaggagatcgagaccatcctggctaacacggtgaaaccccgtctctactaaaaatgcaaaaacaaaattagccaggtgtggtggtgggcgcctgtagtcccagctactcgggaggctgaggcaggagaatggcatgaacccgggagacggagcttgcagggagccgagatcgtgccactgcactccagcctgggcgacagaacgagacctcatctcaaaaacacacacacacacacacacacaaaaactgattaatattccattgtatggatgtattacattttgtttattcatcagttaatggacacttgttatatcagttggggttctccagagaaacaaaacctataggatgttttgtaaatctctttataccaagatatttattttttattttatttatttattttttttgagacagagtcttgctctgtcacccaggctggagtacagtggcgcgatcttggctcactgcaagctccgcctcccgggttcacgccattctcctgcctcagcctcccgagtagctgggactacaggcgcccaccaccatgcccagctagttttttttgtatttttagtagagatggggtttcaccatgttagccaggatggtcttgatctcctgacctcatgatctgcctgcctcggcctcccaaagtgctgggattacaggtgtgagccaccacgcccggccctaagagatttattttaaggaattgtttcatgggattatggataccaacgagatctgcagtcagcaagccggaggcccaggagagctggtggtgtggttttattctacaggccatcaggccaccaggcagaaggagttccctcttcctcaccggagggtcaccctttttcttctcttcaggccttctgctgattggatgatgcccatccacactggggagggccatctgctttactcagtccaccagttcaatgctcatttyacccagaaaccctcacagacacacccagaataatgcttgaccaagtgtctgggcactcaggcccagtccagctggcatatacaattagccatcacacttaggttgcttccacctygtagctgttgggaataatgctactgtgaacatgggtgtcataaacttcgttttgctaggaagcgtttccttagtcacccccaactmtgttctttccttattctgcctttcatcatctgacattatttgtcctgagtctttgtccttctcccttttctaccctctccccctactgtggttctgagaagaatttaatgcagtttactcagtgcatttgttttcaatgcatgttgctttataaatgttctcaggtgggtggagggcatggtgcatggaccttctttttcctgggaccctagccccttctccctgggccttgagaaggctttgtctggaagtgctcagagtggcatccctccctcccttcctcttccaaggagatcctgctgggctcccatctttagggctccttgtccttagttgtgttctgggctcgtgcatagagctgctctgcttccatgatgattctcctcctagttctctgttaggacctaacatggtggtcagtctaacagtctcctagtgaccactgtatgatggtgactgcactcttgcctcattattagctaaactggaatgctagctggccatttccatcctgtatcattccatactttgtcttgaaatcctagataaaagacttgaaccaccaccctgctcacagcacccattatacagatgagaaaactaaggcttggcaaggggagtcacatgatgctaggggaggactttcccccagcaccacacagcctcttttgaccttcagggaatgggttgagaatattrgttggttctggctgccattcttgtatggttttgtgttcccttttccttttttttctatttttacctgggctgaaaagtcgatgacatagttttttcagactttgtctctgaggccagttagaagtatattttaccttgcaacccaatggatacacacaactgaaacactgtctacccttattttctgtcatgtattctgatattttctattctattttattatacagtagtccccccttatcagcaggggacatgttccaagatccccagtggacgcctgaagccacagatagtactgaaccctgtatatactatgcgtgaattttttttccttcttcacaatttcacggatagaagatttgttcttacaggagatcttagcaacctcagcatgcaatttattttctttgtaagtcaagagctttcaccttttcacttaaagctggccaggtgcagtggctcacacctgtaatcccagcacttttgggaggctgaggcaggtggatcacttgaggtcaggagctcgagaccagcctggccaacatgatgaaactgtctctactaaaaatacaaaaattagctgagtgtggtggtgcatgcctgaagtcccagctacttgggaggctgagacaggagaatcacttgaacctgggaggtggaggttgcagtgagccgagattgcaccagtgcactctagcctggtgacagagcaagactctgtctcaaaaaaagaaagcactttatggcttctctttggcatatctgaattgccaacatcactactcttgctctgtggagtcataatgaagtcaaatatgggttacttgaatacaagcactgtgatacaactatagtgaactgataaccaagacagctacggacagctactgaaagactaatgggacgttagtgcatacagtgtggatatactgcacaaagggataatctgcatcctgggcagcactgaatgggacatagcaagattttatcatgctactcggaatggtacactatttaaaaacttatgaattatttctggaattttccatttaatatttttggactgtagttgaccacaggtaactgaaaccattgtggataagggtggactactgcatttaatttaaagaaatyctagttccagcccactacattgggtttaggactcataatgggttgaaattttgatctgaaatatattgttgtgtcatatccatcgctccatcctcttccatagtatatcatttcattatttctttcctcaaacttggccatggcctctttttttaaaacaagagacagggtctcactctgttccccaggcttgagtgcaatagtgccgtcatagcttactgcagcctcaaattcctggsctcacgcgatcctcccacttgagcctcccaagtaggtaggactacaggtgtgcactgccacgcccagccaatttttaaatttttttgtagagatggggtctcatcacgttgctgaggctggtctcaaactcctggcctcaagtgatcctccttaattggcctcccaaagttctgggattacaggcatgagccaccgtgcccagccaccatggcctctcttgatcccaaaccgtcatgggctgttccctcttcctgcagtgctcgttctatctttaacctgcagtacttgcctcactgactcctcttcatccttggcctcaactcctttcttcagggagggtcttgctcacccctcactgtaaactcccacagctccttgctttttttttttttttttttttttttgagaccatctccctctgttacccagctagagtgcagtggtgtgatcacagctcactgcagcctcgacctcctgcctttcccctgctgaatgactgtcttccccattagacttagagagctcgcgagggcgggtgctctgatgccttactctctgttgaatttcaaaactgtttgtagaattgagttgaaaggaatgcctttcccccctttctggatgtcactgggatgtcctgtgtaacctcttcttccttccatctttccatccttgcccttcctagttcttggcacagctgaagatcatggactacagcctgctggtgggcatccacgacgtggaccgggcagagcaggaggagatggaggtggaggagcgggcagaggacgaggagtgtgagaatgatggggtgggtggcaacctactctgctcctatggcacacctccggacagccctggcaacctcctcagctttcctcggttctttggtcctggggaattcgacccctctgttgacgtctatgccatgaaaagccatgaaagtaagtcagagcctgcgcctgctctgcacagccctgccctcatcctaccccctcagctcattgtttagatccttctaggggcatctggacctccacctcattcattgctgcctttgacctctttctgcctccagattcccatccagggtcaccacctgaacctggggctcctcctctgccaggctttcctatacttccctgcttgtcctgrytgactgaagagtggttctgctctggttcatgagatgaaccaaactttattcatactgtcctgtcagccccacagagtgactgtgaagatccaataagataagagctatgacagctggaaaggactccactggtccttttctcagccccaacatgataaggatggagctgagccttgtgtctgggggttgtagcagtgcccagctgctgtctgcccttctcytgccccctcttccttcttccctgctctccttgtccctccaggttcccccaagaaggaggtgtatttyatggccatcattgatatcctcacgccatacgatacmaagaagaaagctgcacatgctgccaaaacggtgaaacacggggtgagtcctctccatcttcatccagggcccagctgggtcggtgcatctgtgcttaccctcagaccccagggagggcagtctcaggcctcctgctccaaggaacacactcctgtctccttcttcccaggagagcagactggaagagcagcctgcctgccttgccatgttccctgccttcacccacctgctccctgccaggctgggcccaatttgtttatcccccagttctccagccctcggggccaagcctgccagtgtctttccccagggcctgctgggcctgttgtgcatcttgttgaagggcgagtaatagctttgtttccatgcccatactgctccccacaggcctgtttccctgtgggcctgaagccctgttctccatgtagtggcccccacagagatccagagccgcgttgccacctccccactgcctttcttctacttcggtgcaggcctggggttataaatcacaggagtggggccaggacagttcaggacttgtatgccwcttcctgaggtggtctgctcagtcttggtggggttgggggtggtattcagctctgatactgagtaagaggcttctgaataccctggctccccccatgtgcagcctcctgattggggcacaggaactcaacctgaatcagcctcttgtgtattacaggcaggggccgagatctcgactgtgaaccctgagcagtactccaaacgcttcaacgagtttatgtccaacatcctgacgtagttctcttctaccttcagccagagccagagagctggatatggggtcggggatcgggagttagggagaagggtgtatttgggctagatgggagggtgggagcagagtcgggtttgggagggctttagcaatgagactgcagcctgtgacaccgaaagagactttagctgaagaggagggggatgtgctgtgtgtgyacctgctcacaggatgtaaccccaccttctgcttacccttgattttttctccccatttgacacccaggttaaaaaggggttccctttttggtaccttgtaaccttttaagataccttggggctagagatgacttcgtgggtttatttgggttttgtttctgaaatttcattgctccaggtttgctatttataatcatatttcatcagcctacccaccctccccatctttgctgagctctcagttcccttcaattaaagagatacccrgtagacccagcacaagggtccttccagaaccaagtgctatggatgccagattggagaggtcagacacctcgccctgctgcatttgctcttgtctrgattaactttgtaatttatggagtattgtgcacaacttcctccacctttcccttggattcaagtgaaaactgttgcattattcctccatcctgtctggaatacaccaggtcaacaccagagatctcagatcagaatcagagatctcagaggggaataagttcatcctcatgggatggtgaggggcaggaaagcggctgggctcttggacacctggttctcagagaaccctgtgatgatcacccaagccccaggctgtcttagcccctggagttcagaagtcctctctgtaaakcctgcctcccactaggtcaagaggaactagagtacctttggatttatcaggaccctcatgtttaaatggttatttccctttgggaaaacttcagaaactgatgtatcaaatgaggccctgtgccctcgatctatttccttcttccttctgacctcctcccaggcactcttacttctagccgaactcttagctctgggcagatctccaagcgcctggagtgctttttagcagagacacctcgttaagctccgggatgaccttgtaggagatctgtctccctgtgcctggagagttacagccagmaaggtgcccccatcttagagtgtggtgtccaaacgtgaggtggcttcctagttacatgaggatgtgatccaggaaatccagtttggaggcttgatgtgggttttgacctggcctcagccttggggctgtttttccttgttgccccgctctagacttttagcagatctgcagcccacaggcttttttggaaggagtggcttcctgcaggtgttccacctgccttcggagcctgccacccaggccctcagaactgagccacaggctgctctggccaggagagaaacagctctgttgttctgcattgggggaggtacattcctgcatcttctcaccccctcaaccaggaactggggatttgggatgagatatggtcagacttgtagataaccccaaagatgtgaagatcgcttgtgaaaccattttgaatgaatagattggtttcctgtggctccytccaaacctggccaagcccagcttccgaagcaggaaccagcactgtctctgtgcctgactcacagcatataggtcaggaaagaatggagacggcattcttggacttcactggggctgctggattggatgggaaaccttctggaagaggcagatgggggtcaaaccactgccttggccccaggaaggggccataggtaggtctgaacaactgccgcaagaccactacatgacttagggaacttgaaaccaactggctcatggagaaaacaaatytgacttgggaaagggattatgtaggaataatgtttggacttgatttccccacgtcataatgaagaatggaagtttggatctgctcctcgtcaggcgcagcatctctgaagcttggaaagctgtcttccagcagcctccgtggcctcgggttcctaccggcttctctgcatttggtctgctgatcatgttgccataatgtgtatggaaagtgtaacacattcttactggttaaagacgactaccaggtatctaacttgtttaacattgagtttgtgtgtgtgtgtgtatgtttgtgtgttttgtatattgtttacattttgagaggtagcattctgtttcaaatgctttttgtttttctgacagtattgttgactgggtcataacattttgagctgtggtttggtggattttcaatttttttttttaaaggtcattcgctgtgctatcttcaaaaccttgagtttggcccccaatttttggcattcaaatgtttaaaagctatttatcttggtttatacaagtttcctttctcttctttttgtcatggtattctatttggtctgcagtttgaatgtagagaaagtggactgatcccccaagcgttgtctgcccccactctttcctccttgggtcccgccattcttttactgggcagtcgagggcattggaggggaagtgactgccctcagcctcactccctggggccatgaagaaaagctaaacagtctcatggcatctcagaataatgttgggtctcccaagaagaaaggtgtaagaataacgacatggctgattaggcgaggccaggatagggctaaggccaggattcctggctggcatccagtcaccccttctcccatccttccccctcttcttccacaagtccgcagccgagacactgtagtctcccagccacagtgatgagtgccctggagactccactgacctctagatgaaggcccctggccctggttcctgttaattaacctctgggtctttgagtcccccagcacaaacttctttcctgtaccctgcggcttggggtcacagggcatgccgggaagccacagctgaggggcgcagactgaagcagtgctccacctctccttctttagctcaggggttgctggtctgtggcaggcgccacgagtggcccctgtggctgttctcagtggcagtctcttaagttcccaccacaggcagctctttatcccctctccctacttsactctttctcttgcctgtgcttttggcctcaaacaggcctgctggtagcgctcagggcgtgaggctacactcctgccctgcctttcctgtcttcatggtctgccagggcataccttggggaggtggaccaaagacccaggactttttgcagtagccagtcctaccccccagttgtctttttaccaattcagggtgggagagaaaactgcagcaccccagcatgtgagttactcaggtgttgggggctagaagggacagtgcgtttaaacaacactcagagctctggccttaaacctgtggccccccaagtctaggagcctcatctcttyctggcagtcatgcgggcaggaggtcctgaaagggaaaacccattcagacaactgttccccaatctaccagccatctgcaggggtcagtgaccgtggccctctccctcctctagaatgtgccacttatgaagagtgccccatggggaaaaggagactcagctgtcccttggcagcttgtgccagtatcccagggcagaagtttccacaggagcctcttgcccttgcgcagagccactgtgagaggcggtgggagccaacacccttgggggagggggcagtactgctcggcacatcccagcatcaggtcagatcaytgaaattaaaaaatgtgaattaagttcatatccaccttttggggaagcaggacaaaccaccaccccaccaagtgtgtgacttctccatatcccactgcagtttccattttttaaatgggaattttcaatcccctgtgcttgtctaacgtctgctttaaaaagtttgagaccctgttactgtttgaaaatgcatgcatgttacgatgaatctccaacctgaggaaaaaaataaaactcaaaaagctttgtgtacatctgttatgtgtgagtccttgggaaatgaaccttttttttttcttcccagaattaaaaagttttggtcctagctttagaggcagcttcggctaaatcaatgtatggcttgagtttggagaaagaatatggtcaatgacatcccgctttcagatgcaattaataaacagtggttaaaagcacagcaccactggctgggtttggtggctcacgcccagtacttggggaggccaaggcaggaggatcacttgagcccagaagttcagtaccggtctgggtaacatagtgagaccccgtctctacaaaacaagaattagctggatgtgatggcacatgtctgtagtcccagctactcaggaggctgaggcaggaggatcacttgagcttgggaggttgaggctgcagttagccatgattgcaccacagcactccagccctagcaacaatgagactcttaaggaaaaaacaaacaaaacaccacagcaccagagccaatctgcctgttagctgttactaccatgcacatggaagaatggacaaccccccsccgcccccccgcctccagctgtgtagaacgaactctggctaggagccactcacctgacataactttgaacatgtcacctctgtgcacctcatctactgcatctgggcatttagcttaaaacccagtagttctcaaagtgtggtcttggaccagcagtgtcattagcacctgggagtcagaaatgtaaattctcaggttccaacccagatctactgaatcaaacttttaatgagccctccaggtgattgtgatgggggctaacgtttgggaaccactctgctatgcaaactttctacttgcttattaggccatctatgtactgcagattgcaagctggaatcacttggggaattctggaaaagacaggtacccaggcccctaaaaggccaattggaatctcaaggggtgggatcaaggtatgtgttttaggaattccacaggtgactaatgagctggccaggttaagaaacactaatctagactacttatgggtacttgaccaaatttctacctgaagcaataaaagatgtaagggttttcccgtagagtttgagtgaaaaggattctaagctctggcatcaatggaacatgagtttatgtcctggctttatcacttattaaagtagacttgggtaagttatttaactgtccttcttctccaaacaaggataatctcaactaccttgagtcattatgatgaataaattctagatcgtgtaaagcacttgtgtggggcctagcacacagggagcatgcagcaagtgacatgtggattgtccccactggcacgcactgatggagtagagcacgagccagaaagcaagccgagggccaggccacacacacttgagtggctggctgtagctgcccagctagggcagagatctgcaggaaagcatcaaagacaaaagcaggagtgaaagacaggctattttatttcaaaaaaagaaaaaaaagtgggctctgggaacagggttagtccattcgggccttcagtgtcctggtggtgattttgtcyttctcgctgcagagggagaaaatcacaagaaaacatctctacccatctggaccgtgactgtgactagctctcctggccctcagcaccaagccctcaagccctgcggcaagggagcagaacaaatagctgcccgctgcctctaggtgtaactatcctgctctagttcattcctgctagctcatctcctccgcctgtggtgaggaaggagggataggaacagagacctgggccgactttccacaggtggaaccacctcagggaggctttcccagaaaatgattcagggccagacttcacagctctcaaaagaagggaaggagcttggccgggcgcggtggctcatgcttgcaatcccagcactttgggaggcctgaggcaggcggatcacgaggtcaggagttcaagaccagcctgaccaacatggtgaaaccccgtctctactaaaaatacaaaaattagctgggcatggtggcacgtgcctgtaatcccagctactcaggaggctgaggcaggagaatcacttgaacccaggaggcagaggtttgcagtgagctgagatagtgccattgcactccagcctgggcgacagaatgagactccatctcaaaaaaaaaaaaaaaaaaaaagggggaagaagctcctccaagcctagagaacaagccacttaggaaggagaaggtgtggtgtgtttcaccccaaagaacataaaaaaaaaccttcggtggtaaattctgttttttgggttttttgtttttgtttttgttttttttgagacagagtctcactgtgttgcccaggctggagtgcaatggcgtgatcttgactaactgcaacctctgcctcccaggttcaagcaattctccttcctcagcctccctagtagctgggattacaggcacgtgacaccacgtctggctaattttatgtatctttagtagaaacggggtttcgccatgttaggctggtctcagactcctgacctcaagtgatctgcccacctcagcctcccaaagtgctgggattacaggcgtgagccaacgcgcccggccaaatactatttcacggtaattaagcaggctatcccccaaaagggtccaaatgcttatcctgcaatgtaggaaagtggttggaaggatacctcctactctatccaatcaggttcctggtgatggccccaaacaagtaaaaggacaaggaggatggcacttagggagttggctgaggcttggaaattggtctctagagctcagaacatcacacagatctgggctggagagaggatgcgagccacctagaatttcaatccatctgcagtagctttgttgtggctcaccccaacacggatccctgagacttcggagacattgttaaggaagaaatgtctcttgtgagcacggggtcacagaacctcacctgacaagaggccagaggaagctgggtaggctgccagttaccagccatagggaggcatggacttytgctcacccaggactgccaaaagcacctttcttatctcacacctgaccagggggctgggaaaatggggtgtatgctcgtggagaagggagagaggcagggtgtctgcagagcttctagacttctcccagcccatactcacatgatgtggacaatgactcccatgcctgacactgcatcccggtccacagcattcakcatggcttgggagatggtttcaaacaggtgatccggatcctgccaacagagtggaaccccttcaaaccacagcctctggctctgatttggtctggtcccttaactctcttttttctaggctcaagattcccagctctggccccaagacatgmctgaagtaagggatgattcccaggatgtgggaagcccctctcagctccttccttggaaggaagcagaattatgtaaaggaaagtgaaagagacttcaagccctgaatttcttttactaatcagcagtgtgacattgggcaaatagtatgtctctcttcactgagcctcagtttctctgtaaaatagggagaagaatccctatttagctccagtgtgctttagcagctgtctgatgggctctgatcctggatatcttaacaggtacctcaaaacccaacctgtccaaccacaaacccacttcccccaaacctgttccttctacattctgtcttggctagcctagctggagaacccagccatcctctgtctctacatccttcgcttctgttttaagtgactaagtccccttgacagctgccttcctgcctccccactgccactgtctttgctcaggacctcagcgcctcctgcaggcggtaacagcctgtcacgtccacctaaaggcacctgattccctaggttcctatggcagaggacagagttcaaactccttggcatggcattcaaggccctttgaggtctcatctcagtctccagcatcatttctccccatgtttaacccacactccagccaggctcagctctccagtcactgagcatacctgccccttcctgtacctttgcccccagaccctttctttcctcctcttcccaacaaactgcagttcaacaggtatttggatgtgtcttgcttcactggactgcagtgggcccttgaaagcagactgtacctgctttccccagtggccggaagagctggcacttaataacgacagccgaccctcgccgtcaagcactatctcatctcttctcacttgtttttgtgctcgcttcggcagcacatatactcatttgttttcctcagcaccacttttttttttttttttttgagacggagtttagctcttgttgcccaggctggagtgcaatggcacgatctttgttcaccgcaacctccgcctcccaggctcaagcgattctcctcagcctcccgagtagctgggattacaggcatgcaccaccatgcccggctaatttaactttttttttagtagagacggggtttctccatgttggtcaggctggtcctgagctccaaacctcaggtgatctgcttgcctcagcctcccaaagtgctgggattacaggcgtgagccaccgcgcccggcttcctcagcaccacttctaaggcagacttttttatcctcattttacagtcaaggtagtggaggcagagagggaaactggcttctccaagaacaataactaaggtggtgggtggatccaggttgccaacccagacaacctgttgagctgcctctaaccctacactgagttaaatgtttgctcagtgaatggatgcgagaaccctgtaaacccaatgtaaggaattcttactgctgtggcaaatatctaactgtggtctcctaacagaagatgctctcctctggagccagccagccagcctggcagatggaatttctggatacccttccaaggagcagcagctgtggctttctctcccacctgcaccattctccccattacctgccacataaacacacttttttcctaatgaccaagggtgggtaactcagagcccagcccctctccatgccaccaacgtaccatgttgggctcccagagggactcacacattccgtacatttgttcggcgcaggtgccactgaccacaaagtcatcagtcaccatgkggcagccgatgaggtctagagagcaaatgaagggcttaaaggtcttcgggtccaacccggcaatgactggctcagtgtagtaagggccaaacctgtgggggccagcatcagagagagaaaccagaactcaagaacgctcgctttcatgtttaagcctattcagacaaggccccggcctagacccagacccaaagggaaatggaggacctgtttaggaagatcacctttccctgaggccagctccctctcccttctcctgccagctagaaatattctaagacttttccactttcttttcttcaacacttacctttctatccttctcacctctgaccctcttgtcctccttctttctttcagaattgttttcttctaatcctccctctcctcacccaaggtcctaccatcactcagtcctctatgtgtatgtttatacctctactcctttagagaaaagattggaggcagtttatatgaaaaacactgaaaaataaaactaaaccattaaaacataatacaagataactcagactgaacacaaagttttgttttgagccccctagcaggcaaggcaaagagggatactcagtggctgggttactctcattgtcaaaaggaaatggcagctcatcagaaacttgttctagacactgatctttaagaaaaatcagtcttgggccaggcgcggtggctcacacctgtaatctcagcactttgggaggccgaggtgggtggatcaccaggtcaggagatcgagaccttcctggctaacacggtgaaaccccctctctactaaatatacaaaaaaaaattagctgggcatggtggcggg

SEQ ID NO: 95403 - DNA, 25724 bp, Homo sapiens
tatcttggacacttatgctgaattatgttcttattattttcactggttataagctattccttgtacataatatttaaactatccaaatatccagcatacatttccatgtggctgccatcggctgttgatgccatgaatgaaatggctggttagaaagccaaaggtcttcttttttcaattcctaatgaataagtaaaatgccagatctctttggtctcaaagcaaattgctctgatcagatcaaatatctatgtaatgaaaagagacttacttaaatttgggattctgcttaaactttaagttgaatttgactgtagtcattcattctttttatatatctctgtcaggtatgacattaattaccaggtggtattatactctactttgagtttggacatcactttcagttaaatttctgttgttattgtggcttttttttttttttaaccccactgaagatggaagtagagcagtctgccatctcctgctgttctttctctgtgccccctaattgcttggtaatctaaaattattctgactttccacatactgtctttaaaaaccaattgtagcaatctgcccgcctccaccctttaagctaaatctttcactgtgctggatacatagacactcgataaatgtgtgatgatagttctaaaataattatgctatatatcagggttctgtatttttgagcaatatcattattcctatgctgtgatgttaaatggaatttattttacactagtaatagactgcttaagtggctgatttgaaacctttctctaaaaaaacaaaaacatctggcagatgagtgacacaaattcattctcttaaaggatagaatttcaagttaaggataaggcacaataaataggcacatagaggacatctgtttttgtttttggttttggttttgtttttttttgtctctctgactagctaaactgccaactagaagaatggttgttatgtagtaactcagaagaatcttttaataagtttcttcttttgtttcaaaacaaacttgagcttcatttcttgccacctctattctttcttcccacgttgggtgactgaactgatgcttattctagttttagaagaggatccacatttaatgtaaggcataaatatgccttttgcaaattattgcttgttctccagtgaacatttgatcatattcaacagaaatccaccatataaaccataatccttgaattgccccttttaaaatagattggttaaaaccaaaaacctataagagagaaatgatatttcattgtattgtaggtttgggaatcctggttagatttataatttctggccgggtgcggtggctcatgcctgtattcccagtactttgggagcccaaggtgggtggatcacctgaggtaaggagtttgagaccagcctggccaacatggtgaaaccccatctctactaaaaatacaaaaagttagctgggcatggtggtgcgcgcctgtggtcccagctactcgggaggctgaggtgggagaatcccttgaacccaggaggcagaagttgcagtgagctgagatcatgccattgcactccagcctgggcaacagagcgagacttcatctccaaaaaaagaaaaagaagaaaaagatttataatttctgagtcccctaagtccctttctcagtttgcaataatcttacgtccatgctattgacactaattttgaaactggaaagctaattaatgacatattcatgtgttctttcatctaataaacatttattaatgtatagttctacaccaggcattctgaagggtccaaaagaaagttcctgccctctagtagcacataatccgttatttctcagcacaccatgccatctgtttatcattcagcagttaagtaattcatcacttcatatttttaccaaagtatatttacaagtctgtttatctggatctggcaaactggaaaatgtttgaagggatactcaggctttgatccatgccaacatgaaaggactccaagcacatttaagtaggctggtcttttcatcatgcatgattttttttttagtgcaaatttagactttagtttgggaaagagaacagtatacagtatcctttgtaagataaatcacaacaacaaaaattaagttttattgcacaaagtagataaatgagaaagtctttcttaaaaaatgcttcttaactgtaacagcaaaactaaatgcatattttatcaaccccttatttctaattgctgtattcatttccacccttaaactatttaagcatttcatctgctgaaagtccttatatacatggtagacggaatatttctccattaatgatagatcaaaatgaagatatttaaaaattaacaaaatcaggccaaggcaggaggatcactttagcccaggaggtccagaccagcctgggcaacacagcgggaccccgactccatttaaaaaattaaaaaaaaaaaaaaaacttttaacatttaaaaaataaaaattaacaaaatttcacttattccaggacacgctggcatttggactcagtgaaaagggcacctaaagaaaataaggctgactgaatgttttccataattttcacacaataacagtccctttctatccagcttgccttccatttatctctagggttagcttttcaggcaacatccttggtcattgcccagaaagtacctgagctatcagtgattggaatggcacaggaaaccgaatcacatgggtgccctccccttggttttcaagtatcttggagttgtgcacaaaaattaggtcatgccttcagtgtcttgttctttaaacctaccctttgacaatcaggtgctaatgattgtatactattaaaaccagcacataagtattgtaaatgtgtgttcctcctaggttggaagaaatgtctttccttctatctgggtcctgttaaagcgggtgtcagttgtgtcttttcacctcgatttgtgaattaatagaattggggggagaggaaatgatgatgtcaattaagtttcaggtttggcatgatcatcattctcgatgatattctcactttgtcgcaaatctgcccttatcgtaagaacaagtttcagaattttccctccactatacgactccagtattatgtttacaatccattggatgagtgcagcattataagaccttggtgcccagaaaaatctgtcctttttggtaccaaacctgaggtcttttggaagataatgtagaaaaccactacctattgaaggcctgttttggctaatctgtgcaaactctgatgatacctgcttatgtggattcttttccacactgctttcatttttaagtataaagacttagaaaactagaataatgcttttacaaataattaaaagtatgtgatgtkctgggttttttccttctttttagaaccctgtatttaaacaagccttctttttaagtcttgtttgaaatttaagtctcagatcttctggataccaaatcaaaaacccaacgcgtaaaacagggcagtatttgtgttcctaattttaaaaagctttatgtatactctataaatatagatgcataaacaacacttccccttgagtagcacatcaacatacagcattgtacattacaatgaaaatgtgtaacttaagggtattatatatataaatacatatatacctttgtaacctttatactgtaaataaaaaagttgctttagtcacgtgggttkttttttttttccaatttttaaaatgctgaaatagttttgaacctacaggaaagttacaaaaacaatacaaatcttcttcacccaaaccttccagttgttaacattttgccatatttattccattaccttgtctttctctaatatgattctctagcacccttaaattctctagtgaggacctccaaaacataaggacagtccttgcattgccaccataaagtcctcctaatcaagaaatcaacattggcacaccaccactcattccatagaccccattcaaatgatgccagccatcccggccatgtcctgttttcctctctggccttggatcctggccaataccactttcttgccttttgtcgtcgtgtctcagttcttcagtctggaatgttcctcggccttactctaattcgcatgtgcctgagtctcagcacaaggctttgattgttcagcacagctctccagctggctctattcggtgttgcctcacaaccaggctgtgtcacacactcttggcagagatgccacgatgccatgctctcttcagggtatcatgtggagagacacacgagggccacgcatcccaccaccaggggtgttcccttcggtcgcgtagtcaagctaatgtcctcattgttttctcctttgtatttatttatttatttagagatggagttccgctcttgtcgcccaggctggagtgcaatggcgtggtcttggctcactgcaacctccgcctcccaggttcaagcgattctcctgtctcagcctcccaagtagctgggattacaggtgcccaccaccatggacggcgaatattttgtatttttagtagagacaggggtttcaccatgttggccaggctggtcttgaactcctgacctcaagtgatccacctgcctcggcctcccaaagtactgggattataggcgtgagccaccgcgcccggcctctcctttgtatttaattagcatttgtgaagagagattaaggtgtgccaatttttttggttttttttttttttttttttttttttttttttttttttattttttgggaggcagggtcttgcttcatttcccagggtggagtacaatggcctggtcacggctcactacagcctcgacctcccaggctccagcaattctcccaactcagcttacggagtagctgggactacaggtgtgcgccaccatgcccagatacgttttttattttttgtagcgatgggggttcacctgttgccgaggctgttctcgaattcctcggcccaagcaatcggcctgcctcggcttcccaaagtgttgggattacaggcatgagcccccatacccagcctcaacttggatgttttttgccctccattttttttctctcacaggatagacttgtggacaaatggatcacttgcctctggtgcgtttttttgtttgtttgttttgttttgtttcttaatttagcgacgaggtcttactatgttgcccaagctggtcttgatcctcggctcaagcaatcctcctgccttggcctcccaaagtgctggaattacaggcgtgggccagtacacccagccctagaactgctttgatcattgtatccccagaaactagcacacaacgctgcacacagtaggtgtgcatgcctgtaatcccagctactcgggaggctgaagcaggagaatcgcttgaacccgggaggcggaggtcgcaatgagccgagatcatgccactgcactccagcctaggcgacagagcaagactccgtatcaatcaatcagtcaatcaatccaagcaaaacaaaactggctttgaacagtcagcggcatcccaccagggattgagccccagtgtggggcacactctgtttacattagctagctcatttattccccacaaaagccagacaaggcaggtactaattatgatcgtgcgatattaaacatggagaaaccaacgctctgataagttcgttttattgtgagaataaaactgctcaatgggcgctgttattccaagcgaggtcaggatttccggattctaccccgctccgcccctggccccgccccgagaatgtacgtcccgccaggccccgccccggccttgtcccacccaccccgtccccgccccctgtccgtctcgccctagtcccacctcctcgtccccagtcagtcctgcctctcgaaccgccccctgccttcgccgaggcagggagaggtgcctgcagtgcgagccgtggacgctagggggcagccgctcggctcgggcccgaccgctctgggctgcgctcctcgcttgccctcggactcggctcccgctgcgagcggccgccctgcccgcgcaccgcgctcagcgcccaccgccgggcttcccgcgccggacccagtacctcggctccccggggccggaccgaggccgcaagcagcgccgcggggtgtggggcggacccaggagatgaaatgacaacgtcaaccctccaggtacttcgtgcggcccggcccgacttcggaggccgaaggcagcggggcctgcgggccgcagagccgggcggcgggcgggtggtcaggtgggcgcctcccagccccggcctcgcgaccccgctccggccgccccctcgccgcttccgcccgtgtctgtttccacgcgctcggagccgggtggcatctccaccctcaggccttccggccctgcccggctggcccagccccagggccgcttcgtgtagccggcgccccggtaccgccgtggggatcagcctcacccgagccgcacaggcaccctcaggaagctcggcccggggtccggctgggcgttcagacagcgatgctcgctccctcctctcctgtctcgctccctcctctcctgtcccgggtcctggaagtccctcgacctcacttcgaacaagccccggccccttccccaatcttcgacttcctcttctcggccagcgacccttcattcattccctagatcctgcagggtggtgctgggatggcgccacctgggtgaacaactgacccaccctctaggtgctgtcagtcctgcggggccagaagagatcaacatgctcaggcctcattccggggtttgaatctcagctctgccactcaccagcaagtgaccttgggctagtttttttttttcatcttcgggtctcgagtttcctggtctgtaaaatggggtaatgccctctaggttgttgtgatgatagctttaaattgaataattacggtaaagcattcttgtatgtctggcacatagtaggtgtccattaagtgacagccaacaaagtgcctgggagagttaggcaagacttcatggaagaagggacatcagagttccagtagcattcagagacctggaggtggaggagggcagaagtaggagcagacatggaatgagttggggtaccaggttaggaattaagagtccatagccagatcccaccgtaccaccagcagaagccgcagatcccgtctgcccaggcaggttttttatggcccgtgaaccgagaatgtttttcagtttcaaacacaggtgtatttatttatttttaaattttatttatttatttttttgagatggagtctcactctgtcacccagactggagtgcagtggtgtgatcttggctcactgcagcctctgcctctcaggttcaagcgattctcctgcctcagcctcctgagtagctgggattacgggcacccgcaaccacgcccggctaatttttgtatttttagtagagaccgggtttcaccgtgttggccaggctggtctcgaactcccgacctcagrtgatctgcccacttcggcctcccagagtgctgggattacaggtgtgagccacgggtctggcctaaacacagctttattaaggtataacttgcgtgcttaccatataactcacccgttatatatttttgtttttattaatttttttttttgagacagtctcattctgtcacccaggctggagtgcagtggcacaatctcaactcattgcggcctccgcctcctgggttcaagtgattctcctgcctcagcctcccaagtagctgggattacaggcacctcccatcacacccagctaatatttttttgtatttttagtagagacggggtttcaccatgttggccaggctggtttcgaactcctgacttcaagtgtgatctgcccacctcggccgcccaaagtgctgggattacagatgtgagccactgtgcccagcgcaactcacccatttaaagtgtataattcagtgcttttagtatattcatggttgtgtgaccatcaccataatcactttttagaatattttcatcacctccaaaagaaacccctcacccacaacccctctctctcccagccctgggcaaccactgctaatctactttttttctctgtgggtttgcctacagagaaacccactttatataaacagagtcatacaataggtggtcctttgtggctagcttctttcattatgacttaacataatgtcataggtttttacattttttaaatggcttgaaaaacagtatttcatgacacatgaaaatcctatgaaattcacatttcagggtctataaataaagttttattggaacacatccctgttcgtttattgatatactgtctacagctgcttttgtgccatcaaggtagagttgagtcgttgctacagagattatctggctggcaaatcctaaattatttaccatctggtcctttacagtaagcrtttgccagcccccattagcactcttttctttcatcctcatcttttgccatacgtgttactagagatgcggcggggctggcagtttctcaccttaccctcctgttctgtaaaactgtttctctccattgaaacttggaccccctgtgtgtgaaaaactgtatgtggctgccagaaaagtccagtgcactcttttttttttttttttttttgagatggactcttgctctggtgtgatctcggttctctgcagcctccacctcctgggttcaagcaattctcctgcctcagcctcccaagtagccgtaactacaggcacgcgtcaccacacccggctaactttttgtatttttagtagagatggtgcttcactgtgttagccaggatggtctcaatctcctgacctccggtgatccgcccgcctccgcgtcccaaagtgctgggattacaggcatgagccaccgtgcccagccccagcacactcttaggtgtattactagaatttccaaaaggagggaggggatgggtcagtgctgctccttatgggacaaagaataccttcagtattgttctaaggatagacccaagcatgaagctacagagagtgaaaaagtccaaggtactgggggtgtgtgttctggagacgagaagccaccagggagaggagcgctgccttcctgtctcatctgaaggaacatcatgcagaagagggcagacaagggcagcctgtgcctaagctcatttccaagaaggtttggggctcccagccattcattgtaggtagtagagggagcagaggcttgaaaataatggccagcactcacccctcttctcatctcttcaatccgctgagttcatttcacatcagcctggcccagcctcccctggcctgtctgttttgtcgagctgtctgtgtgtgtttctttcggagacttcttccttgcagataagagagggctgaacaaatgccccggccctgccaagagccggtcaggaggtttattgtttgctgtgcctggaaccgtgggtctgcggtgggactgcctgcctggtaactggtgccggatctgaggaggagaattctggtcatgcttcgtgcaggcgttggtgaagctgcggtttttaaaaccaggctttaaaaccatgtaggtgctttactgaccggtcgcggtggctcatttctgtaatcccagcactttggaagccaaggcgggtggatcacttgatgtcaggagttcgagaccagcctggccaacatggtgaaactctgtctgcactaaaaatacaaaaattagccggatgtagtggtgggcatctatcacttgaacccaggaggtggaggttgcagtgagccgagatcgcgccagtgcactccggcctagatgatagagtaagactctgtctcaaaaaataataataataaataaaaccacgtaggtgctttcagttcagcctaaggcactggcctacaggatttatgagattcccaaagacactcattctcacagagctcttagaaggttccagagggacacagttctcttctgttggcagcagggagcaagcaagtacttttcttactggagctactggtatgtggagcattgtgtgtaagcgtcccttcccagggtgtcactttagacagcgaaggaaactgtcttctctctgcagcctggagaagcaagctgcatggagccaggaggaggaggagagaggcctttcagtgtatcctgtgcaaacttgcagtccgggcaggactttccttctggctggctcttctctggccctgaggccgggtgcaatttctggtctccttgctaaacaaaccagcagtcacttgctcccgcgtgtcccttctgccaggctctcagctcgggtctgtttctctttcccttgaggcagcagaatagaaagtcccatgaacttgccccttgagccctgacctgagatattaggtcaggtttccacttgctgaaatccagagcgtggcttttaaccgtctgagcttattgtgaagatggccggctggttttcaaagcctyctttgaaggccyttctagccgatgttgaaaaagtaggccawtgaaayggcccgcaagcaataaatccacaggcccagcggcatccctcgtcacgtttcakccccatgcctgtgaccccagggactttccacctctccgaggaagcactgagccatttgctttgcctttccagaaagccattgatctggtgacgaaagccacagaggaggacaaagccaagaactacgaggaggcgctgcggctgtaccagcatgcggtggagtacttcctccacgctatcaagtgtgagtcacacgmggggtcctcaggctgccgcactccagaggggagsggaggagagggggtggcgcacgagcctcacaggggcccctctgtgttccctttcacagatgaggcccacagcgacaaggccaaggagagcattcgagccaagtgcgtgcagtacctagaccgggccgagaagctgaaggattatttacgaagcaaagagaaacacggcaagaagccagtcaaagagaaccagagtgagggcaaggggtgagtgtctgcagcgtccgcccaggaacctgggccctcctcacggctccctatcattcctggcgctcatgctgccttggacttccctgtgggaatggtcctcatagtgcagggatgacagtgccagcagctgctttcagggagcatggcctggagcacttccatgttcaccgtctcattggatctgacccacaagccatggggagagggggagcttggtgcagatggtagagcctctcaggacgggaccccagctctgtcacctcccagcctagtgccaggaccccgtgtgcctaccatctccacatcttggaagtggggaggtcgtggaactcacctccgagcgttgccacagggagcagtgagatgacgtgggcagtgcccttggagcttggcacacgagagcatgcaatgagtgccagctgctgtgactgtcaaagagtcacctgcctccaacaggtggggcggccggctcgggttaggagccctgccgaggtggcacaggatggaacttggacccccaaagcagggcgggtggccccgattccccagccagggtcctctccacagcctctcacctcaggtactgggttcgcccaccacggtgatcccagtcatatgaacacaaatgctggtggtatctcggaggcgtgggaggggaagtgagggggtcccccaggcaggagaggggtgrgtggtgtcagctgcctcaccagaggcgaggcctcctcctggatggagggtctgcaccacgttcccatccgcagagggagaggtctggcgaggcaggggtggaggccagggatctccaataaggattaaatcaagttttgaggatgacagattccatccagggaggaagtagccctggggtgavagtggctgcgttctccccaggagttccctttcgatttcggttttgctttctcctctgtccttcggcagtggctgctttggagtcaggggcacatgctgtccctgagtctctacaaaaagcttctggtgcggggcatggtggctcacacctgtaatcccagcactttgggaggccaacgcgggcagatcacttgaggtcaggatttcaaaaccagcctggccaacatggtgaatcccgtctctattaaaaatacaaaaaaataggccgggcgcggtggctcacgcctgtaatcccagcactttgggaagccgaggcgggcggatcaygaggtcaggagattgagaccatcctggctaacacggtgaaaccccgtctccactaaaaatacaaaatattagccgggcgtggtggcgggcacctgtagtcccagctactcaggaggctgaggcaggagaatggcgtgaacccgggaggcggagcttgcagtgagccgagatcgagccactrcactccagcctgggcgactgagtgcgactctgtcttaaaaaaaaaattagccaggcattgtggcatgtgcctgtaatcccagctactcgggaggctgacgccagagaattcagagaattacttgaacccgggaggcggagattgcagtgagctgagatggagattgtgccatcgcactccaacctgggcaccatctcaaaaaaaaaaaaaaaaaaaaaagaagcttctggcagctgcattgtttgactggctttttttttttttttcccccagacagggcttcactgtctcccaggctggagtgcagtggtgcgatcttggttaactgcaacctctgcctcccaagtagctggcaccataggtgcgtgccaccatgcttggctaattttgtgttttttgtagagacaagatctcgctgtttcccaggctggtctcaaactcctgggctcaagcgatcctcccgcctcagcctcccagagtgctgggattacaggggtgagccaccgcacccagcctgggctgtgagagccactgcaggtggcctcccagagtatgaggtgtgagtcaccgcacctggcctgggctgctctttaagtccagctgaagsacatttcccttacggccttcaggagagggccgacccggattcccatctgctccgcgaagaaacagggcgggttataggagtgtttgctgggggggtcctgaagtgagctgctgagagcattggcccaaatgtccctgaagtacttgcttgagtcacacggcaytgttaagccaggaaggcttcgttccttaaccagtgtgcaggcagcggagcctggacttgctgggagcacctctgtgctccaggctgaagggccagcttgtgactttccgtctcccttcccagcagtgacagtgacagtgaaggggataatccggagaaaaagaaactgcaagaacagctgatgggtaagtggctcgcggcccygtggcagcggcaggggatgagagtgggtccgctgctgggttggctcatgccccttggccgggcccgggcccgggccggcctccctctygcaggtgccgtcgtgatggagaagcccaacatacggtggaacgacgtggccgggctggagggggccaaggaggccctcaaagaagctgtcattttgccaatcaaattcccacacttgttcacaggtgagagttgagccatttcaaaccccaatgtaaaaattccaggcttccgcagggctggcactccgaggcacccgggagtcagtggcgactcagcccccggggcctgcagagggccaggcctggctgctcgctggtgtccacaacactgctgtggctggagctatgagatgacgatcacgtcacagggtgggggcaggatcaggaagcagtgccagccggtgtcactgtgcaaggtcatggggtcatagcaggggcactgtgcaaggtcatggggtcatagcacagggcacagcagggaatgtagctcccatcacttgtttgccagtagagtccgttgtttcacagaatgccctgttttactgtatgtatgggactcgagaccctctgcttttcctattcctttccccagtcaggaggcctaacttctgtggttctctgttgcaggcaagcgcaccccctggcgggggattctgctgttcggaccccctggcacagggaaatcctacctggccaaagccgtggcaacagaggccaacaactccaccttcttctctgtgtcctcctcagatctgatgtccaagtggctgggggagagtgaaaagtaagtcggccaccaggccatgctctgccagcagccccggcactgctagtgacccagcggcccaccctgtggagtcacctctcagaggagtggtttggttttcagggagggtacccaagagcagtgtgtcgctagcttatcggctgggacacagtcccaacaaagacaagtgaaggtggaagggacctgggagaggtgaagtgctccacaagagaagggaaaggaagtgaggatatttttggggtctgggttgcggtccctgttggggcagtgtgtgggggacatggttccccacactgactcctgttttgcgtgtgatgagacgggctcggaagaaggggactgacgtgttgtaagtgcagagctagcgcatggggctcctgggattgaggctctgcgtttggggctgacaccaaggtgtgctcctcctcttggtgcagtgtggccygagggctcctcaccaccacgttttccgcaattccggcatgaccgtggcctgcgcctccctgtgggaagggtgagaagagggaagtgccgggagcccaggcgggcacggacgtgaacgtcttgtcctcaccccctttctcaccttcacaggctggtcaagaacctgtttgagctggccaggcagcacaagccctccatcatcttcatcgatgaggtggattccctctgcgggtcccgaaatgaaaatgagagtgaggccgcccggaggatcaaaacggagttcttggtccagatgcagggtgtgtgccgggcccagggcccccttggttcttgttgcacctgaagccaaccctgggctttattctgagctgcggctggatttggttgttctcagcctcggagaggcactccccagctccagcccctcagggcacgggtggacttcaattcccaagaggtgcctgaggcctctgcctcacgggccactccacccctcccatggcaggcagtgccataggtctcacctggcacagccagaccaagatgtggtttaatctcacttgggaccctgccagtggtgggtggcacagggatggcttcaattgctgacacacaaagcccccggggtctgtccccaggtttcaactgacccgtgcaggtgtccagagtctgagtctttgtctccctttctccacaggggtggggaataacaatgatgggactctggttcttggagccacaaacatcccatgggtgttggattcggccatcaggaggaggtgagtcttycccaggagaagccagggctggaggcttcctcccaccatggtcacggtccgcctgctgctggcagcccgggtgcagcctggccccttttccctggagtcttcccgtctgcctgccaagcagagccctttgtgaggctggcttgttgaggatgtgccgccagcatcactggcccatgaaatgcgtccgtttcactcaaatcttcgtgcctccccttccgtgaataccattccatcatccgctgtcaactcctgccgtgtgctgggctctctaggtttgaaaarcgaatttatatccccttgccggaggaagctgcccgcgcccagatgttccggttgcatctcgggagcactccccacaacctcacggatgcaaacatccacgagctggcccggaagacggaaggctactcgggcgcggacatcagcatcatcgtgcgggactctctcatgcagcccgtgaggaaggtgcagtcrgccacacacttcaaaaaggtgagtgcccgcggccactgctgagaaaaatctcatagtaagagcgggatgttcgkttttttttttcccagctcctggtcctgctccccggctgctcaggtgacacagtctctgaggcctcctggagagccgagggccagtgccatgggggctgcacccactgtcccctccctgcagctcttctggagtgtggccatctcagggtgtgtgaaagcagaggacagggccactttactgtcttaaccctgctgcggcctcctccgtcagcactgtgtgctcttgtgcggggtggacaccaaatcagtgtttggaaagtgttggatataaaatgaccaggaagacctgtctattcattcagcagatctctgctgagtatttgctgtgggtcctcctgtgtgcccggccctgtcctaagtgctgggaagatatgagtgaccaacagacaaaaatcctagaccttccgttgttggtggggagacagtcaacacagtcagtgagtktctcagaggatggagatggagcagggttaggagagaggtgtctcgggcatggagggaagggcagatggcactggggtgatgcctgagacaggaggtgaaggtgtgagggaatgagccttgtggacattgggggaatgttttgccaaggcagcggacttcagttggaaaaccactttgtgttaatctattttcatgctgctgataaagacatacccgagactgggaagaaaaagaggtttaattggccttacagttccacatggctagggaggcctcaraatcatggyaggagaccaaaggcacttcttacatgctggtggcaagagaaaatgaagaaacaaaagtggaaacccctgataaacccatcagatctcgtgagacttcaccatcacgagaatagcacgggaaagaccagcccccatgattcagttacctccccctgggtccctcccacaacatgtgggaattctgggagatagatacagttcaagttgaaatgtgggtgggggcacagctaaaccatatcacacttttaatgtcactgtattcctggtgagacgtgacagtgttaatgaggaagacatcaaggcattggggctacagattgccagagtcccatgcaaatcatgagtcgctcggaccacccagcccgagttctgaaggagcccgtcctcctcagatgctagggacccacagagcattctctttgggacttccttagagaccggaggggtcgagcccctctgacactgaggggcagctgccccagtcagatccatttggtttcaggtctgtggcccctctcgcaccaaccccagcatgatgattgatgacctcctgactccatgctcaccaggggacccaggagccatggagatgacttggatggatgtccctggggacaaactcttagagcctgtggtttgcatggtaagtgasttgacaggggagggaagagggctgcacagagcccagaaaattgagggtttgggtccagaataaaaacggtcttctccaggccrggcatggtagctcacgcctgtaatcccagcactttgggaggccagggtgggcagatcacaaggttaggagttcgagaccagcctagccaatatggagaaaccctgtctctactaaaaatacaaaaattagccgggtgtggtggtgtgcacttgtagtcccagctactcaggaggctgaggcagaaggatcgcttgaagccgggaggcagaggttgcagtgagcagagattgggccactgcactccagcctgggtgacagagtgagactccgtctcaaaaataaaaaatagtcttcttctatgtcctgggctgttgagaatggcctttgtagctcagggaagctggcattacactcactgggggcccagaatgcaggtggcagcattagcattttgtacatacagagaaaggctagatgcagtggtgcagtgatagctcactgcaggcttgacctcacgagctcacacaatcttctgacctcagcctcctgagtagcaacaggcacacaccatcatgcccagctaatttttccttttttttttagaaacggcctcacagtgttgcccaggccagtctgaaactgctgggctcaagtgatcctctcagcgtggcctcccaaagtgctgggattacaagcatgagctgagccaccacacctagcctgcattttatattctttagcaagtaaagtcaggtccagataatatgacgtcaatccatgggtttggctttgcggtgcagtgaggcagtgaatgtgtcaagactgtgacgcagttgcaaaggcagcgcctcacctgcatagcctggcccgtgccatcctggcaagggtctgcccttgtggctggtgttgggggtgtgcagctaagaaggctcctggccgggcgccgtggctcccgcctgtaatcccagcacttcgggaggccgaggcgggcagatcgcctgaggtcaggagttcaagagcagcctggccaacatagtgaaaccccgtctctgctaaaaatacaaaaatcagccatgtgtggtggcacgtgcctgtagtcccagctatttgggaggctgaggcaggagagtcacttgaaccgaggaggtggaggttgcggtgagccgagatcatgccactgcactccagcctgggtgacagactccgtctccaaaaaaaaaaaaaaaaaaaaagaaagcaagttcgtaaggggagttatgagatgatggagcttagattctcagaccaggaggaggcccatctgagctgcctcgagagggaagagggtccctgccataggcagattcaagcaggcctctggggtggccttgaaggcaaacctcttcccaccctcagctgcgcctgttgtgtgctgaggggaggttggggacctggagcctggctcctgctcaggcacatactgttgccttcacagtcggacatgctgcggtctctggccaccacccggcccacggtgaatgcagacgacctcctgaaagtgaagaaattctcagaggactttgggcaagagagttaaaagctgcttcacttgggcaatggtgaaggtgggaggttgattggggcaaatccaggcactccccatgtcaacagccagacagggctccagggcttgtcccagtcaatacagagttccctctgctgtctggccgtctgccagggagccagaaggaagggccttgcagccacagagacactccactgccctggggcacacagtggacactgctcttcctacttcctcctctcctggatgctcatcagctccttctgcctcccccccttttttttccatcttttgttcccctaaattaatgctgcttggattttcatcttatttataaagataaaatcacctggaagtgtcaaggagtggggcggggtggcgggggagaagcagccgtgctgccaggtcacccagacctccagacagccggctagccccactgcccgttccttttacgcccaagttttgctccttgagagcagattggctgatgcccctgcaaccccagcccaagctctgcctcaaagaccgagtgacataagccattcccaccctcctaggttcacatccagggctgtgtcttccttgggggaggagatggtgtcgtttagatcagggtaaggcagtcaggcgggtgttcaccactgccttttcttcctctgagcgtgagaacactgaacccagccactgcccctgggtccctgtcctggaaatgrtctaataaatccttttcccttcttgagctacccaagtgatctcatctttccttgactcttaactgagactctgaagggccacccttgcttccaattaaaagaccctctggttttctgtctcctctcttttctaaagcagagcaggaaacagaacactgcagttcttaggcctgttctccagtcaggtgtgcaaggcctcctccccttaaggcctcagaagtttggctggggatgtttgtgggatccagacagttcttgccgttgttcggcctacagatcagagactgcaaagtgggagccctgcgtaccagacccgtcctgcagctgtgtttgtttggtttggtctgccgctaacatttaaaagtcgagagttgctgggcgcggtggctcacgcctgtaatcccagcactttgggccgctaacatttaaaagtcgagagttgctgggcgcggtggctcacgcctgtaatcccagcactttgggaggccgacgcgggcggatcacaaggtcaggaaatcgagaacatcctggctaacacagtgaaaccccgtctcactaaaaataaaaaaattagccgggcgtggtggtgggcgcctgcagtcccagctacttgggaggctgaggcaggagaatggcgtgaacccgggggacggagcttgcagtgagccgagatcgcgccactgcactccagcctgggcgacagagcaagactctgtctcaaaaaaaaaaaaaaagtcgagagttgacataaaaattcagaattctgacttctagaagattaaattaggtaatgttgggcctgcgtcctcatggggcagcctgtcagcggccactaagtagaggctgctctgtacagaaggggtcccccatccccactcatctgtgttgcctgcccagatagccccatggccatttcagtttgcgacccccaacagaccaaggacccagagctggcagccctggacccacgtccggcaggcagtgaagctgcagaggctgtcccacgtttaccccatgcatataaacagaccaaagtcaaagcacattcacacagaaagacctggcctagtaaatgaagcttatagcctgcaaagggctttgttccaaccttccctctccaaaacccagtactgctcctctacctttcaaacctggttgggccagaactgattacatggccaactcttggctcacactgggcttgcactgggccatttctttgctctggttcagagcctctgcagaagtgagctaactttggatcagtagctccaacacttggctccagtgctggcaggttacccctcaaccatagcagctgggatctttgtggcttgggggtgcttgtgtaagttcttggttatgtgccctcagccaccaggatatgaaccgtgtctgcagagcttcactttagtgagcttacaagtttttaaatttttacttctagttacatttacttgaatcagaacgttgtttcctcattcctactgcttaaacaccttgacaagtcctaggggttaacaaaggttagcatggctatggtccatccctgtgctctagttagagcgtgaagacacctgactttccagttgtctctctccatgaccagcaacaggaaccactgacgctgaactttggacagtggcctcagactctggctgccagcacacaacctgccatcatcgatgttaaacatgctgacatgtgcagaggagtttcctccctgaaatgctctgaaattcacttctctgcctggggattctgttataaaccttctgcctacattggctttcactgtggaagttgatttctaaaactctgatgagctcacaacgttgacatgtatatgcgttttttgtgagtgcttcctgctcaaagtgggagagattttactggaaatgcaataaagtttgcattttattgctaccgatgcccaccacaaaagcgttaacctcagaaagctataagaagcatcaaaagattgccatagccccctgtaagagcttctgaacattgtccaaatgaaaggaggctcagctgaattctaattttcctaaagacccatgtttttagcatctatgagctttctacaaatctccccattggctgcatctctgaccttgcaccagtatctggttgggattccctttttttttttttttttttttttttgagacagagccttggtctgtcgcccaggctggagtacagtggcgagatctcagcccactgcaacctctgcctcccaggtttgagcgattctcccgcctcagcctcccaagtagctgtgattacaggcgcctaccagcacacccagctaattttcatatttttagtagaaacagtgtttcgccatgttggccaggctggtcttgaactcctgacctcaggtgatctgcctgccttgacctcccaaagtgctgggattacaggcatgagccaccaagcctggccgggattccttttcaaagtctggctgcacctagagccagtttgcttctgcttggcctcatggggcctcagagaaagccacaaaggaggatgggtctttcctgggttcatttaactgccatttataacactttttcctctaaacagcttaatggacttcctactacttgtatagtttgattttcaggactctgttcagcaagaatacctactttacaaaactcagcataaaaatgaggtgaaacagtttaactaaaactggagtttggctgggtagtgtggctcacaactgatcccagcactttgggaggccgaggcaggaggattgcctgagaccaggaatttgaggccagcctgggcaacatagtaagacccccgtctctatcttaaaaaaaaaataaaagaataaaacaagttccttcacctcttgacaagacaaagctgacactttttttttttgagacagagaaaaaaagaaaactctacagccagaatcatacttttgagtctcgctctgtcgcccaggctggatggagtgcagtggcgtgatctcagctcactgtaacctccgcctcctgggttcaagtaattctctgccttggcttcacgagtagctgggattacaggtgctcgccaccacgcccggctaatttttgtatctttagtagagacagggtttcaccatcttggccaggctggtcttgagctcctgacctcgtgatccacccgccccgccctcccaaagtgctgggattacaggcgtgaaccactgcacctggccactttcttaaacctacacattggttgctgtgatattaattctatttttacaaaataagtgtataaccaggaagtactaatcctgctttctatgcccaattgttaacaggaaagggctcagtgcacttctcaattgtcacccctgcccccagccctgatccacggcctctaccccaagaatgagccaagaaccagctgctctagggatctcagcagcaaaatcctgcccaaggctgttaaaatgtgtgggcactcatttacactcgtgctgtcatgaaacacatccttgaacagggactattctctttcatttccataagcaaactggcgtctaaggccacaagccctccgtaaaaataagaactcggcacaaatggccagtcacatgcttacctgcatttttaaagacagctttcaggtatttggggactacattattaccaaaccttggctttgggagattatacaggtccgaggaactcgtgtctactgcagacgaatgcaattaccccaccttcctccatacagaattgttaggaaatgtccactcctttgggggtgatttttctcctcaagttgtagccaacattttgtccgtaactgatttcagggcaaacatttctgacatcwtmctccagctcagtctgccatgccttggcaatccagtttcctgtcatatgcgagccatccaagttgatgccaagtaagatttgcccagctcaaagtgaaagtgtttgcgtcttggtatccggaatcctcagccccagtagcaaagctttagtcattcaccttcatccaatagacgtttgtgaacgtcctgctgtccattttgtcaataaacaggcagccctgcaggtggtccatctcgtgctggatgatgcgggctgcccacccgctcgcctgccacaccacctgttctccattggggtccagccctgcaaaggaagttacagccctggtgagtgggaacagctgaactgcatcatcctcaacctccctacccctgcccccggtcctggctgttcccattgacaagaggcaacagcagatggcaaatgtagacagcagctcctcttctaactggaaaacgtccctcatctcggtccattaccaagcgttcaacctggttcccaactctggtaattaggttatcgagctcactgtagagctgagatgagaaatcatctttctacggtgcgacccttccgaacactcctcccacttctgaggtacctgtgggctcccaactcctaacagaggttctgcagcttgagaccccacttgtttttctgaccatcttgaaccgacgggcttgctgtgcaggaacaatcaccccgaccccagcagagcccgcattccgcgaggcatcctgtggtaccacgggggaatggcctagccccctgggctgggtcaggctggcgggggctaacccccacttctccaactccaccgtggcggatctaactggggccgaagagcgtgtttgcctcagagagcaagggagcagaaagcagacgccaggctgtcaggtaacagcggaactaggggacctctcctcgcccctgcgtcctatctgagcgggctctaccccacaggagcttctatccgtcctgaggcctctccgctcccgcatcccacttcgctcctgcgggaggtccggcgtatgaaccgcgaccacttctgcgctctcgcggagtcgggcagaagagacgcgcgcgctgctccagcagccccggtccccgccgcccgcacctgagatctgcaccgcctggaagcggggcacgcaggccaggaagccggcgacgctctcgcagccctcgggaaaggtgaccaggcggctgtcaagcactcgcaggctggggttcacgaacacgcgcaggggraagggctccatttggcggagcgcgcgctggcggggcgggcactcccgacacagcgcctcggggagctccagcgccagcacctgccgcggcacccccagctgcggcgcgcttaggcccacgcagcgccgccgccgcatcacctggaccagccgttgcgtcagccgctgcagctcgggcccgcctagctgcgcccgctccaccggggccgccacgccgcgcagcaccgggtccccgacttggcacacgtgcgagaacggcggttcgggaggacccagcaccagacgcctcaggtggcgccaataggagcgccgcagcgccgggccctcgacgccgtccggggcggccgtggagctgcaagcccggacaccgacggctgccgccccgccccacggcacggccgcccacagtggccaaagactcagcgcgccccacagccgggccatggcggcccccttaacagtgacccggcccgccccttccggccgcagcgcggggcacgccgggaagcgccgtcggccagcacacagcgaagccgcgactggatccccgccttcctgcttagactggcagtgagcaccgcccccttccgctctcctcccgggagcgccttcccgcctcccgaacccgccccggaccttccagggcgaggcagtcctggccaccccgcgccgggaacctcacgcaccgcgttctggaggcaggggacgccggctagggccccacgctgggcggttcggcctgcgtctccgctcgccctccctccgggcaggctgggcccgcgggctccaggcgtggctcctcggcgggaggctctggtgctggagctgtgagctcgggccccagcgcctggtcatccagggtgaaaagcgtctctctctttggcaggataaaggcgaggggctcctgaatggcgccgatgttc

SEQ ID NO: 95404 - DNA, 22919 bp, Homo sapiens
tccaccctggcctctcttggctgtcctctaaacacatgtcccccattcctacacctggtcttgtacttaagctatccttcctacctaaaatgttcttccctttctacatagcagctcaggttccccatgaaactgcccagcctgttccagctcacagagacctttcctgaaatcctcaaactcctcatgttggattctctcatcaatatttaattataaactgccttgtacagtttatacttgtactcttttttttttttatgagacggggtctcgccctgtcgcccaggctcgagtgcagtggcacgatctcggctcactgcaacctccgcctcccgggttcaaacgattctcctgcttcagcctcccaagtagctgggattacaggcgcaagctgccacacctggctaattttttgtatctttagcggagacagggtttcaccatgttggccaggctggtcttaaactcctgacctcgtgatccacctgcctcggcctcccaaagggttggaattacaggcatgagccactgtgcccggcctatacttgtactctcaagcacatttgtcttcaaaatgggtaacgttctagatggcagggaccagcccgagatctccaggtgccaaagcagtgttctctactcagagcagggcttcagcgtttgttaaatgagtgttgtaagtgcagcgtgaatcttctactactgagccaaataggaaggcttatttatcctctggaacctgtggaaaagccaattcagcaacatctgaattcatgtttttaagtgattgggtgtggaattagccctatttctaaatccccagtggtaagcagagataaactcgagcttgattgtagcagccccttaaagaaacccctccccacctccccgtgaagggatgaatgcaaataggacaccacaaactggatgctaattacaggcaaatcctccctggcatagactgccataaaggtaaagactctcttatctgcctgataacaccaggtccctggccctgcagatcagaaaaaaagagagtgctccctagggcaggccatttagggggcaaagccaattaattggtacaggcagggtgtttgttgtcctcatgaggttctatctggacccactgttggttaaggaggttttcatggactcgtgaggttgtgctgaaccagccccaccacctggaaaactccgtggagctggcggcgtgagaagggcaataagccttgggacacagttggagtctaagaaactaactaggcatgagatggtcctggcccagccccagggagacaaacttgcacccagagaagtcatgttgctgctgagtgaggacggaagggatccttccaaactggcttctccattccttgggcttctaaacaggtcacttacaagcagccagttggctggatatgactcagacacattatgtctggcctgtggagtgtgcatgtgtgtgtgtgtgtgtgtgtgtgtgtgtgtgtgtgtgtttccttcaacatttgaattaccaatgcttaaaaaaattaggagatttcacatacaaaatctggatttctggcttctcttgacaacagagcacctggccacatgaggccctccctccacagggagatgagcctctaaacggagcgtttgctctccaccaggctgatgcactcatttttgcccttgccaagcccctgcttattttctctgatgttgcagattgcaaatctgggaaggaggaaggatcagagatatcctcatctgcagcaactccaggggtctgtgatgcctctgggtgtgcaggaggtagcccagggctccagggttcataatgcaagagagacaagacatttttctttctttctttcttttgagatggagttgccctcttgttgcctaggctggaatgcagtggcacgatctcggctcactgcaacctctgcttcctgggttcaagtgattctcctgcctcagcctcctgggtagctgggattacaggcgcctgccaccacacctggataattttttgtatttttagtagagacagggtttcaccatgttggccaggctggtctcaaactcccgacctcaggtgatccacccgcctcagcctcccaaagtgctgggattacaggtgtgagccaccacacccggccaggcagttttcttttattcaaacactgatccttgaacttgctgtcactgagtgctctagagggatggccatgtagaacccgtggcatgggcaaaggatgctgctgtctggtttactaacacttgctgagcgcttaccctcagccaatctcttcaaacttcctatcagtccgcctagcaatcccatctgtgggatgaagacactggggcttactggcagactctagagccctcccctccaccaacctaaggcttcttctccatctttgtgtaagtaggaatggctctggtagggcccctcaggccatctgaagttcaaaacacattggcagctgggctggatagcatgcctataggactagctcctagggaggctgaggcggaagggctgctggagtccaggaatttgtttttgagacagcgtcttgttctgttacccaggctggagtgtagtggttcgatcatagctcactgttgccttgacctcctgggctcaagcaattctcctgcctcagcctccctagtagctgggactacaggcacactccaccatgcctggctaatgttttttttttttttcttttcttttctttttctttttttttttatttttattttttgagatggagtctcactctgtcgcccaggctggagtacagtggcataatcttggcccactgcaacctctgtctcctgggtttaagcgattcttctgcctcaaccttcccagtggctgggactacaggcacgtgccaccatgcctggctaatttttgtattttttagtagagatagggtttcaccatattagccaggctggtctctaacttctgacctcgtgatccgcccacctcggcctcccagagtgttgggattacaggcgtgagcctgcacccggccctggctaattttttaattttaatttttgtagagacgggggaagtctcgctttgttgcccaggctggtcttgaactcctggcctcaagcgatcctccatcttcagcctcccaaagtgctgggactacaggtgtgagccactgtgcctggccaataatgtaagatgggattgtgtggagtaggtgtgcctggggtctttgcttgcctgcggggactgaggtgtgaggtctgtggcccagactgagcaatggtgggcaggcaagtccctgagcccctaaaacttgcgagaggagaagtttatagactgcagctcaggtgcctataaatttgttgcagcttgggaagaagtgatagaaattatatcaggtgtatttggaaaacaggtaaactctgttttttggttttttttttttttttttttttttttttttttggagacggagtctcgctctgctgcccaagctggagtgcagtggtgcgatttcagctcactgcaacctccacctgcggggttcaagcgattctcctgcctcagcctcccgagtagctgggattacgggcatggtgcccgtaacgccgaaagtgctgagattacaggcttgagccacggcgcccggccactcattttttaaaaactagttattaattataatttctcttcaagttttcctgagatgtaaaaactcatcgccttcagctggttctaaacttcttgtctctgctaacaactctcccccctcctcgatctcaccccaccccagtgcaccccaactcacttcatctcactttactcgagtctagcactatcttttagggacctgaaaactactgtcgataaggtcagttgggaatttaggaggtcatggatgtcggaaataaaggtgtgaaaaagaagaggaggaattgttttggctttaagacaccggaacctccaaggttcctacaaaaccgtttgcagcttttgcaaaccgccttaaagtcatcagcgccccactgcggaattcaaagctaagctgtcacaattgttaacaccttctttgaccagcctttttacatttgacaattctcttcagcgcctctttcctgccagcaggaaggttttgctgccttggctttcgggagccccctagacagcgaactgccccttcgcgtgcagaagtcggggaagagtgctctcagctcgccttccttgcagggtgagtaggttttgcgggttagagagcggggcgtgggggcggggagggagagtaacaattttggaagtccctgcgtggtatctggaaagttaacgacgcttcaggttctaggttgagcccaatgaccgtcttgccttggcagctggtcccagggcgattgcagagccgcgtggccttcggccccactcgggggacccagcttcggagagggcgcaggggctgcgagtcttgcgagccggagccgcgtccacccgggactaggcgtccccgccgagcgctggcttgtggcgctccctgggaccgcgcggggtcgggggtgcgcccgcgggggccctcccactctggtcaactttcccggccccagggccgggggaggcgcctctcctggcgggcacgcgccgggtacttaagggcggctcggctgggcaggcggcagtcggagcgcgcggcggcgcggagcggagcgggaggaggggcatggagccgccgcgggcctgctgagctccggagcgcggcagccggcggcacggtgagcgcgggccggccggcacccaggaggggagggccgcgcggggctgcgccgaggccggggcgcgccgggtggcaggggtgcctctcgccgagccccccgcacccggccagctcccagccctgcgggcgccgcgtccggcgcggggaggcgggttgggggcggcggcagccccgggcttcccggcggccgttcctgcagccccctccccactgacccctcctccctttcttcctgcatcctctcctcttccagcctcgcctccctcctccccggcggctcctgttttgtgaatgaattaggaggcggacgccggtgcggggctccaggctggctggggtacccctcccccgcaccttctacgacctcccgggggtttgcacctgtccgggcaccaaggtaccaggcgcccacgttcctgcgggttagccgggccgcggcagcacgtgtccgggggagtgggctcccctcccctggccggcctggaggggcccggagggcggccgggcacaagaggaggagccccgttgggcgcacaagtttccatgccgctgcgtgtggccctgccgcggggcgcacctgtcagcgggagagacgctgcacaccagcagcccctcaaagtttcggaggcttgatggagaagcgtgcgtccttgactgggggttctccttccgtagtcctgggagccggacttgagagcgcccccaaccttgtgcccttgaaagccgagtgcgcgttagtttgcctgggctgggctcccgtggatgagcgaagggcatgaggaggcggcggtccaggctgtaggatcaccccacagcctctgccggcttggggtgacacagccccccgccccaggtctgggcaggagaacctcgaccacagcctgcaccagcgcctgattgcacgtggggtatctggttgagggacattttgggggcctctatttgggggtgggggtagtaacctgggtaatgcctctaattcctgcgggggaggggtcccgcccagggaaggagagggccggctacaccggggatgcgcctttgtctacaggcacactttgccaaggtagctggggtaccaggaagagcagggcctggtccgactgggatcccttgggttttccgttccttcccggttgggtcgtgggaaagcggcacgtgggtgtggccggcgccgcctttgccaagaggcgaggctcgagcggggatgagaagcgtggcgagtgcgttcgcggctgctttgacctggtgggcgccgcctccggcactgcaccgaggcggggcgccagcgcccaggttgctgggctggccttggcgcccccttcccctacccagagcgcaggcaggcaggggggtcccgccgcgccccttcagcatgtaagctccggaggggaatgggggcgctcctaggctgcggatgcaggcctggggactcctgggccgcaggcgcgagcagtagggtggcaacagggagggctgggagtcctgtgaaggaagcacacggcgggctccccgggacggtggggcagagcgcccggaggccgcgcttcccggagaggctaggctgccagcagctcttttcgggccaacgctgctggaaggctgctagtgccggagtctcaggtcgatttaggcagtgactgcgtgttcttcgtcccttctacgtgagaggcgtcccgacaggaaagtgtgtttgttttgggggctccgtttcctgagacctaagagttggagcaagcttggaagcgaggcatcattgtctgtagacctcagtgaacatggggttctctagatcaggcaggtggcagagaggagatagtgtgggtcagaatgggaaggccggcagccatccttgccaccttttctttcccctccctcacatccccctccccacctgctctggaggaaaccacagtcaccctcaccactagggtagctcttcggggccggaagtgtttccatttttagggaaatgacttacctgagacatgaggcaggaatccattagaactcccattgtgctatggggagaccaagtctcagagaactggggcaaggtcaggcagccaggaggcagaagtgctgtcttaaacccaattctctagtgccaagtcctgggctgttataaaatacagctgtttccaacaggggagatgttaggagccctgacttagttgcaaatggaaaccgggcattgtttccaggagtggctgggcagggggacacgcacagagacgcatgctgcacgggcactaggaccaagcggatgggatgcccaggcagccactgtggaggctgctgcagtggtggctgcagttccctgtgctttcttcagccctgggctctaggaggctgtccactccccagcttgcatttcctggtctgcctctccccctgctttccctttctttcctgcctctcaagtaaaaggtgagaaagtggaggacacagggaaagtttctctaataactgtcttgagaaagggaagctgctgctttttcccaatgcccctttgtttgctgtttcttttgctcctgcactttcttcttgggtcttactggtggctgcactttactggtgaatatcccctccaggagtgggtgcagggtagggggaagctcttaggccactggctgcctccctggccctcaggtgcccagagctgcctcaggctcacccccttgaagcttacctcttcagcgctttgggccaggtagagcccagttctgccacccaccagccagatgtcacgtgaccctctgggccttggcttgtctaccccagtgctacactaagggctttgtatgtgtmgcccatttaaccctcaaagatgccttgaggttagtcctgcaacccacattttacagatgacgtaagggggcacagacatcaagtggcagagctgggatctgaaccccagtaktctggcttctgagtctaccaagtcttatgctcagtaagcggtaacggttttgatcagtgggtcatgtccactagtaacagagaacacccatgctcccacggactggaaatgctgcctcctgcctgacccttcatctcctgccttctctcgccagatgccggtgcagctgacgacagccctgcgtgtggtgggcaccagcctgtttgccctggcagtgctgggtggcatcctggcagcctatgtgacgggctaccagttcatccacacggaaaagcactacctgtccttcggcctgtacggcgccatcctgggcctgcacctgctcattcagagcctktttgccttcctggagcaccggcgcatgcgacgtgccggccaggccctgaagctgccctccccgcggcggggctcggtggcactgtgcattgccgcrtaccaggaggaccctgactacttgcgcaagtgcctgcgctcggcccagcgcatctccttccctgacctcaaggtggtcatggtggtggatggcaaccgccaggaggacgcctacatgctggacatcttccacgaggtgctgggcggcaccgagcaggccggcttctttgtgtggcgcagcaacttccatgaggcaggcgagggtgagacggaggccagcctgcaggagggcatggaccrtgtgcgggatgtggtgcgggccagcaccttctcgtgcatcatgcagaagtggggaggcaagcgcgaggtcatgtacacggccttcaaggccctcggcgattcggtggactacatccaggtaagggcgcctccctaggagcgtgtgtacatggggataagtctggacagcctggcaaactctccgccaagaatctgaggtctggtctaggtcccttgggttgtgcacacacctgtgcacttaagaaggcaacaaggtggccgggcgcggtggctcacgcctgtaatcccaacactttggggggccgaggcgggtggatcacaaggtcaggagatccagaccatcctggctaacacggtgaaaccccatctctactaaaaatataaaaaattagccgggcatggtggcaggcgcctgtagtcccagctactcgggaggctgaggcaggagaatggctcctggggaataaggcgtgagccaccacacccggccttattattattattttttaaagacaaagggtctcactatgttgcccaggctggagtgcaacggctatttaaaggcatgatcaatacgcactatagcctcaaactcctggccttgggcagtcctcccacctcatcctccctagtaactgcgattacaggcacatacaccaccgcacccagctccatgttagcccttttaatcctcttaacactcccagggagaagtgctattatctccactcatagaaggtgaaagcaaagcacagagaagctaagtaacttgcctaatgtcccattgctagtagggtgcagagccaggatttgcgcccaggccgtctgtctcaagtcttctcttacctgtgatgcagcactgcctcagcaatggcaacgtggggctgaacctcttcataagaaagcgtggtgaagagcaaaagaaaccatcctcaaaaacactcaaaatattctagttatggccaaaaagtcccattcttcctagtgtcaaagtcatgtctgggcggtgagagacacaggtgcgaatgactagcttcattttgtaggagcatcggcaggggcgggaccctgattaaaccctgcccagctttggtcaaagcaatcactgacataagcctggaaattgtactaggttgatatggtttccatcttcaaataaaaaaaactcaagagttgaaaagattaaagaccacatctttcagtacaaagtagaaaccctaggaccctggatttctaggccaggattttttttttttttttttttttttttttttttgagacagagtagctgggattacaggtgtgcaccacaacacccagctactttttgtagttttagttagggacagggtttctccatgttggtcaggctggtcttgaactcctgacctcagctgacccacccaccttggcctcccaaagtgctaggattacaggcgtgagccaccgcacctggcctaggccaggattcttgatggcatccatgctgcctctcttcctgactctgttctctgacctccacgcctgccagagcagggtgctgcccatcacttgatcagtgcttgaaggtgcagtggctgtcctgccagcccacctgtgtaccaactcagtctgctgacagcattttgagtcccctaatacgatttttctctggtgtacmcacctaaaattagctcactcagattgcgtgtctggcttttttgacagttgtctctgcatgagggttgatatgtttatctttttctggcttcctaggcccaggacctcctcagtcatggagggagttaggagagcttagcaggctgttttgactgcagttcacctggggtcgtgggaccttgtgaaactttcctggggacccaaatgcttagggaaaagcccttgagccctggcacaggctcaagccacagtgactttgtcatctattcccttcaagcacaggatctcacccccaccccaccctgccatctccctttcctggccatctgggttctggtggatcagcaaacaggctcacacacctgagctgtctctttacagccctgggatcactgcataaggttgccctgggccagagccagtgagcgcttgctggatctcagcctgtcttctaaccgcctgctgcggaggtmtctctccctcctaggcagaactctgcccgagccagtggggaaacccaggcagcacgagagctcttctttccctaaccttgctcagttagaaagacatccaagacatccctggactgaaggaagcaaagcagcatataaagaatgggctagggcaggggcagggaggagcagtgagaccagcagaacagcagcagtgctgggagtcttggcctgtaagtggaggaggctctgctagtctggcctgaggcttcctgggcccttcccaggcatggaccaggatgtaaggatatgcctggtggggaggtgggaagaagcacatatgagggactcagcctggtgctgatgctgttctgattcccccttagccttctactgcttatctgtggccaccctgtcttccaacatagagaaagctgggtggggttgtggtgtcagaggcagcctcctttcctgcaggaatcttactcagcaactttaatacaaggatcttaggcttctacagaacagggttttggtttatctgtggatctctttgttgctctcctaacagtgaccacagagtaaatcaggtctgtaaaccagttctcctggccaatgctcactggatttgtgtaccacttcactaattttttagaaaccagaaaaggagtcagccactagggcaactagtggcctgggttcaactcataatgagaccacctgttagaatcaggccataagcctcccaagagctgggcagagttggccctggggtctgcctggaggcagctgctgcagcttccatgcctattcagagcagcctccagggggagccctcagccataccgtgccctggtccgagaggctcggccaagggagtctgttgagggcgcagaggccagcagccttattactggtctcatagaggtgcctgcaagtaggtagtctggtaaccaccagtgggctgcaggttgtccaaggggtcagaggctgacacggggacccctgtggttaattctgtggggtcacttaaggccatatgcagcctgttagtcctgggctaccctactgtgcctgccatctgatttcagtgacgtttcccttctgccgaaggaccccagagcaattttttgcgtccagtgctaagcatgtctctctccacgcctggcacctactgtcttcagggtttctccctctcagcctagtggctgtcaagtctggtagctgtacacttttactagctttcattttacctctggcaccttctggtagcgcagatctcttagctagaggctggaagtgagtcatgtgtgaaggggtcatgtctctcaggcagtgagcagcctggcagtggggtgggggacagggtgtgcaggtctgaggtcagaatgggctgacgacgcactccctctrcaggtgtgcgactctgacactgtgctggatccagcctgcaccatcgagatgcttcgagtcctggaggaggatccccaagtagggggagtcgggggagatgtccaggtaagatgagaccagggatatctgtggggaggggtctggactctttttcctaatccaattggatatgcctgggaaatgggtgtcttgacttcctagtattggggggaggttcctcgctggcagttttcactgacaccaaagagctcgcccccctcactgcccaacccctttcttgctcttcttccacatgaggggaagtcacttaaacaggtatggagcagagtctatactgcaggaggggcacagtattttgaggccatacatcctagaaggtacttcctttttggccggtggtacagcaagtagctccaaagtcagatccttgagcagcccttgctcttaggagatgggctgaagagctctggtcaatacggtaagaataagggccccaatctgccagagatactgaagcagcatcccaggtcccctacaactttccaaccacagaaatctcaggacaggtggttgtggtggtgttttgcattcttcccaagcccccttctctgccaccaccacaggctgcctcctgagaccgaaggtggctttgactgctagagccacttagtggggaaaatctctgcagataagatgacacagtagggaggtagagctggtgctggggacagggattgtgtgtggttggctcctctgagcctcaggtttcccagctccaaaggaaccgatggccaggaatctaagcagcgggccacagaagccatggtaaggaggcctcgtggtctctgatgtctgtcctccggacgtgcaaccttaggaggcccagcatctctattcccttgcagatcctcaacaagtacgactcatggatttccttcctgagcagcgtgcggtactggatggccttcaacgtggagcgggcctgccagtcctactttggctgtgtgcagtgtattagtgggcccttgggcatgtaccgcaacagcctcctccagcagttcctggaggactggtaccatcagaagttcctaggcagcaagtgcagcttcggggatgaccggcacctcaccaaccgagtcctgagccttggctaccgaactaagtataccgcgcgctccaagtgcctcacagagacccccactaagtacctccggtggctcaaccagcaaacccgctggagcaagtcttacttccgggagtggctctacaactctctgtggttccataagcaccacctctggatgacctacgagtcagtggtcacgggtttcttccccttcttcctcattgccacggttatacagcttttctaccggggccgcatctggaacattctcctyttcctgctgacggtgcagctggtgggcattatcaaggccacctacgcctgcttccttcggggcaatgcagagatgatcttcatgtccctctactccctcctctatatgtccagccttctgccggccaagatctttgccattgctaccatcaacaaatctggctggggcacctctggccgaaaaaccattgtggtgaacttcattggcctcattcctgtgtccatctgggtggcagttctcctgggagggctggcctacacagcttattgccaggacctgttcagtgagacagagctagccttccttgtctctggggctatactgtatggctgctactgggtggccctcctcatgctrtatctggccatcatcgcccggcgatgtgggaagaagccggagcagtacagcttggcttttgctgaggtgtgacatrgcccccaagcagagcgggtaaagtgcaatgggtaagggagggaaggggaatggaagagaaaagacagggtgggagggaggagggagtgctgtgttttagtctcttaatggtccaaaggacaaatctaaaatgcaaagaacggtgatgtagtatggcctgacagctctgtttagaggaggcaacactgatcccccagatgcagggctgcaggggattctgtgttttcagactgcctgtctgcttgcatctgcacataggcagtagcctcctcctgggctccagagggcactcagaagttgtgctaaaccaagttaagtcccattcagtggcaacttgtgataggtacctgagtgacggcaacctgcggaaggaggttctcccagcccatctgaacacaaccagaggtggcaggagaatttctactgagcgagctgggccggttagtgtatgtcacccccaccccacccctaagtagtcatcaatgcaataagattgcgcctgagatacaaggcccagaagcctgatctttgggcatcagaaaacagggtccaggaatggtgctttatgtgagataccccactccacatcaacattccagggatgagccaaaccagcagggagttagcactgaactgcttttaaaagtgcacattaaaaaggaaagtttgccaggaggaacaaagagattgtggtggtgctaaaggaggccataagctacacagaggccttgggtgttccacctggaaactgctcagacgtctagatgggttcttagcttgtctgtgatctctgctggggagataaaaagattaagccccaacatgttcagaaaagaagtgaagtcttgggtattttaacctgtatactcttgaattcctctcaaattcagctctgatctgaggctaagacacactccccacttcactttcttcaaagccacattttttgaggtatcactgcagtcacctcttctaccctcatcatcataggtaaggttttcaaggtggcaattggggcggagccccggctcttatagaagcttcagcaggaggcaagcgtgttctcagcacatatgggaactatgaggagcctctgatcaaattggctacaatcttggagctgcttggacggattccttggcagccgggttagcatgtgtgactttcaggctactgttcttgacaatcatctccaatggaaagcttttcagtgttcccaaagtgaactctcaaatccaaaatggttatctttgagaccatccattctcctcagtggcttctccagggaattcttacagccaagttgtgacagtcactgcatttgcctgcttctttccagaaaccaaactaggagatgaaactggttcctacatcctaaggttcttgctttctctctcatgcctcctgaggctgtttttggctgttttccctctgctgcttttggggaatgaggggaagccattttccagtgacttgcaatccaggctgttctcagcgttttgagtttaaaacctgggatcctgactaagcctttgacttaagggttgcttgcttgccctccaaatgtcctttctcagaggggccagctaacccgtgcagaaccagcactaaggtggacagcagacaagagggcaagcctctagtgtaccaagtgcttcctacaaagacgcaaggtgtgctctgagccacagatgggcaaaccctggtgctttccttcatctcccacgaactcaagggttttccaggtgtagctaacagttgccacatcacacagacctcgagtttctggtaagactgctggttgacatcagacccaacccatgaaggctggaaggcagcaggcatttgctaaggcagctgatccaggcaatcgttctgctggccaagaagttaaactattttgagcattagaatggaggaaatccggtcagccaagtgcagagttcagacttcgctaagggcttgtttttcttcagcatttacttgaagattaatgtaggatgacaggctctcctggctgtcctaccatcagctctgccttgcactgtggtcgtcaactttcctcaaatcaaaaacaggcaggtacaggtagtgggctcacaacgtttgacctcgactggtttttctaagttattttgtacatttttcagcagcaaaaccaaactgggtcttcagctttatccccgtttcttgcaagggaagagcctttatacaattggacgcattttggtttttcctcattgagaattcaaatcctcttttgtattgtttctacaataatttgtaaacatatttatttttacctgctttttttttttttttaattttcaggtcaagttttttatactgcacttatttgtcaaaataaagattctcacatatgccggttatctcgaaactactactttgtatttaatgaaagctagctctttattccagtttccaaagagggacttaaaatagaaagtttagtcaggtgggactcaagacctgggcaatatgtccatcctggtaactacacccatgggggcttaacttttagtgtagagggtctttggtgaaataactaactggcagatgaatgggcccttgctaagactaaaaaccaaagcttgcttcctcttggagcaaaagcattttagccgacatgatgtaagactgtagccaagctgaaacaatgaaaagcagaggaaacttccttccctatgaaacaggtaacaaaacacagtgacaccagcakccctctcatcccatttattaaagaaacagtaagaaaagatacaatgcaggaaaaccaccaaccatccttgcacaccaggccgaacaaagcacagkgatttcttcccttcatcccccacccccaccctaattcccatattcccatccacatcagtttaaattttgaggttctttgattgattgggagtaccagtgaagagggagttggatgagtagaggggccttaaatctggccacctctaagtcccaggagaagggagctgcaggcccagtcagtcaagcagaaactgcattcggtgggtctttctttgaagtggttgtccatctccctgttctgtgttcaagcccccagggaaaggtatggcagtagaggatgaccaggtccaagctgcccaggtcagagctacggaagcatggtccgttcaccaacgccacgtttctagagagcagtgagctgattctccaatggtgagcaggggactacatgtgaactgggacctgcaggccaatgtatccctgaggaaaagtccacaagaacaattcaagaaactagtaagaaacaatgggcagaaagctgtgggacgaaagcacagcaggcttctgggaggctggagatcctttctctcaagggcaggattattcccacctgccacagttcacatgccacaaataacatctcaccttcagtcaagaaaaacgcaaaggaaaaagatggctcatttgaacttgagcccaagctatgttcttcagactgtagctccacaactacccttttacctaagacagcccctgccaagaaccacagtgcctagaaaccaaggtggtcctggagggaaaatggtgtttawgggggcaacattccatttgggtacattgcagccattggaccccctggtctggggaaagcagctgggtttgtgccagggaggctccccactctaggaaatgggacgaaactcttgcctgcagggccattcatccttggaaaggaagctgggttgagacccagggtcccagttggccttgtgaaaggagctgggttgatacccacagggccagctggagaagggcccagatgcccggcagctggcctggggaaagtaacttgaccagggcctaatgggccagtagaccttgggaaggtagttggacttggaccctgcaggccagtggcccttgggaagttagctgggttggggccaagtggcccagaggctcttgggaaaatggttggatttgagccctggaggccagcggacctttggaaggtagctgggtttgatgccaatgtgccagaagactgagaaaaggcagatgaacctgctcccctgggaaagggattggcatttacccccatggggccaactggccttgagaaatgagctgaattagggcctatggggccaggagcccttgacatgggagatggatttggccctggaaggccaattccccgagagctaggacccgagtttgggcccatggggccaggtactcttgccatggaggatgggcttgtgcccatgtttccagaagcctgtgagaaagaagctgaatttgctcctaaaagacctgctgctcttagaatgggggcaagatcgaggccttgaggtccagccattcttaagttaagaccagatcctgtgcccaagaggccacctgctctggcatctagattagggcctgggcccaggcyacttggtcttgggttgggcccaaggcctgggcctggaaacacacctgacctgggggcagggtttgtccctaaaaagcctgatctcagattggggtttggtcctgggcccaggccaactggcctaggattgggaggaccattcccagaggttaacagaacaccggctctcaggttaggtccagatccagggcccatgggaccaccacctctggggtcaggacctgctcccaggagaccacctgcccttgggttggacataggacctggtcctgggagaccccctaacctggggttagacagaggccctgggcctggcagagcccctgtcctagggtttagggtggggcctgggcctgggcctggccccaagaggccaccaggccttgggaaagaaactgcacctgtgccagtgggattcatccctcttggaaaagaagccatacttgggtcacgagcaccagccgggaaaggtgctggatttgaagccaatgagcctgatgaagctggaaaaggagatgggttccttggaaatggggtcagatttccaccaagagaaccggccgccataaggaagggatccgagttcacacccagtgggtggcctgtgttcagaacaggacccccctgtggtcccagggaaccgtcgagccgtcctcgaggtggcagcggagcacgagtccaaggagttggccgctctctagggaaaatccgaggttctttcatactttcttggggacgctggtgataatgggcttggggcgggttttgaaaaggatcttgtctttgatgagtgctgtcaccaggtaccgggtgccagtctcgcggccaagctcatcacagtcctgatccccaggagtgtgtttgacaaggactgcaaaaggtttctccaggtggatgattttcccatacaggatatgatgccccacgatcagcacagggattccctttggcagaacaagaacgagattcctgaggttccggggcaaggccrtaacactcaggcgcctcctaaagctgctcttggcaggctatgcyggcacctccaatccctggtctggctctgccattgttgagcagccacactggaccacccacccatgtgccctttttactttctagccccacataggagaatttccactttcagaaatgtgagctttccagattccccaaaattaaatttccctgctactgcagaggtagggggagaacaagcagagagcatcgcagattagctaggccttgaataacaaacctgaggcagtcctcactctgggtcctgggagcaccaccttggtgtagcttgctttcctgaggcattaggcagggaaagaaaagccccctcacctcagtggtgtaatgtaggtctcccaggaggtttccagctaatccagtgctgtagcgagcctcgatctccccctgtagctccatcagcacccattctgccaggcctccagccctcgcactgcaagcaaagggctggcggttacaatatttttgaggggtgaaggatgaatagtgtcctcacaccaccatttgaggcccaaaggacctctttgttggatgtcaagttcttgggaaattgggcagtgctaggcatggaactagagatcagaatgcaaggatttgtacaagatgcacctaaggaccctgattcttccagacacatggcacacctctatagccctcatcatttcaagccaaattttaaaatctcaaaatgtacttacctggaaataacaatttgcaccatgagctttctgtctttaaaaagcaagtgaaaacaagctgtagagagaaaaaaagagatttagggtaataacaacaacaactaataatgacacctaatgcaacctccacctcccgggttcaatcgattctcctgcctcagcctcccgagtagctgggaatacaggcacccaccactatggccagctaactttttgtatttttagtagagatggggttttttttttttttgagacggagtctcactctgtcacccaggttggagtgcaatggcacgatctcagctcactgcaagctccgcctccggggttcatgccattctcctgcctcagcctcccgagtagctgggactacaggtgcccgccaccacggccggctaattttttttgtatttttagtagagatggggtttcaccatgttagccaggatggtctcgatctcctgacctcgtgatccacccaccttggcctcccaaagtgctgggattacaggtgtgagccaccgcgcccggccctagagatggggtttcaccatgttggccaggctggtcttgaactcctgacctcgtgattcacccgcctcagcctcccaaagtgctgggattacaggtgtgagccaccatgcctggccgacaactaatatttattacttactgtgtgctaggtacttttctaagtcctttagacacattttatcttgttcctctaacaatgccctaagtgggaattgttcttttaccaatattgtacatatgagatagggttgcttaaaatcaccaatggtcaactgtatgtgcaaaactaattaagatcacatagctactaaggaaaagatgatatgaaccgaagacatacattgcaaagaccatactcttgctcactatgctgatgtgcctttcttaaggatattcttttttttttttttttctttttcttgagaccaagtttcactttgtcaccaaatctggagcgcagtggcgccatctcggctcactgcaacctctgcttcccgggttcaagtgattctcctgcctcagcctcttgagtagctgggattacaggtgcatgtcaccatacccagctaatttttttttttttttttttgggagggagtctcactgtgtcacccaggctggagtgcagtggcatgatctcaggtcactgcaacctctgccttccaggttcaagtgattctcgtgcttcagcctcccgagcagctgggattacaggcacacaaccaccatgcctggctaatttttgtatttttagtagagacgaggtttcttcatgttggccaggctggtctcgaactcctgacttcaggttggccacccactttggcctcccaaagtgctgggattacaggcgtgaaccaccgcacctggcttaatttttgttatttttagtagagatggggtttcaccatgttagccaggctggtctcaaactcctgacctcaggtgatccacccacctcagcctcccaaagtgctgggattacaggcattagccaccacacccggccttgatctcttgacctcatgatccgcccaccttggcctctcaaagtgctgggattataggcttgagccactgcacccggcctcttacttttttcttcttttgagacagggtctcactctgctgcccaagatggagtgagcaaaatcatagctcactgaggcctttactgcccgggcttaagtgatcctcctacctcagcttctcaaagtgttgggattacagatgtgaggcactgtgcccagcctagggtagtctatttcctactctgcatgtttcttaaaaaagcctatggagtttcttaagattttacttttttctttggtaatgatgtaagcttcaagtctacctccttggttatcaaggttcaaagggtctccctttaaaaataaagccaagggggccaggcgcggtgtctcaggcctgtgttcccagcactttgggaggctgaggcggtgggtcacttgatgtcaggagttcgagaccaccctggccaacacggtgaaacccagtctctactaaaaatacaaaaattagctgggtgtggtggcaggcacccataatcccagctattcggcaggctgaggtaagagaatcacttgaaccctgggaggcaaaggttacggtgagccaagattgctccaccctgggcgacagagtgagactgtctcaaaaaatcaatcaatcaatcaataaatccaagggaactgagaaagtcctccaacatctttagtgaatggtaagctgacttctgatgtgattcttatcaaaagctttcaccacctttcacttagatatgaaaatatcttagataattagataacagactttggccgggagcagtagctcacgcctgcaattccagaactttgggagaccaaagtgggtggatcacctgaggtcaggagtttgagaccagcctggccaacatgatgaaaccccatctctactaaaaaaaaaaaaaaaaaaaaaacaaaaaattagctgggtgtggtggcgcacgcctgcagttccagctacttgggaggctgaggcatgagactcagtggaacctgggagataaaggttgcagtgagctgagatcacaccactgcactccagtctacacagaagagcaagactctgtctcaaaggggaaaaaaaaaaaaaggataatatgctttcattttatacaacagcagcaccacctggtggcaaacttggagtactttgtaagaactggacatttttgcctaaagacaattggcttcactttctgtgatgcatagattcatggggggctgataggatcggggataaaactacagcttctggctaagtactgtcaatgtattatgcagtttagtggaaggttattagttcaatgtttaccacctgtagtatggaaagttaataggtattataattgtgctcaagcttagcaaacacccgattaaaatgttaaacagattttttttttgtttttttgagatggactctcactctg

SEQ ID NO: 95405 - DNA, 29402 bp, Homo sapiens
  misc_feature (1)...(29402): n = A,T,C or G
agggcgtttctgggagagagatgagcatttggatcggcaggctgcattaaggaaaattgccctcaccaaggtgggcaggcatcatccacgccaccaaaggcccgagtacaatagagaggaggaggccgggtaaatttgcttactcttttcttgaggtgggacatcatcttctcttgctctcgggcactgctgttcctggttcttgggcctttggactgggagtggcacttgcaacgctggctcccctggttctcactcttgagtttggaccaaaaccacaccaccagctttccccagcctcctgcttacagacagcagattgtgtgacttcccagcctccagaatcaaatgagccaatccctcataaaatacagcttttttttttctttttgagatggagtctccctctgttgcccaggctggagtgcagtggtgtgatctcggcttgctgcaacctctgtctccagggttcaagcaattctcctcctgccgagtagctgggcctataggcatgtaccatcacacctggctaatttttgtatttttaatagagacggggtttcaccatgttggccaggctggtcttgaactcctgacctcgtgatctgcccgcctgggcctcccaaagtgctgggatcacaggcacatgccaccacgcccagctaattttcatatttttagtagagatggagttttgccatattggccaggctggtctcaaactcctgacctcaagtgatctgcccgccccagcctcccaaagtgttggaattacaggtgtgagccaccacacctgtttgtttttttttttctttgaggcaggatctcactctgccacccaaactggggtgcgatggtgagatctttggctcactgcagccttcactgtctgggctcaagcaatcctcccacctcagcctcccaagtgagggggactacagacgcataataccacaccggcctaattttatttaaaattatgttttgtagagatggggtcttgctgtgttgcccaggctggtctcaaatttctggcctcaagggatccgcctgccttgccctcccaaagtgctgggattacaggtgtgtattagtcaggtttctgtagagggacagaagtaataagatagacatatgtagtattaactcacacaatcacaaggccccacaataggccatctgtaagctgaggagcaaggaagccagtccgagtcccaaagctgaagaacttggagtctgatgttggagggcaggaaacatccagcacagaagaaagatgtagactgggaggctaggccagtctagccccacttattttttttttttttttggtgaggtgagtctctgtcacccaggttggagtacagcggtgtgatctcggctcaccgcaacctctgcttcctgggttcaagctattctcctgcctcagcctcctgagtagctggcattataggcatgcaccacaacacccagctaaatttttttgtatttttagcagagatgagttttgccatattggccaggctggtcttgaactcctgacttcaagtgatccacccgtctcggcctcccaaagtgctgggattacaggcgtgagccacggcaccaggcctagtctagtcttttcacgtttttctgcctgctttatattctggccgcactggcagctgattagttggtgcccacccagattgaggatgggtccgcccttcccagtcccactgactcaaatgttcacctcctttggtaacgccctcacagacacacccaggatcaatactttgcatccttcaatccaatcaagttgacactcattattaaccatcacaaggtgtgagccctgcacccagcaatatattgctttttatatatttatagaaattcaattggttctgtttctctggaaaatcctgatcaatatacactccttcatttttcttatagcactgaattatgggataaaccaggttggttgtcctgtagaatgtcccacactgtgatttgactgatrtttccccatgattttaacttctatctcctgtgtttcccaatcaacccacttgggtttttgttttttctttttgtttttagatagggtgtcactgtgctgcctaggttggagtgcagtggtacagtcacagctcactatagcgtcgacttcccaggctcagatgatccacccatctcagcctcctgagtagctggatccacaggtgcacaccaccacacctagctaatttttaatttttttagagatggcagaggtggggggggttgcgggggggtctcactatgttgcccaggctggtcttgaactcctgggctcaagcgatccccctgccttggcctcccaaagtgctgggattacaggtataagccaccgcacctggccccaaacaacccactttttttattctctcagtttttgcccttatttaatcccccactcttacttcagcctccttaggaacttgagtctctggacccctctactttttctctgccaataagccctttcataatgttcgtcatcactccaaccactctactttttaaaaatggactttgttgaggaataacatgcatacaataaaatgcttgtatttaaaatgtacttttcagcggattttaataaatacatacayctgtgtaactaccgccaccatcaagtcgctctcttcttcacagcccccactctgtctcctctcatcatgctttcccaacctacatcaatccctcagactccccctctcctggcacgcctggctgcagacctgcaggagagaacacacacgccgacctgctggaaacctgtacatcagtactgccctcccgaggaccctcggtctttgtccaggcagcagtgctcgcccatgctccacagcagctttttctttttctttttttcttgagatggagtctcgctcttgttgcccaggctggagtgcagtggcacaatctcagctcactgcaacctctgcctcctgaattcaagcgattctcgtgcctcagcctcccgagtagctgggactggaggcgcccaccaccacacccagctcatgtttttgtatttttagtggagacggggtttcaccacattggccaggctggtctccaattcctgagctcaagtgatccacccgcttcagtctcccaaagtgctgggattacaggcctgagccactgtgcccggccagtaagtttctttttttcttttgagacaggatctccctctgttgcccaggctggagtgcagtggcatgatcttggttcactgccacctcaaatgtctgtctttaccactgtgtagtaacaaatttggccaggagtggtggcacatacctgtaactccagcactttgggagatcaaagcgggaggatcacatgagcccaggagtttgagaccagcttgggcaacatagtgagaccctatctctaccaaaaaaataaaaaaaaattagccaggcacggtggcatgcacctgtcatctcagctactcaggaggctggggcaggaggattgcttgagcccaagagtttgagaaaagcctgagcaacaaagtgagaccccatctgacaaaatagtataaaaggacgttttaaaaaagggctaggtaggcagccctgtccaatagaactttccctatctgtgctgcccaagtaaggtagccacaagcttcaagtagctattgagcactggaaatgtggccagcagccaggcgtggtggcaggcgcctgtgtcccagctactcaggatctgaggcaaaaagatcgcttgagcccaggaattcaaggccgcagtggtggactcaataaaagaaaaaaaggtcgaggctgcagtgaactatcatcatgcccctgagcccctaaatcccaaatgataggagtgtccatcttattcattgtgggcttctcagaccactcctgatggtttatgctaatgagatgacttgggatgggcccctatatagttcatgttaacaagatgactgaggatgggaactggccatgctggaaaccaacgaccgaacacgacacttgagctttgtggctttgagccccacctctggatgggtcagggagactggtgattgagaaaacaatctcactagaagagtgagagatagaatagccagcacactgcggcctcgatctgaaccagctcaggtctttccaaacactagtgacatgtggctatctaaatttaattaaagccaggcgcagtggcacatgcctgtaatcctagcactttgggaggccgaggtgggcagatcacctgaggtcaggagtttgagaccagcctggctaacatggtgaaactcatctctacgaataatacaaaaagtggctgactgtggtggtgcatgcccgtagtcctagctactcaggaagctgaggcacaagaattgcttaaacccaggagatggagattgcagtgagccaagatcctgccactgcactccagcctgggcgacacagtgaaaccccgcctcaaaaaataaatttttaaaaaattaatttaattacaattaaaacttcacttcctcagtccactggccacttttttttttttaatttccattttttttcttttattgagtccaccactgcggccttgaattcctgggctcaagcgatctttttgcctcagatcctgagtagctgggacacaggcgcctgccaccacgcctggctgctggccacatttccagtgctcaatagctacttgaagcttgtggctaccttacttgggcagcacagatagggaaagttctattggacagggctgcctacctagcccttttttaaaacgtccttttatactattttgtcagatggggtctcactttgttgctcaggcttttctcaaactcttgggctcaagtgatcctcctgcctcagcctcccaaagtaatttgtaaatacgtgtaaataatatagtcctctcttgttgcatcaaaatgaatgcaaaaatgtcacgatggggccgggcgcggtggctcatgcctgtaatcccagcacttcgggaggccgaggcggtaggatcacctgaggtcgggagttggaaaccagttttctggtgcctccttaacttttgcactggagggacaacggaagggccctgtgtcatcctcacctcccccatctgtaattcttctgatggttaattaccactttaaagctctagttctttttccttcacctactgagagtatatctccttctttacagtaacttttactttatagagttttttttgagacggagtctcacttcgtcacccaggcgggagtgcagtggcacgatctcgacccactgcaacctccgccttccgggttcaagcgattctcctgcctcagcctcccgagtagctgggacttacaggcgcccgccatcacgcccagctaatttttcagtacagacggggcttcaccaggttggccaggctggtctcgaactcctgacctcaggtgatccacccacctcggcctcccatattgctgggattacaggcgtgagccaccgcgcctggtcccgttttggctattctttaatatgcttccctataactgctatctccacaccagccttgccttagctcatgggaaacaaaaccaattagttcccccattacctgccttgaggagcaggggtggtgcagtggcatgcacccagggaagtgtgttgtatgggcccccaagtgcagaatctgaatcttgcaaaggaagaaacaaattcgtctccacggagcatgtctccccaggactctcagccttccaaatccgcagtcacagtgactcagcagaatctgagcctagggcaccacagtaatccgcatccggctctttttctgctccatttcgtgccaaggctaaaagggcatgcccacttgatccctggactctcttgggacgacttccaccctgcatcctcttgcacctcagggcacagtgcgcagatgggcttgccttagcacccccagccagatttttgaggcctctgtcacacacacccctacaatcccctcccccagccccgagagacttttcttgacttccaccagttgctccggcgggtgagagtggagaggsccctccttcatcccccaggctccctcccttcctggagctgcagcctcagcatcctccgcccagcaccccaggattcaggcgttgggtcccgcccttgtaggctgtccacctcaaacgggccggacaggatatataagagagaatgcaccgtgcactacacacgcgactcccacaaggttgcagccggagccgcccagctcaccgagagcctagttccggccagggtcgccccggcaaccacgagcccagccaatcagcgccccggactgcaccagagccatggtcggtgagtgctgcaaagggcggggtgcttggcggtcgtctctcgagcactgstgcctgtggaggaggttgtaggggcttggccctgaattttgttccttgactcaaaacccacaaagggaagagattagggacctgggatgagccttgatcggactccgggagaaggagagcttctgtttgtatccggtgtcgcggatccttcctcactccaccccacgaactctagtgggcatttaggagaaacttgaccttggaagcagaaattccctccaaaactgtggtcagaaactggccgtcagaggccaaatcaggcttacggtcacagcccatacctcttttggtctatagtatctaaaacactttgaaataagttgctaacattaaaatgggtgatttcacttaaaaatgtggattccgagcttctgaagaaaatgagaatatctggcgattggtggacaggagtggaggaaactgatgcctttggtttgacggagaccagaaccggctccaggctgccaggcacaggttttgttttgttttgttttgttttgtttgagacggagttttgctcttgtcgcccaggctgtagygcaatggcgctatctcagctcagcgaaacttccgcctcccgggttcaagcgattctcccatctcagcctcccgagtagctgggattacaggagtgcgccatcatgcgcggctaatttttatatttttagtasagacgggtttcgccaagttggccagcgcggtcttgaactcctgacctcaggtgatccacccacctcagcctccccaagtgctgagattactgacgtgagccaccgtgcctggccttgggaggcattttccattgaggcccttggattaggcaaacctgatcagatcgtactggatccgtttctagtattgggtccacttcagtgatagagccttcccactcggccatcgaccctaggggaactcagaggtcaccccagctccacccaaggcataaataaccagctgagacaactgcagggattgagagctgtttcccaaataatctcactctgagattggacagtactaagatttagaaagctgttgcctcatctggggcagaatcctgygttttgtaatttccttccctgtggacctggkcctgcctctaaaaatgcgcctgtacacaaagaagcccatcttggtcaaagtgagtggaggaacagactgcccttgcagttgacaaactgaaattatcaggatctctgagaaagggactaagctggggattggtagcccagcatgagttactggcagagacagcagggaatagattctgacagctgagaggcttgccgcatacacggtggttgctgtttcccttgtrtttcattcttcagcgtcgaggcactggcaccctctcctccaatactagggcaggaactatttcctgacttttcaatcttacagaatgttctgtatttacgtgtagcttaaacacaaaaaagggcggtggtaatgaggtgaaaagggaagacttggatcttgtataattagttttagctgtacccagctaaccaaatcttgaggttaactaaagcatccaggwtttttgtttgcaactaatagatgcatctgatttgcactcatgttccctggagcactcaagtgagaagagaaggcagaaggagaatgcatgaaactgatacaaaggcttatctttatcatacttctttttttctttttgagacagggtcttgctttgttgcccaggctggagtgcagtggcatgatcagggctcacttcagccttgacctcctgggctcaagtgattgtcccatctttgcccccgagtagctgggactacaggtgtgtgccaccacacccagctaattttttttggtcagagcagaagaacttgaaacccagctaattaaaaaaaaaaaaaattttkgctgggagtggtggctcattcctgtaatcccagcacttttgggaggctgaggcgggaggactgcttgaggccaggagttcaagaccaagattcagctcaaatggcaagctcctctgagggcctttccgaatgggccagccctgaggtcctgaagttttcctctgttgaactttttgagatggagtctcactcactctgttgcccaggctgtagtgcagtggcgtgatcttggctcattgcaatctccacttcccaggttcaaacgattcttgtgctgcagcctcccaagtagctgggattacaggcgcccaccaccacrcccagctaattgtgtatttttagtagagacggggtttcaccatgttggccaggctggtctctagctcctgacctcaagtaatccacccgcctcggtctcccaaagtgctacgattacaggcatgagccaccacacccagccttctgttgaactttgtcccttacctctcctaacacactaatgccattgtaccctgaagaggttatccgtgtgtgcatcttgtggcctctctcagggtaaactctaayagtctaactcctcccaggtcatgttgctcagctagttaagtggcaggaagggaaaatgaaccctccagggcccagaaaacttttaaattgcctattcacaagcatctttttgtttgtttgtttgagacagaggcttgctctgttgcrcaggctggagtgcaatggtgcgatctcggctcattgcaacctccgcctcctggattcaagcaattctcctgcctcagcctcccgattagctgggattacaggcacctgccactacacctggttaatttttttttgtatttttagtagagacggggtttcaccatgttaaccaggctggtctctaactcctgacatgaggtgatctgcccgcctcagcctcccaaagtgctgagattacaggtgtgagccaccgcgacccacccacaaccttcttttgatcatttttcttttgagttgttttggggatctacctattccaggtactgcactttgatggttatatttgttgcaaatatattattcctgcttgtgtgttgccttacatgaaaaattgtaaagtcacaggcctgcttatagctattagagtctgagctccttgaaagagcaagagatggatatcctgatttgctcattttctgagaagtgccttgactgtcttactacttagaaaatgcttgttaacattgatgagaagtcaataaaataaaaactgttggctgggcgctgtggctcacgcctgtaatcccagcagtttgggaggccgagacaggcggatcacgaggtcaggaaatcgagaccatcctggctaacacggtgaaaccccgtctctactaaaaatacaattagccgggcgtggcggcgagcgcctgtaatcccagctactcgggaggctgaggcaggagaatggcgtgaacctgggaggcggagcttgcagtgagccgagatcgcgccactgcactccagcctgggcgacagagcgaaactctgtctcaaaaaaacaaacaaacaaaaactgtcagagcggcgatcagtaaacattgataagactaatggcaaggtaagttacaaagaaaatgcctgttagagctgaatatgctcacttccctcccaatcatgttaaatccatgggttaaagaggtaggaatttgttgaggcagcctcagagcttccttttcctttttccaagctatcccaagcaagtcaatcacttccagcgcattgaaatcatcaccagacacctattccactgagtcttagttttaagagtccaaaaccctaggaccaagtttggaaatcccctggtttggcatattgggccctgaaagttacacttcgctgaatttagcccaagaggcacttgccttgctagatgtggtcaataataaaagcaggaagagagcttaaggtttaaatgtgcctttctagttattttagttatttctagttattcagatggtgcaaaaaagttgcagatgccggctgggcgcggtggctcacgcctgtaatcccagcactttgggaggccaaggcaggtgggtcatgaggttaggacatcgagaccatcctggctaacatggtgtctctactaaaacaaaaaatacaaaaaattagccgggcgtggtggcacgcgcctgtaatcccagctattcggaggctgaggaaggagaatcgcttgaacccgggaggcagaagttgctgtaagccgagatggcgccactgcactccagcctgggtgacagagcaagactccatctcccccgcccccacccccaccctgccaaaaaagttgcagatgccttctctcccagctccacccactgttcatggtagggtatgaagtagcagcgcacattatcaggagcaactgtgggggtaagcgtcctttctctggcaattcgctctatgcccttgtacgctgttgtttgtatttctcactgtttgtaagtctcactgtcgcccaggctggagtacagtggtgtgatcacggctcactgcaacctccacctccctggctcaaatgatcttcccacctcagcttcctaagtagctgggactacaggcacacaccactacgctcagctaatttttttttttttttttttttggtagaaacggggtttctccatgttagccaggctggtctcaaactcctgggctcaagcaagctgcctgcctcggcttcccaaagtgctgggattacaggtgtgagccaccacgcccagccactctctgtgtttttaaattattccagcttcaccacttaatgactacacacttgggtaacttgcttctctcctgtgcctcagttttctcatctgtaacatggggctactcatggtattgacctcatagggtgtgtctcagtctattttgtgctgccatacataatacttgggactaggtagttaataaaaaagagaaattgatttctcacagttctggaagctgggaagtcgaagatcaaggtgctggcaggtttggctgtctggtgagagctgcatttggaggaatgctgcgtccttacatagacggtgggaggtagaaggtggaagggcaggtgagccccgtgctgggcgaagcctcttttatgagggccttaatcccactcatgaggaaggagaccccctcgcctaatcacctatcacaggccccatctgttaatcctctcacattggcagcacctgaattttggagggggacacgtttaaaacatagcaggttgtcctgacaaaggaagaaagtgcaggccgggcgtggttgctcacacctataatcccaacaytgtaggaggctgaggcaggcaaaattgccccagcctgggcaacacggctccaaatttgaccagcctgggcaacatggcaaatccctgtctctacaaaaaaaaaaaaaaaattaggtgtggtggtgcacacctgtagtatcagctactcaggaggctgaggtgggaggatagcttgagcctgagaggtcaaggctgcagtgacctgagatcatgccactgcattccagcctgggcaacagatcgagaccctgtctcagaaagagaaaaagaaaaaaaaggaatgcaaagcacttagggcagtgcctagcactaaggatccactaaatactgttcttgcaaattgaagcatgctgcctctgacaaccttgttaatataaaagaggcccatttcccttctacctgtacctctttgccatttcttataaaggaagctgagctgttaatagttyaatgtgattggcctggcacggtggctcacacctgtaatcctagctactggggatgctgaggcaggagaatcgcttgaacctgagaggcggaggttgcagtgagccragttcatgccactgcactccagcctgggcaacagagtgagactgtcaaaaaaaaaaaaaagtttaatgtgatcactgcacatttttccccctcataccaaggtgctgcaagtctacatacaaatatatgtcatttctttttttcttttttttttgtattttcttttttcttccttcccttccctctctcccttcctctcacttctttcattttaaataaaaatgggttcatattcacttgcttttttatcagttaataatatagcatggatatctttttgagtcactacatatagttaattcattttaatttttttaatttttaaaatttgtttatttgagacagggtctccctctgtcacccaggctggagtgcagtgcggcgatcacggatcactgcagcctcaacctcctgggttcaagtgatccttccatctctcagcctcctgagtagttgggactacaggcatacaccaccatgcccagctaatttttgtacgttttgtagagaagggatttcgcttttgtcatgttgcccaggctggtcttgaactcctgggctcaagcaatgttcccgccttggcctcccaaagtgctggaattagaagcgtgagcaaccgtacctggtcaacagtctctaaaaatttttttttatgacaaggtgtcactatgctgcccatgctggtctccatctcctggcctcaagggatcttgccgcctcagccttccaagtagctggattacaggctccagccactgtgcccagccagtttaactcattcttttttatatattttttacttttatcttaatttatttatttttctgagacagggtcttactctgtcacccaggctggagtgcagtggcaagatctcagctcactgcaacctctgcttcctgggttcaagcgattctcctgcctcaggctcccgaatagctgggattacaggtgcccgctaccacacccagctaatttttgtatttttgtagagacagggtttcaccatgttggccaggatggtcttgatctcttgacctcgtgacctgcccgcctcagcctcccaaagtgctgggattacaggctcgarccaccgtgcctggccaactcattcttgttaacagcaaaatatcctgtagtgtggatgtacccataatttcttaaaatgttccccatagacaatcaggttatatctaatttttgccagtgaaaagcatggtgtaatacacatctttgctcttatagcctgaagcttttagtctgtagaacagattcccccaaattggagagcgagataaaagatttatgtgtctttaaagtttcaagagattctgcctcattactttccctaaaggttgaggcagttcttatccccaccagtaaggtgccaatttttctgttggtacaatcttaataaccctgggtgttatttgttttacattttgtgggtaaatgtaaactcacggtaaatgtaaacacagtacccatgtaaacgaatgggtaaatgtctcattttaattttgcttttcctgacaggtcacgcagagcatctttttttttttttttgagacggagtctcccattgtcrcccaggctggagtgcaatggtgcaatcttggctcactgcaacctccccctcccgagttcaagtgattctcctgcctcagcctcccaagtagctgggattacaggtgcctgccaccacacccagctaatttttgtatttttagtagagacagsgtttcaccatgttggccaggctggtctcaaactcctgacctcaggtgatctgcccrccttggcctcccaaagtgctgggattacagttatgagccacagagcccagttgtcaacattatttattaaatcagccactgatttaaatgcttcctttaatcttcagtgcttttaaggggaaaatacatttctggctacaggagatggaatgcaataacctaatgtcaaacaaagccgccccctcctttacagactgcaactcccctgtagctgaaggtttgctggttggtaatgggttttccstgtgtgctttgtgtgtgtctctgtaggcagaagagcactgatcgtactggctcactcagagaggacgtccttcaactatgccatgaaggargctgctgcagcggctttgaagaagaaaggatgggaggtggtggagtcggacctctatgccatgaacttcaatcccatcatttccagaaaggacatcacaggtaggaggagttcctcctcccctctttaattagttctttgcggatctccttgcctgtgggtcctctggcccagctttggcccctctggccccagcctctctttttcttctctgcaggtaaactgaaggaccctgcgaactttcagtatcctgccgagtctgttctggcttataaagaaggccatctgagcccagatattgtggctgaacaaaagaagctggaagccgcagaccttgtgatattccaggtatggggggacatcggaaggggtgtcagggacatttgcgtgcttattgtcctagacatgtacctaattagctatgagatcttaaacagttacccactttactgcattctctgcaaataagggtgattactttaaaggtgcagtattacatggatttcacagatattgggaatctggctgtattactgttgcatgtgtaaatgcaactgcaaggccaggcacggtggctcacgcctgtaatcccagcactttgggaggccaaggcaggtgaatcacaaggtcaagagaccaagaccatcctgaccaacatggtgaaaccctgtctttactaaaagtacaaaaattagctgggcgtggtggcatgtgcctgtagtcccagctactctggaggctgaggcaggagaatcacttgaacccgggaggtggaggttgaagtgaaccaagattgcgccactgcaccccatcctggtgacatggcgacagagcgagattctgtctcaaaaaaaaaaaaaaaagaaagaaagaaatgcagctgcagagatgatgtacagtccttgagcttgctttcttccaggtacttagtctccccttcagttagcgattccttcagttagcgattccttcagttagcgaatcctgcrgttagcgattcctgttggactctctcaaaatttgcagttctcctcctttctccataagaatcccaaatactttgtagaataatccatgagacattgacttctctgccattgtagcctgccagctgaagggggctttgaaaccctgctgaatgtgttcctgcagcaaaccacggcctttcttcttcgggaagctgccttaccgtttagcagacaatgctgggattgtgcgtgcatctcgtcagtgatctttcctataaatgtgactgtactcaatgactttgcttttacaattccagccagtcttttgatattgaacatagaatgtatatgatcctggaaaccacgaggagggtggtacaggctgtgttttttttttctctctctctctcttttttttttttagttattcaatcagctacaaaacatccaatccttgaagtcctttattttacccacaggcctgttgctaagaatcaaagccacatgccactagccagtaccccaaaggacggctttaaaaaaaaattaaattggaracaaggtctcacggtcacccaggatggagtgcagtggcatgatctctgctcactgctgcctcaacctcctgggctcaaatgatcctcccacctcagtctcccgaatagctgggactatcagtgcacaccaccatgccctgctaattttttaatttttttgtacaaatagggtctcaccatgttgcccaggctggtctcaaactcttgggctcaagtgatctgcctgcctggacctcccaaaaggctgggattataggcatgtgcctttcatatctttaaatcatgaatcaaggataagaaaacctcctggtatagtccttactctgcttttattaggataagaggtcagacaagactttctcatgggaagtccctgatgaaccttagtcaccctaattattatttattataatttttattttttaacattttatttatttatttatttgtttttgagatggagtctcgctctgttgcccaggctggagtgcaatggtgcaatctcggctcactgcaacctccgcctcccgggttcaagccattttcctgcctcagcctcccaagtagctgggactacaggcatgcaccaccacgcttgactttttgtatttttagtagaaacagggtttccccatgttggccaggctggtctcaaattcctgacctcaagtgatccacccaccttggcctccaaaagtgctagaattaaaggcatgagcaactgcacctagccacgttgatgatgatgatgatkattattattattattattattatttagagatggagtcttgctctgtcacccaggctggaatacagtggtgatcacagctccctgcagcctccaactcctgggctcaagcaatcctcctgcctcagcctctcatatagctgggactagagatgtgcaccatcacatcaggctaatttttaaatttttttgtagagacaaagtctcactttgttgcccaggctggtctcaaactcctgggctcaagtggtcctcccaccttggcctcccaaaatactgggattataggcatgagcaaccacactcagccatcacactgattattagtttgcatttttgagtgattttgtttattctaagtgatatgatttttcatccacgataacaagggacagtcataaaatgaagaaggcctacatttttttccacgatggggtctcactctgtcacccaggctggagtgcagtggcacgatctcggctcactgtaacctccacctcccgggttcaagtgattctcctgcctcaacagcccgagtagctaggactacaggcgtgcgccaccacgcccggttgattttggtatttttagtagagatgaggtttcaccatgttggccaggctggtctcaaactcatgccctcaagtgatccacccgccttggcctcccaaagggctgggattacaggcttgagccactgcgcctggccaacagtcatattgttgataccacacctactaaagcaaactcttgggaaaatactgattgaagcaacagcatgaagcaaaccttgtttgcaatccttgctatttagactttgctgccaaatgtgatttcatacaaacaagtttcatatcaacaagtcttctgtgtatctagctttactcggacccactcaatatttgcattttcagggaaaaagaagactgtcaagttggctgaccaaggacaataatgatctctttccttaaagtgctaactccccaggaggaatgggaaaggtgtgaagaggggcttcccacacagtgccatcatggggagcggctcagcactccgagccaccttctgggcttggggagcccctggtcttacctcaatgatgtcttctgtcccacagttccccctgcagtggtttggagtccctgccattctgaaaggctggtttgagcgagtgttcataggagagtttgcttacacttacgctgccatgtatgacaaaggacccttcygggtaggtggatggttctgaatgctctgacagccagcttctgggtggtctgtcctgatgcaggggtgtttgtttgtttgtttgtttgagatggagcttccctcttgttgcccaggctggagtgcagtggcgggatctcrgctcactgcaacctccacctcctgagttcaagcgattctcctgcctcagcctcccgagtagctgggattayaggcatatgccaccatgcccggctaattttgtatttctagtagagacggggtttctccatgttggtcaggctggtcttgaactcctgacctcaggtgatctacccgcctcagcctcccaaagtgctgtgattaccggtgtgagccactgtgcccggctctgatgcagggttttgagcacaattagatcctaagcctaggctccaggtccttcgggagagacgcatgatcaagtttttacagatggaatgacatgatgtttgggatttgttttaaaatgctccagaggccgggcgcagtggctcacgcctgtaatttcagcactttgggaggccgaggcaggcagatcacctgaggtcaggagtttgagaccagtctggccaacatggcgaaaccccgtctctaccaaaaatacaaaaattagctgggtgtggtggcgggcatctacaatcccagctactcaggaggctgagccaggagaattgcttgaaacccaggaggtggaggttacagtgagccaagatcgcgccactgcactccagcctgggcaacaaagcaagactccatcttaaaaaataaaaggccaagcacggtggctcatacctgtaatcccagcactttgggaggccgaggcaggcggatcacaaggtcaggagatcaagactatcctgcctaacacggcgaaaccccgtctctactaaaaatacaaaaaaacttagccgggtgcggtggcacgtgcctgtagtcccaggtactcgggaggctgaggcaagatagttgcttgaacccgggaggcagaggttgcagtgagccgagatcgcaccactgcactccaggctgggtgacagagcgagcctccatatcaaaaacaaaaacaaaaaaaaaattagccggatgtggtggtgggcacctgtaatcccaactatttgggaggctgaggcaggagaatcacttgaacccgggagacagtttgcagttggttgagatggtgctactgcaccccagcctgggcaacagagccagactctgtctcagaggaaaaaaaaaatgaaataataaaataaaataaaacgctccagagaaaaagggggtcatgggtcgagctaaaactagaatagcagaatactgagaggtgaaggtgagtgatagatgcagcactattttctcatttacatgtgttaaaaatttccataataaaaacaaaagaaggcctgtcttcattttttggaggcccaaatcctgcacagggaacccttcgagaccttccagatgaaagagcttgtcctacgccatgcctagcccgtgggaggatggataagaacaaccaataactccacctaggcagccagcagccagcactgattttggatatggtgacagcctcgtcctaagccacatgtgggggtttggaatccttcatttgccccaggccaccggtctgtagaccatctaggctggcactcctgcagagtcatattatgtagctcaggggagccaaagtatgaagtaatataaacagcaaataggacagacttgtgtgttcttttccctggagctgtttcattaacttcttgtcaccaaggggatgtggagggaagtgaagtttgttattgctttttcttttgcagagtaagaaggcagtgctttccatcaccactggtggcagtggctccatgtactctctgcaagggatccacggggacatgaatgtcattctctggccaattcaggtacctcattttcttttcttttcttttttttctttgagacggagtctcactctgtcatctaggctggagtgcagtgacaccatcttagttcactacaagctccgcccgctgggttcgagcaattctcctgcctcagcctactgacaggcacccgccaccacactcggctaatttttgtattttttagtagagacggggtcttgccatgttagccaggctggtttcaaacacttgacctcaaatgattctcctgcctcagcctcccaaagtgctgtgattacaggcgtgagccactgcacctggccaggtacctcattttcaacgaaccttcaggggaattcattcattgagccttcgtggggttcaaaacctcaagatagcatctgaaaatagatcttgagttgtgaagatgaaagcatggtcataattcagaatgatgggagcctcctttaagaacctgcctgccttcccaggtgcctgtgtgtgaacacacctgcgtgtgcatgtgttcaaacagcattctgtcccagccaaggactagtgtgaatcactactcttgatttgtatagccgtgggccctggtctcaccagatgactgacatctctctccagccttcctgtccttctccaggttgctgatacagtcccatagactattagagcccaagacaatttaagaaatgatttactgggaggctgaggcagaaggatcgcttgagcccaggactttgagaccagcctgggcaacatataagacctcatctctacaaaaaaaaaaaacaaaattagctgggtgtagtcatacacctgtggtcccagctacttgggagtctaaagtgagagacccaggagttcgaggctgcaatgagctatgatcacaccactgcatgccagcctgggatacagggcgagaccctgtttcgaagaaaaaggaaataatttagtccagccagtttatacatggataaaactgaagcctggggtgggcttattggtgttaccaaaccctcaagataatttctataaagagggaggttggagagaagagccagtgagtggccacttatgaaaatcatttatcaagactcatctgggcctgtaatcccagcactttgggagactgaggcaggcggatcacttgaggtcaggagttcgagaccagcctggtcaacacagtgaaaccctgtctctactaaagatacaaaaattatctgggcatggtggcgcatgcctgtaatcccagctactcgggaggctgaggcaggagaaccgcttgaacccaggaagtggaagccgcaatgagccgagatcgtgccatggcactccagcctggacgaccgagcgagactctgcctcaaaaaaaaaaaaaaaaagaaaaagaaaaaaaggactcatctagttatatggagaggcagagaaatgcacccacgcaggtcttggtgagtcacctgccaagaaactgagactccctaaagtaacagaacttccagccttcttggcaaaggatccaggttggcacagtttcaaggtttatgcatttaaagaagaacacacctgagaaggctaaaattggtaacggctaggtagagggtaagagagagacgctagctctgaactgattctctagtgtgcctgaggcctccttatcagagtgtcttactgagaagcccagaccaacttctgttgtttatagtacaactgcatggaattggttgacttacctctctgtgctttctgtatcctcagagtggcattctgcatttctgtggcttccaagtcttagaayctcaactgacatatagcattgggcacactccagcagacgcccgaattcaaatcctggaaggatggaagaaacgcctggagaatatttgggatgagacaccactgtattttgctccaagcagcctctttgacctaaacttccaggcaggattcttaatgaaaaaagaggtacaggatgaggagaaaaacaagaaatttggcctttctgtgggccatcacttgggcaagtccatcccaactgacaaccasatcaaagctagaaaatgagattccttagcctggatttccttytaacatgttatcaaatctgggtatctttccaggcttccctgacttgctttagtttttaagatttgtgtttttctttttccmcaaggaataaatgagagggaatcgacygtattcgtgcatttttggatcatttttaactgattcttatgattactatcatggcatataaccaaaatccgactgggctcaagaggccacttagggaaagatgtagaaagatgctagaaaaatgttctttaaaggcatctacacaatttaattcctctttttagggctaaagttttagggtacagtttggctaggtatcattcaactctccaatgttctattaatcacctctctgtagtttatggcagaagggaattgctcagagaaggaaaagactgaatctacctgccctaagggacttaacttgtttggtagttagccatctaatgcttgtttatgatatttcttgctttcaattacaaagcagttactaatatgcctagcacaagtaccactcttggtcagcttttgttgtttatatacagtacacagataccttgaaaggaagagctaataaatctcttctttgctgcagtcatctactttttttttaattaaaaaaaatttttttttgaagcagtcttgctctgttacccaggctggagtgcagtggtgtgatctcggctcactgcaacctctgcctcccaggttccagcaattctcctgcctcagcctccctagtagctgggatgacaggcgcctgccatcatgcctgactaatttttgtatttttagtagagacggcgtttcaccatgttggccaggctggtctcaaactcctgacctcaggtgatccgcctacctcagcctcccaaagtgctgggattacaggcgtgatccaccacacctggcccttgcaatcttctactttaaggtttgcagagataaaccaataaatccacaccgtacatctgcaatatgaattcaagaaaggaaatagtaccttcaatacttaaaaatagtcttccacaaaaaatactttatttctgatctatacaaattttcagaaggttattttctttatcattgctaaactgatgacttacyatgggatggggtccagtcccatgaccttggggtacaattgtaaacctagagttttatcaactttggtgaacagttttggcataatagtcaatttctacttctggaagtcatctcattccactgttggtattatataawtcaaggagaatatgataaaacactgccctcttgtggtgcattgaaagaagagatgagaaatgatgaaaaggttgcctgaaaaatgggagacagcctcttacttgccaagaaaatgaagggattggaccgagctggaaaacctcctttaccagatgctgactggcactggtggtttttgctctcgacagtatccacaatagctgacggctgggtgtttcagtttgaaaatattttgttgccttcatcttcactgcaattttgtgtaaatttctcaaagatctgaattaaataaataaaattcatttctacagacccacactcattggtatcagtgaagctaatgatagtggaatctagtgggaggcagatcagaggattcaatcacaaactgcagctggaagccccttggtgactggcttgacaactcacccagcagggctgcttcctactaaatggtaatagaacaacctattcagtcctctcagggaattcaaaggaaagagagtggtatagaaatcaagaaaaacaggctgcgtgcaatggctcacgcctgtagtaatcccagcattttgggaggcaaaggcgggtggatcacctgaggtcaggaaacccagtctctactaaaaacttaaaaaattagctgggcgtggtggtgcgggcctgtaatcccagctactcaggaggctgaggcaggagaattgcttgaacccgggaggcggaggtttcagtgagccaagatcgtgccactgcactccagcctgggtgataagagcgagactctgtctccaaaaaaataagagacatctattaagactgccaggtgaggctgacaagtaggcagttggataggaggaacctggagttaaggcagaagttatggctggagatgcacatttgggaatcttcaacatatagatggtgtttaaagcaatgagattggctgggatcaatctctttgagttttgagagaagagatttgatgatttacctctggggctcgacaatgttaggagatgaagatgagagtgaaaagcagtggtcagatccttttgtagttcctaagtgtgttgattgggtgttcacgtgcatgtgtgagatgtggcacccttgaatcttgttatgacatcagtacatttcccgtctgacatgaaaaaaaaaaacaaaactggtgttcagagatgcaggagagctgagtgtggtgtcccgaaagccaagcgaagaaagtgtttgaagatggccgggcgcagtggctaacacctgtaatcccagcattttgggaggctgaagagggtggatcacctgaggtcaggagctcgagatcagcctggctaacatggtgaaaccctgtttctactaaaaatacaaaaaattagctgggcatggtggtgcgtgcttgtaatcccagctactagagaggttgaagcaggagaattgcttgaacccaagaggtggaggttgcagtgagctgagatcacaccattgcactacagcttgggcaacaagagtgaaactctgtcttgaaggaaaaaaaaagtgtttgaaggagggaatgatcaggtgtgtcaaatactgctgacaagccaagcaagacgaggcctgggaagtgaccactggacttggtcatgtggaacccatttgttggtgacattgacaagcaccatttcagtagagtggcgtgatgaaagcctgatttgaatgggtttgagaatggaaggagaggaatagaaatagtgtggaggaggctgtgtgatcaaagaacaattttttttaagagatcagggacattacaacaaatttctatgtcaatggaaatgactcagagaaaggaaaagttttgatgctgatgacaaagggacatctttgaaaaagccaaaatgctatatttgtatatttatcccctccaaaactcaagttgaaatttcatccccactgtggcagaattgagaggtggggacttttaagaggtgactgagggccagcatggtggctcacacctgtaatcctacctagcactttgggaggtaaggcagacagatcactggagccctggacttcaagacccagcctgggcaacatggtgaaactctatctctacaaaaaatgcaaaacttagccaggtgtagtggggggtatacctgtagtcccagctactcggggtagggactgagatgggaggattgcttaagcccagaagaggctgcagtgagctgtgattgtgnnnnnnnnnnnnnnnnnnnnctccctcttgatttttttttctctttttattattttgagacagtttcactccggtcacccaggttggagtgcatgctcagcccccttgccgtgatagcttgcaacaccttgtggattcttggtgagtcctcagaccgcctcactcgcactcaccatgacacagccctctccgagatggacctattccggcacctcacatgggagtgcatgctcagcccccttgccgtgatagcttgcaacaccttgggattcttgggagtcctcaccagcaagaaggctctcaccagacacagcccctccacctggacttctcagcctccatggctgtaagaaattctttttctttatacattgcccagcttcaggtattctgttaaaatcaagagaaaacagactaatacatagaaggatgtgagaagtagtgcacaagagctagaagagcagagtagtatcaggactagtaatactaatacaaggtaacacttaggaggcacttactgtgccaggaactaggtaattttacatggactaacttgcttaactcgttcaacaactctgcaaggaaggttctgttattgttttcactttatagcaaaggaaattgaggaatggaggttatattataggcaaactcaagagcctatgcttttaaacactatgttatattgcctcagtagaatagaagcagagatggcaccatgaaatagagcatgagagtagcaaccaatatctctttttctgagaataagaccattagtgttgctgttgagaaggtatagctattttttgatttctagagtccctactgtgttctcagcagggataaatgatattttggttctcttctaggcttagatggctgcagagaatttgtttcttgtaagttaatagagtaaggctcttaccagcttagagcagagcaggacaattacctcccttattctggacactgtacttaaattatgtaactgagattgcatcatattttctggcagccccatcctattgtagtcccatcttcagatcagtattttgcccacataagctttttttgaaccaaaatatataatttgatatacttattacatttcatttggttattgctcattttcagtgccattgaagtcaataaacaccaaaagacaacttttattctttttttcctttttttttttttttagacagtgtcagtatctgttatccaggctggagtgcagtggcatgatgatagctcactgcagcctcaaactcctggacttaagtgatcctctcaccttagccgcctgaatagctgggactatgggcgcatgccaacatgcctggctaattattttatgttttgtagatacgaagtctcactttgttgcccaggctggtcttgaactcccgggctggctcaagtggtcctcctgcctcgacctcccaaagtgttgggattacaggcatgagccaccatgcttggcaaggcatactgtatttagaacagaaggattgtttaaaaaataataataaattttttatatatatatatatatatataaaatctcctaacaactcatttagatatatatatatagatttggatgtattaagaattgttactcctttacagaatcaacagatactgtctatatttgataggaaggtataagtatgctgtctaaagcaatgtcttttacgattcaattagataccatattcatgacacccatgtatctgtattagcatttttttaaaaaatatttttcttcctttttcctttcatttaaacatcaaaaaaaaaaatagagacagggtcttgctatgttgctcaggctggtctccaactcctggcctcaagtgatcctcctgtcttagcctcccgagtagctgggattacagaggcatgagccactgagcccagtgatttaatatttttctttaatttgactcactttttccctcactctggtaggtagacacattattatttttttattttttagacagagtctcgccccgttgcccaggctggagtgcaatggtgcgatctctgctcactgcaacctccgtctcctgggttcaaacgattctcctgcctctgtctgccaagtagctgggattacaggtgcccgccactatgcccagctattttttgtatttttagtagagatggggtttcactatgttggccaggctggtctcgaactcctgacctcaggtgatctgcctgcctcagcctcccaaagtgctgggattacaggcgtgagccgctgagcccagcctatatttttttctattacgcatcaaaacacttatacatgtaagtttaaaaatagtgtttatccacgtaccacgggtagttgtgtaccacactctgatatgcgctaatttagagatgtagaaataacaccaaaagaataaacagagattgtctctgggcatgggactaagggatggggagacttggttttcatcaaaagcacctccgtgtatatgtattgctttactaaacatgaaacatttaaattatacgtaaaacaaaaattctgtcacactgagtcacttatactctacctggcaaaatggtaggcacaaaataactactcagaaatatgtctatatttcacacctcctccctaatgattttataatttcagccatatactcatgctgctcaaaactgtcgttcatgcacacaattccattcacaaagtttgaggaaaaaaaagacagctatccactgcaaaatgaaaactttcagtgttttatttttgactgcagctgtttacagaaatatagttgcgagtatacaaatgttccaatagaagcaaaatatctttttaatatttaacaagttatcacagatagctaaaaacatagatgcaaatgaaattcccccagagaacaaactgaaaatatctggtatcagtgctctgaaatcccaactatgaaagccatatacacaaaaatgtaacccttatatcattgcaggacaatggaagaaggcagttcagtggttgatcagtgtgctcaagcaaataaaattaaataaaaattaaaaatggcagaatggtagctaaaccacttgagaacaggttaatgaaattattggtactatacttaaaacattaagtaaaagaagtgaatgaaactcatttaaagttgtcaaaaaattagcaactacttggagcttatcaattaaaaggaaacaaggtaagcagacacattcattagatcaaaagaaattagatcaagttcactggaatcagtctgtaactactcaagtcacaatgacttcagtgcaggagttttttactggacacagaagtctgattccaagcccactcttcaacagctgagattttgtgtgcgtgtatgtatgtgtgtgtgtgtagacgttgtcctgaggttcatcagctaaaataatataataagcaatccctacaaaatatttcaaaccaggcaaatgacttctggaagagagagaaaggaaggggagagggagggagaatatgagtaagcaagcagggtcatatggttaaacatggaattttttaaaggagttattacaagtgggagtcaaatagaactgtggtagaatgctttgggtacaggaatatgttatgcaataaagtgaggaagagaaaaagggaataagaagggaggaatgtaactagagcagctcccaacagtttgcctatgtatttgccagcaccaaaatttgtagagtaagccacttacatttccactgctagtattaaggaaagacagcagtggtgatttttataaagtgagtatacatttatttttattctgatatgtgaatttttctttcacsagttaattaactggtaatttgtaaacagtgggaagaagattagaacaattatggaggtactgaattacacaaggagattaaaatgaaatgaatcaatctacctatcttgtggttagtttatatttaccatgatgcatacacttgagaaacgagaaatgcccaaattgtataatgcattatcttgtttattatttattttagtaaataattcttgtctgaaacataagctccaaggatagctatatctatactgatag

SEQ ID NO: 95406 - DNA, 55129 bp, Homo sapiens
gtgggatttatctcaggaatgcaaagattgttaagttttttttttttttttttttttttgagatgaagtcttgctctgtcgcccagtctggagcacagtggtgcaatctcggctcactgcaacctccgcctctcgggttcaagcgattctcatgcctcagcctcccaagtagctgggactacaggtgcgtgccaccatgcctggctaattttttgtatttttagtagagacggggtttcaccgtgttagtcaggatggtctcaatctcctgacctcatgatctgcccgcctcggcctcccaaagtgctgggattacaggtatgagccaccacgcccggccagatggttaagtttttgaaaaccattcagtgtaattcaccatattaacggaataaaggaggaaaataatatgatcattctgatagatgtataaaacatattcaacaggccaggcacagtggcttatgcctgtaatcctagcactttgggaggctgaggtgggtgtatcacatgagctcaggagtttgagaccagcctgggcgacacggcaaaaccctgtctctacaaaaaatacaaaaattagccgggtgtgatggtgggagcctgtggtctcagctacttgggaggttgaggtggaaggattgcttgcaagcccgggaggttgagactgcagtgagctgtgatcgtgccactgcacttcagcctgggccacagagcaaaaccctgtctcaacaacaacaacaacaaccaaaaaaaaaaaaaaaaaaaaagaaaagaaaagaaaagaaaaaatattcaacaggattcaacaccctttcttaataaaaacaaaataaaaataaaacaaactcaggaaactagatcctcaagatcctcaagctgataaaagacatctactgaaaaattatattaaattgtgaaagactgaatgctttcctcctaagattaggaacaagacagggatgctaacttcaccatttctattcaacactgtactgaaagtcctagccagtgcaacaaggcaaggaaaaaagaggcatacagattgggaagaaaggtggaagcaaagctgtctctattagcagacgacatatttattacatagataattctaagaaatccataaaataattacaggaactataagtgaatttggcaaggtataagatagtaagtcaatgtacaaaatcaattatatttatctagactggcagcaaacaattggaaaatgaaataatttcatttataggggcattaaaaaacgaaacatttagaaataaatttaataaaagatgctaaagatgtctacattgaaaactacaaattaaactgaagtaaatggttcatgaaatgtaaggtttttaaggtgtcttttttctgtaaattcatctataagcacttttgtaaaattaagaagctgatttttttttttttcttctagaaacagggtctcactctgccacccgggctgcagtgcagtggcacaatcatagctcactgtagcctccaactcctgggttcaagcaatcctcctgcctcagcctcccaggcagctgagactataggtgcccaccaccatgcccagctaatttttacatttttttaaagagatgaggtcttgcaggccaggcacagtggctcacgcttgtaatctcagcattttggaaggccgaggtaggcggatctcctgaggtcaggagtccaagaccagcctggccaacatggtgaaaccctgtctctactaaaaatacaaagaaattagctgggcatggtcgtgggcacctgtaatcccagctactcaggaggctgagtcaggagaattgcttgaacccgggaggcggaggttgtactgagcctagatcatgccactgcactccagcctgggtgacagagtgagactcgtctcaaaaaaaaagagatgaggtcttgctatgttgtcgaggttggtcttgaactcctgagctcaagcaatccttgtgcctcagcctccaaagtgctgggattacaggaatgagccacagtgcccagcaaaaaataataactttttttgtaataattttagatttacagaaaagttgcaaaaataatacaatgagtttctgtatactcactcaattttccataaagatagcattttacattaccataatatgtttgtcaaaagtaagaaatcaacactggcaccttactgttttatttggatttcactaattcttccctagtgccctttttctgttctaggatccagtccaggatactatactgcgtttaattgtcatgtctccttagtttacttgagtctgtgacaatttctcaatctttcctttttttttttttttttttttatgagcttgtcagttttgaggagtactggtcaggcattatgtagaatgtccctcagtttgggtttacctgatgtttttcccatgcttggactatggttatggattttgtggaagaatgccacagtggcaacatgcccttttcatcacatcacaccgggggtacatgctgtcaacatgatttattatggagatgttttaatttgatcacttggtcaacaagctgattttaaattgtgtgtggggccgggcatggtggctcatgcctgtaatcccagcactttgggaggccgaggtgggcggatcacctgaggtccggagtttgagaccagcctggccaacatggtgaaaccccctctctactaaaaatatgaaaattagccaagtgtggtggtgggggcctgtaatcccagctactctgaacccgggaggtgtaggttgcagtgagctgagattgtgccattgcactccatccagtctgggtgatgagagtgaaaaaaaaaatgtatgtggaaatacaaaggatctagaatagcaaaaataattttcaaaagttaagagcaaagctataagacttatattacctgatttagtgccttacaataatcaagactgtggaattggcacaaggataaacaaataagtcatcggaacagagtagaaatttcagaaagagaaccacacttatatgatcaatcaattttcgacagatacaggaaaacaattcaagggggaattgtgttttcatcaaatggtgcaggaacaagtgggtatccacatggaaaaaaagaggctaagaaacctgcccaaggtcaccaagtttgtgagtggcagggacaggtattccaagccagactttctggctaacatgtgctatcaattgtaaatataaatttataaccaaaacatttaggtcacaataatttttcagtgtaaaattcaatttgaggctatactatttaaaaatgtcaatgtcatgaaagcaaaagcaaagttaaggaaatgttctagattaaaggggactcaagagacttagctaagtgcaatacatgatcctgaactggatcctgggtcatacaggcacactaaaatttcacaaaggacatgaatgcaataatggaaaataatatggagagtatgttagataataattttgtgtgaatgttaaattctctgaatttgaaattcatactgcagttacgtgacaatatgttcttatttttagaagatacatgtagaattatttggctgtaaagggtggtgatatctgaaatagttcagcattattaacaacaatgatcaaaataatatggaaaaaatcaaatattgaaaaatattaacagttggtaaacctaagctaaaagtatatggtcattcattgtattattcttgtaacttacttatttgaaattctaaaaacattttcaaatataatgttacaggtatatatcacttaagtgctagaatttgtaatttttttattttttatttttatttatttatttttatttttttgaaacagggtttcgctctgtcatccaggctggagcacagtggtgcgatcatacatcactgcagcctcgacttcccaggctcaagccatccccagatctcagcctctcaaatatctgggattacagttgtgtgccaccatgcgtagataatttttgtattttttgaagagacaagagcctcactatgttgcccagcctggtcttgaactcctgggctcaagtgatctgtccacctcggcctcccaaagtgctggaattacggggcttgagccaccacattcagcctgtaaatgtttttatttctttcagagattttgtttcttatgttatctctctactcccaatgcctatcataagacttgtaacagtaaatagtaaatgtctggaataaatgtaaatatttgaatctagagtttgtggaggatcctaagaatcttgtgagattgctctcatagtgtcagtctaactagggaggtaaaatacgtaaagttaaaatttacagacgtagcaggcttcccaaaatagtaatatgctttcttaggtactacaaagggatggaagcactggagctcaaaacggtaggagaagtttgaaaatagaagaaactgaagaggaacttgaaaagccggtaggcattgaaaggaagaggagtccttgggacagcaattgagggtagaatgtggagtatcccatgtttctaccaccattcagaatccgattttcaaatgaattctgtgatgatcaggatcaatctgcactattttagtctctaagtgatctaaaattaacttggtggacctgggatgaccacggatgtggttttaaaccagcaggtttcagagtcggggcgggtgcaacaggcttataaagggaatggtggaaaatattatacgttagtgaaagaggttgcgaatggattgtggagagccctgaatggtagactgcgagagtgacaggatgaaaacgacgacatcataggaagagcaatctgtcagttgtaatggcagttaaaaagtggcgcacaacactgtaccttaaccaaacttggaattccaaagtgctgggacctctagcggagagcagttgagttcaattctattttagatcacgtagagactaaaatagtgccgattgatcctgatcatcacagaattcgtttgaaaatcggattctgaatgatggtagaaacataggatactccacattctacccccaattgctgtccgggacagcaattgcctttctaatcgactgccatgtttagcgattactatgcgccaagcgctttacaggcactctcattaaaataggcaaaccgggccaggcgcggtggctcacgcctgtaatcccagcactttgggaggcctacgcaggcggatcacctgaggtcaggagttcgagaccagcctggccaacatggtgaaacctactctctactaaaaatacaaaaattagccgggcgtggtggcgcatgcctgtagttccagctagtcgagaggctgaggtaggagaatcgcttgaacctgggaggcggagtttgcagtaagccgagatcgtgccactgcactctggcctaggagacagagcgagaacttgtctcaaaaaaaaaaaaaaaaaaaaaaaaaaaggcaaacccctctgtaagagagtgctttatcaagcccattttactgatggggaaattgaggagagacgggattggccagatcacgacctggaggcagcaaagatgtaaaatcagggttgggatacaggctgcgccggtagtgtaggggataggaactttctgagactcaggagaaagccacagcgatgggaagggaagcagaacactggagaccctaaaggcccacaggctgagagaagtggtacctctcctgargtgacacctgtcagcacgcctcttttgggcgccagtccaaaaatcgcggtatctgattggcgaggttggagggggctgaacgaccctaattggttagttggacctcgaaccagactttcacctggaggatcgggcgaggagtgggcgggatttcgaactgagccactcccttcattggtgaaaagaaaacgaaccaggaactattcggaagtgtgattggctgttgctaggaaccgtctcaaggccttatgggccctggttacggaagccgaggaaggctgagcgcgggctctcaaggaaagtagtcgcggaatctcagttagcggtggagaggcagtatgtccggttcaatggcgactgcggaagctagcggcagcgatgggaaagggcaggaagtcgagacctcagtcacctattaccggttggaggaggtggcaaagcgcaactccttgaaggaactgtggcttgtgatccatgggcgagtctacgatgtcacccgcttcctcaacgaggtggggcctgggaggtggraggcctctgaagctgctggggcgaggggtgaaaaggctgtgtggagtgtatgtgggaaggaagggaggcttggctgggggcgataaggcgtaagaaagggatcacgaccctcagagggaaactggggtgggattgggggagggctttagtttgcatgcatttccagtcagctccgagttctggtgccttatgtaatatcatgtattacttatgtgtcgagcayttgctgtgtgctcagctaaactctaagccatcattatctttattttacagaaagggaaactgaggctcacaggttgaggactctcagggccatagagttagcagcttagatccgttgaacctaggtctgaagtgcacccacatctgtgcttttccagtgtgccttctgaagtaataccggttttggttttcgtcttctagagtagaagctgagatttctctccacacgcttccccatcttgattatgcctccactgttttttttttccccctaatctgagttgaccttgaggccagaaactcataaatcaaccctttttttttgtttttgactcatgttttgtcatttttcttaaatattcaagactgttttatttaatcttcaagtctgttgcattacatctcattttaaaaattatttttgagaccatggtgcaactaattttttttttaaggaaacaggatagacttctaaawatttaaaactttattgaggtgtaatgtacatacgtaaattgtgcctatctaaaatgtacattttgatgagttttgaaaaatgtattcatccatgttaagacataaaccatttcyatcattctaaaaagcttcctttccctttgcagtcattctctcccaaccccaggcaactagtgatatgcagccgctaaagattggtttgaagctttgattttcggtgtgtgtatgtttgaagctttgattttcggtttgtgtgtgatcattttattttgagcaatagattaatgacttgtgaaagttcacttctatttctctgaagcaaatatactagtgaaatattttttcgattaatttggggcctaaaagagaaatctctgcatcctgacttttaattctaaaaacttttaaaatttaaaagtttcccccaaagaacattatttttaataaatcttaatagtgaacaataatttaacaaactcagaatttactaacttcttgcatttgtatggkgtatggcattttatgcttttaaaagtgctttccggtcgggcgcggtggctcacgcctgtaatcccagcactttgagaggccgagacgggcggatcacgacgtcaggagatcgagaccgtcctggctaacacggcgaaaccccatctctactaaaaatacaaaaaattagccaggcgtgatggtgggcgcctgtagtcccagctgctcgtgaggctgaggcaggagaatggcgtgaacccgggaggtggcacttgcagtgagcctagattgcgccactgcagtccagcctgggggacccagcgagattccatctcaaaaaaaaaaaaaaaagtactttcccggccaggtgtggtggctcacgcctgtaatcccagcactttgggaggctgaggcgggcggatcacgagatcaagagttccagaccagcctgaccaacatggtgaaaccccgactctactaaaaatacaaaaattagctgggcctggtggtgggcgcctgtaatcccagctactcaggaggctgaggcaggagaatcacttgaacccgggaggcggagattgcagtgagccatgattgcaccactgcactccagcctgggcgacagagcgagactccaaaaaaaaaaaaaaaaaaagctagtggagggtgacttggatagtagtgattttttttttttaacagaggtacaagtaacaggttcagaaagatcctggtcatacaatcaattagtagcagatttgacagatcccttgatttctcttgtctgcatagcattacttcaaaattctagccttagctatgacttctggtatttgcttcatagtaagtttcatgctaaagcatggttcataatgggtagaaaatcaagttttttggctgggcgcagtgactcatgcctgcaatcccagcacttttggaggcacaggcgggcagatcacctgagttcaggagttcgagaccagtctggccaacacggcgaaacctygtctctactaaaaatacaaaaataagccaggcttggtggcacctgtgatctcagctacttgggaggctaaggtaggagaatcgcttaaacctgggaggtggaggctgcagtgaggtgagatggtgctgctgcactccagcctgggtgacagagtgagactccatctcaaaaaaagaaaaaaaaaatcatgtttttcatttgtggttttatttccctccattttttttcttgattgattcagaatagatggtgagcttggagggaacactcagcccttacagagagcattaattcagtctcaagtaatagttgctaacctgtttctttctttttttttttcctctgtgaagattccagaagtaactaacctgtttcaaccacatgctgatatagccrgagacatcactaatgtgccaaggtttctcttggagcttgagctgcagctctttacctgcagttttgttttttttgttttgttttttgagacaaggtcttactttcacccaggctggagtgcagctcactgcagcctcagtctcctggggtcaagtgatccttctatttcaacctcccgaatagctgggaaaaggtgtgcaccacgacgcctggctaatttttaaaattttttgtagaattggggtcccactggctgggtgtgggctcatacctgtaatcccagcactttgcgaggcgaaggtgggcagatcatgaggtaaggagttccagaccagcctgaccaaaatggtgaaacctcgtctctactaaaaatacaaaaaaattagctgggcgtggtggcacacacccgtaatcccagctactcaggaggctgaggcaggagaatcgcttgaacccrggaggtggaggttgcagtgagccaagatggtgccgttgcactccagcctgggcgacagtcagactctgtctcaaaaaaaaaaaaaaaaagaattggggtcccactattgcccagtgtggtctggaactcctgggctcaagggatcctcctgcctgggcctcccaaagtgctgagattacaggtgtgagccactgtgctcagcctaattagctattcttatttattctgttttcttgttcattccaagcctattcattcattcacttattcaaatatttattaagcctttactatgttctagacactgttctaggtgctggggatttagtagtgaataaacagctatgccctcatggagattacatggcacaggaggcagacgataagcagagtaaataactaaaatatatactacattaggtagtggtaagtgctaagaagaaaaataatacagggggctggacacggtggcttaggcctgtaatcccagcactttgggaggccgaggcggatggatcatgaggtcgggattgagaccatcctggccaacatggtgaaaccccatctctactaaaaatacaaaaattagctgggcatggtggcatgtgcctgtactctcatctacttgggaggctgaggcaggagaatcacttgaacccagaagttggaggttgcagcgatccaagattgtggcactgaactccagtctggtgatagagtgagactccgtcacaaatgaaaaaaaaaagaaaaataatacagggaagaggactgtggaatatttatgtggtgtgaggaggagggtttgaaattttagcgatggtgccgagataactttatgaagatgactaagtaaaggccaggagcaaagtaaaggagctagccatgagggtatctgtaggaagagcatagagcattcctggcagaggaaacaagttcaaaggccttgagatgggaggatgtctggtatgtttgaggaacagtcagggaggccacagtggttgaatagttgcacatgagatcagaatgatcaggggaggacaaatcatgtacaacttcacaggttttaggaaggactttggcttttattctgagatgggaaatcattggagcagaagagtgacatgatgtgacttaatggcgtaataggatcgttctgactacattgttgtgawagactgaaggaagagtgtgtctggagttggttccttccggtgggtttttggtctctctgacttgaagaatgaagccatagaccttcgcggtgagtgttatagctcttaaaggtggcacagacccaaagagtgagtagcagcaagatttattgtgaagagtgaaagaacaaagtttccacagtgtggaaagggaccagagcaggttgatgctgctggctggggtggccagcttttattcccttatttgtccccgcccacatcctgctgattggtccattttacagagtgccgattggtccatttttacagagtgctgattggtgcatttacaatcctttagctagacacagagtgctgattggtgcatttttacagcataytgattggtgcatttacaatcctctagctagacacaaaagtttgccaagtccccactccacccaggaagtccagctggctttgccttcttaagaggacaagggcagaattgaggagaccagttaggaggctgttttagtaattaggcaagagatagtgggttgtaccagaacaagtgtcagattttggatgtgttgtgatggaagagccaataggatttaatgatgcgccagatttggggaatgaaagaaaaatgagtcaaggataacaccaaagtttttggcttatgagtcttcaagagttgggttgctattagatgagagagggaagatttacattggtattcatccttctctttccaatctgatgtcactttggggcccctcctttagcaagaggttcctaatcttaagtgtcctgtgtctgtagcttaccatttttttgattaatgactggttagagtatgatactggagtttgaatgtggtagtttagaattagtaatataattgaattgtctttccctggcagattaattttgcattgtttgaatcagtgcattcatgagttgttgaaatcatgaatgaaagtagtacatgtcattatctttccaccatttagtagtttagaaaaatcacataaaaatgattgtaatatcttatgacattgatagaaaatatcaaagtgcatctctcttatcaagggtaaaattttgtgaaactttgttcagttatatataatgtmtttttttttcttttttttggagacagtctggctctgttgtccaggcttgagtgcagtggtgccatcttggctcactgcagcctctgcctcctgggctcaaacaatcctccgcctcagcctcccaggtagctgggactacaggtatgtactaccacaccctgctaatttttttggtattttttttgtagagatggggtttcatcatgttgcccaggctggcctcaaactccgggctcaagtgatccttccgccttggcctcccaaaatgttgggattacaggcatgagccactgtgcctggcctataatatctcatgtatatggtgtttattggattgcagtgtaaaattatttycttactgggtattacaagtgaaaatttggaagccattgacttgtgtataaatagtcatttgtcaaaagagtaacttgaaataacattgtgatattttaaaacttttttttttttttttgagacagagtttcactcttgtcgcccaggctgcagtgcaatggcatggtctcagctcactgcaacctctgcctcccaggttcaagtgattctcctgcttcagcctcctgagtagctgggattacaggtgaatgccaccatgcccggctaatttttctattttagtagagatggggttttgccatgttggccaggctgggcttgaactcctgacctccggtgattcacccgcctcggcctcccaaagtgctgggattacaggtgtgagccaccatgcccagccctattttaaagctttatatgtgtatttatttatttatttattttgagatggagtcttgttttgtcgcccaggctggagtgcagtagcattaccttggctcactgcaacctctgcctcctgggttcaagcgattttcctgcctcagcctctggagtagctggcactacaggtccctcccaccacacctggctagtttttatgagatggggtttcaccatgttaggtaggctggtctcgaactcctgacctcaagtgatctgcccaccttggcctcccaaagtgctgggattacaggtgtgagccacggcaccggcctatatgtgtttttagaaactgtcaccataaatgagaatattactttaggaaccatctcataaatgggataacattttattaacccaacaaatatttgttaagttctatatagtagtaggccctggtggtgtataaaaataaacataaacatggaaccccagcctgggcgacagagtgagattctgtcttaaaaacaaaacaaagctgggtgcagtggctcacgcctgtaatcccagcactttgggaagccaaggtggacagatcacttgagctcaggagtttgagaccagcctaggcaacatggcaaaaccccatctctacaaaaaatacgaaaattagacgagcatggtggcatgagcctgtagtcccagctcctcaggaggcaggggtgggagaagggcttgaggccaggacatcgaggctgcagtgagccgagatagcactactgcactccagcctgggtgacagcgagaccctgtctccaaacaaacaaaacgaaaatatcccatgatactgccttcttgaagctaccattctagaggagtcaaaacaaaaacagacagatgaaataattttaaattatggcacttttatgaagaaaacaaatgagttgagaaagaaaaatcaggaaagatttaatttaataagagtgatctgggaaagcctctgtgagaagataacatttaattgagctgatggtcatgaacctgatttggaaagaatacagaaaagagcattccagcagcatttgaagtcaagcaagagtttggcacattagtgggactgaaagaagctgtgtctatagtgaatgaaggacaagaatggccagagagctaggcgggacccaggacatgcaaggtctggtaggtagtttggatttgatccaaaaggtaatagaaaaccactgacatgtttgaagatgagggatgacattgaagcaatttacagacagtccctgacttactagggcttgacttaaaattttttgactttaccatggtgtgaaagtgatatgtgagtactcatacaagcattctgtttttcactttcagtatggtattcaataaattacatgaaatagtcarcactttattgtaagataggcttcatgttagatgattttgcccaactgtaggctaacgtaaatgttctgaacacatttaagttagggtaggctaaactctttcaatcccaataatttgtttgaatactacatcttccgtgcatatacttatatgtgcaaacatgtatatacttatatatacaaatatgtacaaatatatacagaaatagagtcatagtattctattagttgatttgccctcgtagtcgtcatagtatttattgagtgcttattattctaagtgctttacatgtaatttctcttttaagcctcccaacaacctgttttagaggtgagaaaacaggagcagaggagtaactttcrcagagtcataaagttaggtggcacaggtgagatttgaaatcaagcactgtgaccctatagcctgtactccttttttttttgagacagagtctygttctatcacccaggctggagtgcaatggcgcgatctcagcccactgcaacttccacctcccgggttcaagcgattctccctgcctcarcctcctgagtagctgggattacaggcacctgccaccacatctggctaatttttgtagttttaatagagacggggttttgccgtgttggccgggctggtctcaaactactgacctcaggtgatccgcctgcctcagcctcccaaagtgctgggattacaggcctgagccaccatgcccggcctgtggcctgtactcttaaccgtaccctaggatctgcctcaatgtttttcatggctgcagagtatggaattaggtctgttttatagctttgttcacattttaaatataatttggaaggattgggaatgtggtatagggaagttagaacagatacccctttcctggaacctaggtaatttttttcattttttaagtaggtcaaacaggtatatagtaaaaagccaccttcccctctgcccagtttcactgcctcctamagttaactcccattgtttgtgtatccctctagtttctttttgcctgtacaagccaaagtgaatgtagtttctctttttttacacaaaagataacatactatgcacactcatctgtgtcttgcctttttcacttaactgtgtatctcagggatctttccatagcaataactggcatccctcctcctccttcaccacagctgcataggatttattatatggatcattatttaagcagtatcctattgataaacatttgggtttttcaatattttgctgtcacatttttttctctaaatcaacttaattgaaatcaaatgtagggacaataaaatgtacagattttgaatgtagagttcagtgagttttgacaaatgtctcatctgtataatcaccatcacaatcaatatacggtcatgggtcacttcacaatgagggtgcattctgagaactgcatcattagttgattttaccccttcacaaacatcatagagtatatttacacaaacctaggtagtatagcctgctacacaccttagctgtacggtatagtctcttgttcctaggctataaacctgtacaaacctgtaggcagttgtgacacagtaacaagtatttgtgcatctaaacatagaaaaggtgcaataaaaatatggtattataatcttatgggaccaccatcatatatatggtccattgttgaccatattatgtggcacataactgtagaacatttctaccagtgttgtccccatacacactcattttatttctaacactatagtacgtactcttctgtctagcttcttttgctcagtatatctgtgagattcatctattttttctgtgttatcagtgatttgtaacttatgatttcattgtgtgaacataccaaaatttgtttatccattcacttgttgattgacatttgggttgtctccagtttggggctgttatgaataaaactgctaggaactgtcatgtacaaatctttgtgtggacatatgattttattcctcctgggcaaatacctagtagtaaaattgctaggagtgagattactaggttatatgtctgtttaactttttaagcaactgccagagcattttccaaagtgtttatataattttatactcccaccacaatgtaggttttccagtttcttcacatcttcattgatacattgtatttgtcagttattttacttttaaccattctaatgggtgtgtggttggccaggtgctgtggctcacgcctgtaatcccagccctttgggaggctgaggtgggcagatcacgaggtcagcagatcgagaccagcctggccaacatagtgaaaccccatctcttctaaaaatacaaagttagccacgtgtggtggcaggtgcctgtagtcccagctacttgggaggctgaggcaggagaatcgcttgaacccgggaggtggaggttgcagtgagctgagatcgcgccactgcactccaacctgggtgacagagcaagacttcatctcaaaaaaaaaaaaaaaaaaaatcattgtaatgggtgtgtaatggtatataattgtggttttaacttgcattttcctgaygactaatgatgttgtatctttccatgggcttattggccatttatatatgcctttttatgaagtatctggtcttgccctttgtaaaattgggttgtttgttatttttgacttgaaagcatttttttctagtggctgggtattagctttggggtccaagtgtctggttgagctttctactttaccacttaatagttgtggaaccttgtggaaataagctctgtaaaggcccttttccctctgtaaaatggagataatagcacatacttcacagggtagttgtggttgtgacaagtaatttaaataatgcatatatagacttattatggcatactacctggcttaaagagctcaataagtgttagtgattatttttgtttttaatacaaaattgcatttaatacaaaattgcattgtttcctgcagcatcttttgagtaccaagtggcaagtgctttgaaggattgaaaggtaaattagatgacttggatttgcagggaagatctgtgcccaagtaattcttgtgtgaggtatagagtggccttgcctgagaatgcaggctctatttggtacaatcccagggtatttcttgaaagctttggcatttgactaataattcctactgtacttctccaaggctggtcaaaagaaagttgattgttgcctgtccagtggaattaacattataattaaatttaattaattaatttatttgtttttgagacggactctcactgtgtctcccaggctggagtgcagtggcgcsgtctcagctcattacaacctctgcctcccgggttcaagcaattcttctgcctcagcctcccgagtacctgggattacaggtacccgccaccacacctggctaattttttgtgtttttaatagagacagggtttcmccatgttggtcaggctggtctcaaactcctgacctcaggtgatcctcctggctcagcctcccaaatgctgggattacagaagcgagccactgtgcctggcctaacattataattttatagaaagaatgctctctgccaagagtggttccaagtggttagttctagggaaggtgagaaataagatgaggcagaatttaacctctatcactgcccaggtgaggtgacctgatcaaggaatctactttcatttatttattcattttgcccgggggcatggcatgcactcacatgtgtgttcgcgcttgtgagcagtgtgtgtgctcactcccagctcccattatgttccaggcaccatgctgtgttctaaaacagccatgaatgggacaggcgtggtctctgttccygatggagtttatctagtctgatggagaagaaagatattaaataaataattgcaattgtgatacataaatatcatgaaggtacatatggcattgtgagaatcagtgcagtgggaccccgtctggggggataaggatgtcaagttatgtttggatctgcagacctgaacttcagaccctgccaaggttacaccattcctggcagccagctggtttgcctctcttaggtgacagccttttcttatcaggctcattctaacccaaatgcaaatacctatagacctgcaccgtttcctcctgttcaccccccaggtctgttatctttctctgccctgcagactgttttttaggaagtagtttttgtcttctctaaaattttaacctccatgttttattttgatgaggtaatgtgtttggctagaggacccccttttcatcactaggcctaattttgcacttcctcaatcttaatgtttctrgatttcattttccawgtcaggtgatctctagtatatctccattgttatatttttattacatcactatggaatttccacctacagataatttrtgtaattttttttccaacaagatttttattctgtaactgccattcttcacattctcctctattctgcccatcagtcccctatttccatagaattagtaatctggaagtattattttccataaggaatttgtcctcttctttgttgaaacatagattttctgtctgctctccaaaaatacttagtaaagtaaatgaacttaaggaaaagtcagtagatttcccctactatcacatattctttggacagttgaactggataaaatttttcacaagaggacattacacaatttcctttgtagctgtaaagtatttcacttgattattattgcttgatttagacagaaatgaatagatcacaatcattgtttcatcttttttggcagtttataatttcggttgcagtatagtttatttgaaacatttcatttgtaatattgtgtaactgcgtacataatattaatattaagtagacaaagagtccattagtgttaaagtacaaaggctattcaggttggaagaatgtttttttgcaaattcacaagaggtttaaatacaaagcaaatcctagaaaaaaatgggaaatatctactgtcttactaggtttacttaataaaaagtagggaggaatttttgagtgtctagtagatttgaatagtacagacaactaatctagactactgagcataacccccccaatacacttctrtcttgttttgttaggattcagacaaaagcacatttttagtttatattaattatagatatataaacctaactttactctttcttttattgtggtgaaatatagataacaaaatttgccattttaaccatttttagttgtataattcagtggcgttaattacgtttacactgttatgcagtcatcaccaccatctatttccaaaactttttcgttaccactccaaacagaaactctaaccatcaagccataactccgtattcctctccccaaactcaagctaacctctcatctactttctgtctctattgaatttgcctgttctaggtaccccatataaatggaatcaaataatatttgtcattttgtatttggcttctttcacttagcataatgtgttttgttttatttttatttaccattttattaattgttaagcatayagttcaatggcattaagtacattcatgttgctgtgcaatcatcagtaccatctatctccagaatttttcattactccaaactgaaactctgtacttattaaataactccctatttccccctcttcccagcctctggtaatcacagttctattttttgtttttatcaatttgactactctagaatataaatggaatcaacaatatttgtccagttgtatctggcttattttacttagcataatgtcttcaaggttcattcatgttgtagtatgtatcagaatttsattcatttttaaggctgaataatattttatgtatataccacattttgtgtatctattcatctgtttataggcatgggttgtctaccatttggctgttgtggacaatgctgcagtgaacattggtgtacaagtatctgtgtgaatctgtttttaattcatttggacatatctaacagtggaattgttgggtcatatggaaattctatgtttggctttttgaggaacctccaaactgtttcccacagcagctgcactattttatattcccaccagcaatgtacaaagatcccatttttcgattttttttttttaattgtagccatcctagcaggtgtaaagtggtgtctcgttatggtttgattttcatttctttttttttggtgtggggagtccctttctgacagaattcatttcctgaatgactactgatattgcacatcttttcatcttcttattggtcatttgwgtatttactttgaagaaatgtctactagagttctttgcctttttgtaaatttgaatgtgagaaggagagagagcgagagagctctttgcccacttttaaattggagtgtctttattgttaggttacagttctttatatattctggatattaattcttgatcagatatatgatttgcaaatattttctcacatttggtagattgtctttttactcttgatgtcctttgatgctcaaaagtttttattctgatggagtccaatttatctgtttttttttgttgttgcccatgcttttggtatcatatctaagaatccattgtcaatctcaaggtcatgaacatttacccttatgttttctctaagagttttatgattttagcttttatatttaggttgttgatattttatattaggttgttgagttaatttttgtaatatggtgtggggtaggggttcaacctttcctttgcatgtggaaatccagtttcccagcatcatttgttgaaaagactgttctttcctccactgaatagacttggcatccttgtgaaaaatcaaatgggagctcgatcttggctcactgcaacctccgcctcctgggttcaagcsattcgactgcctcagcctcccgaatagctgggactacaggtgcccgccaycaggcccagctaattttggtatttttagtaaagatgatgtttcactatgttggccaggatggtctggaactcctgacctcatgatccgcccacgttggcctcccaaagtgctgggattacagttgtgagccaccacgcccggcctgtttctttttttaattgtattttacttaaaagtttatattatgataaaaacagcatgaaatctaccatcttttttttgagacagtctcactctgtcacctaggctggagtgcagtggcatgaactctgctcactgtaacctccacctcctaggttcaagtgattttcctgcctcagcctcctgagtagctggaattataggwgcgggccaccacacccagctaatttttgtattttcagtagagataaagtttcaccatgttggccaggctagggtcaaattcccaacctcaagtgatccacctgcctcagcctcccaaagtgctgggattacaggtgtgagccaaaatctaccatcttaaacatttgtttgttttaaagacagggtcttgctctgtcactcaggctcgagtgcagtggtgtgattgtagctcattgtagccttgaactcctgggctcaagcaatctttctgcctcagcctcccaagtagctgggactacagatgtgcaccaccacacctggccaatttttttagtttgtttttaatatagatcggggtcttgctgtgttgcccaggctggtctccaacccctggcctctagtgatcctcctgcctcagcttcccaaagtcctgggattataggcctcagccactgcacctggcccatcttaaacatttttaagtgtacaattcaattgttttraatattgaatattgaatattgttgtgaatcagatctctagaacttttacatcttacaaaaatgagactatactcattaaacaaattccctttttttccttccccagtgcctggcaatcacattctactttgtgtttctatgaatttactttacatactgcctatatttttgagatttagccataagatgtcactgtagtaagtgaacacacttgtataaccaccatctggttcttcctcatccccagaggtacccactgtattaccataacagcatagattcattttgcctgtgtttgaactttttataaatggaaatttcacagtatatattcttttgtgtctggtttcttcagttcaacatgttgcattctcatgtgttgtgtatgtggcagtggttcrttctttttcattgcagattaggattccattgtatgattatatctcattttgtacatactctgctgtagatgtttgggctgtttccagtttgggactgtaatgaataatgctgctatggccgtgtgtgttgcgtgtgtgtgtgtgtgtgtgtgtgtgtgtgtgtgtgtaaatacatatatctattacacatttctctttagtatatattaggggatctcatttgatttttttttttttaaagagatagtgtctcactatgttgtccaggatggtcatgaactcccaggctcaagcgatccttccaccttggcctcccaaactgctgggattacaggcctgcgccgccgtgcctggccttcatttgattttttaatggaaatttttattgagataattgtagattcatatgtagttgtaagaaatgatagagatcctttgtactcttctctcatttgtaacattttgcaagactttagtatggtatcacaaccaggatattgacattaatcagtccacagatattattctgatttcccagttttacttytctcttttttttttttttttttgagatggagtcttgctctgttgcccaggctggagtgcagtggcacaatctcagctcactgcaacctccgcctcccgcgttcaagtgattttcctgcctcagcctcctgagtagctgggacttacaggcacatgccaccacatccagctaattttttgtatttttagtacagacagggtttcaccatgttggccaggatggtctcggtctcctgacctcgtgatccgcccgcctcagcctcccaaagtgctgggattataggcgtgagccaccacgactgtccttacttctctttgatttatttcttaaagagaaagcgagatggtttaatttgtagtcaagagtcatttcttcttgattacagtgctcattatgcaaatttcatctacctgttgatacagaaatggtaccctgccacttccctggacatttattccagacagaaaaattcctgtgcaaccctcacctasatgtctgccagcagttgatctctctgccttcttaaaaagttatgtaaactcttatctagaatatctggggtttttarttcaactgactggacatatacagtatagaaactcattttttttcagtgggtttgataatattctcaactctagatcaagaacttcccattacttaacctgtctttgatgatcctgaaagttccctagatgggaaatagatctggcagtatgtcagggtcactaattttccctggatagtattaaaatatatagaaggtttgctacttytcctggccctggataatctgtctgaaaagagtttgtgtgaatgaagttttcacgtatttgctcttcatgtcatcctgtaggctcagaatgaacaatacagggagattcattttgcttatctatagtttctaaatttttggtaatgaaaattattacttttgtaaagaaagttataaaaatactaacaattaaatataaaaatgcagggtgcttggatctcaagaaaataggagcttactgtgattaaaagtcagactgcatataataattagttataattaataatgctttttctttctttgtttacatgaaatctttcagaaaataataatgctttttcaaagattgaatttttggtaaatgtttatattttggctagcttaagttttcccctttctctgcctctcatttctagagtcaccagaaggaaaatgtaaaacattttttaaatggctctttccctgtaaatcatccagcacacacactgcattttttctagtttcaggcataaagggaaacctggctcagataagaatgatccttgctgcatgctcagcggctcatatatctttctttttaaattattattttttactttttaatatttatgtatttttaatttttttagtgacagggtctccgttgcccaggctgcagtgcagtggcgccatgcctcgaattccttggcttctggatgatcctcctaattcagcttcctgagtagccaggactacaggccaccatgcctggataattttttaatttttaaaattttttttgtggagaacaaggtcttgcttggttgcccaggttggtcttgaattcctggcctcaagcaatcttcctgccttggcctcccaaagtgttgggawtacaggtgtgagccactgtgcctagctatcctttttttttttttttttttaaattctgagagtctctagctcaaacacaagttagcaggttaaggactactccaagttctggcagagctaatttttactacttggtcttcaaaaaatagaggctttttwaaaaattttttttgtgacagagcttcactgtattgcccaggctggagtgcagtggtgcgattgtggctcactgaaaacttcgcctcccgggttcaagtggttttcccgaatagttgggattacaggtgagcgccagcatacccagctaatttttgtacttttagtagagacagggtttcaccacgttggccaggctggtctcaaactcctggcctcaagtgatccgccctcttcagcctcccaaagtgttgggattacaggcgtgagccatggcacttggtcttgtaactcctttttgaacataacttcaaagtgaaggcctttgcccrtgagctctttgacatcatctggtgtccactggtgacccatcagctccagaactttctactttgtcttggaagctttgctggtttctgtgggcatggccatggctgctctggtcatctgctcctgcctcatttcttattggtcagttgccattatcttggcctagaatcacagtaaattctctgaagcccaaatacgttgaggaaataccaggatgcagagctcattcagggtggatctaatgtgagtagtttgataacttgctgcagcataggcttaaaaccagagggtcggccgggtgcagtggctcatgcctgtaatcccagcactttaggaggccgaggcgggtgaatcacctgaggtcaggagttcgagaccagcctggccaacgtggtgaaaccttgtctctactaaaaacacaaaaattagctgggcatggtggcaggcacctgtagtcccagctacctgggaggctgaggcaggagaatcgcttgaacttgggaggcagaggttgcagtgagccgagattgtgccactgcattccagcctgggcaacagagtgagactcygtctcaaaacaaacaaacaaacaaacaacaacaacaaaaaacagagggtcagtggaaataggaccttggttgcaacaatgcctgagtatgtcaatgttgatccattcacaagtaagaatcatagggatgacgtttgttatatttcctttcatcatgcctgagagcatagtgggaggaagtggtgatatttttatcctctgggttgttgatgtaatattctcatgtcaagaaaaagactttttgggaatgtaatttccattttcactgaaggctctgcttcaaattaggacttaactgtcagatacttgctcctgggtgagcttcttgtcgctctgtaccaggatgaacatgtagtggcagatcatatctgagaagaagcagatgataaacatgggcgggaccatccagtggctgaygctggagttggacagtagctcctaccctctgtcttcactgagagctggtctggcttctcctggggtgccggkgctctttgggttttcgtcgaggccttcgtatgctcctcagcctgggcattatcttggcctaagactggccaggaccctgctatagcctcgggcctagtgcagtgattccaactcctccagctgggctgccagtggcccatggcagccctgcatccatttgattttcgctaactctatctggagactatagagttctaaacagaaaccaaaagctccctgacgtctttttgcttgttctaagccatctctattaagaccatattttagagtgaaagttattaaaccrtagaattttgtttgatcactctgacccccacttgcttcagtgaaaaaaaaaaagaagcaggctacaaaacattatgtactacatgaattcactttgtgagaacacaaaaaacttttatttatcactgcctaccacacaaaatagtaagkattcaataaaaaattgtagactaatggctgaaatgattgaaagaatacacaggaaaaatgaagttttatgcaccaaattgttaactggacttatttctgttccaggactctagttgattattcttttttccaaatttaccacagcgaatatataacttttacttaatattttaaaaaagtgttgtgctttctcttgtttataagtggtgagagactgatgaaartgaaagtacttgtagaaagaactgtgtagcaagtmaaaaattcagtcattccctgaaatgttgtaatctatgaaggagttttattgtccttttactctgaaaggcaacacaatagttgggttgtgtcaaaaggaaaaaatatcatccatagtttaggtgtatagaacaaattgggacataattccagaactgatgacttagttccacaacaaagaacagtttcacatataatwacctgagagtttcagatataataacaagtgaatcgtggctgtcttactcttgctgtaaaatagcattcttaaatactgggatgtgagacccactcactgggtggagaccttttaggagataaaaatagaagttatccttatcctcagggagctcataggctggtgactatgactgggaagtaacacttacagtttttatacttcaattgaattaacatttatttaaaataggaatgataatttattcctgctgaaatggttgttataaaaagtaaaaagcattaatatttcaaaaatacaaattttgatatattaaataatataaattctaaatttgctaatttaagtaaatgttttttgagtatttaagtcaaggactgtgctaaatataattttacaaaatggttaattttctgagtaagtaatgctttatttggtaaaacagtttcagaggctgggcatggtggctcatacctttaatcccagcactttgggaggccgaggctggtggatcacctgagattgggagttcgagaccaacatggagaaaaaccccgtctctattaaaaatacaaaattagctgggcatggtggcgcatgcctgtaatcccagctacttgggaggctgaggcaggagaatcgcttgaacccgggtggcagaggttgcggtgagctgagattgtgccattgcacttcagcctgggcaacaagagcgaaactccatctcaaaaaaaaaaaattttttttcagaagagtatgtggtgaagtcttccttctaccctatctcccagccactaggttctttcaccattttcagagagattttatgcatgggtataaatatgcatatatatatcttcatttaaaaattgtagatggtattatattatgctcttctggagtgcaaagtgttttatatgcttatctcatttaatatgtacaatagttgtcaagacaggtactcttattaatatttccattttacaactaaggaactaaagacatctcaattttttaataacttgtgcagggtcacatagctgatagttatagaatctacttcctgaggcactactttatatagttaacttatttatttattcatttattttgagtcagagtctcactcttttgcccaggctggagtgcagtggygtgatcttggcacactgcaacctccccctcacaggtttaagtgattctcctgcctcagcctcctgagtagctgggactgcaggcacccaccaccaccatgcctggcactttttgtatttttagtacagacgggttcaccaagttggccaggctggtcttgaactcctgatctcaagtgatctgcccgccttggcctcccaaagtgctgggattacaggcatgagccaccgtgcctggcctagttaactttttaatttgaaacaayttcaaagttacagaaaagttgcaagaatagaataaagaattgcatataccctttgcctggagtccttagtcaggtttctgcagctatctcaataatattggcaaaaggaaccaacctaggatcacccattattcccagttgtcatgaatctctagcctccttcaatctggaacagtttcttcactctttctttgactttcatgactgtggtatctttagagatcacaggccagacctgtccagaaagattttgtagaatatttctaaatttgtggttgtcccaggtgtcctcactgtaatccccatatgatgcatttttgaccacagtatcacagaagttatgctgtgttcttcccattgcatcctgtcaggcaccacacaatgtcmatttgttccattatttctattaaagggagaaaggaagaagggggtatgggaaagtaacttgttggtttgcttttcagagaaccctcggttcagtaaatatcttttccttgtagcaccctggaggagaagaggttctgctggaacaagctggtgtagatgcaagtgaaagctttgaagatgtaggacactcttctgatgccagagaaatgctaaagcagtactacattggtgatatccatccggtaagaactatcagagatgggagcccttatgcagagaaaactacttaacagctgcagaacaggatgaagaaatgaattattggctgggcgtggtggctcacacctgtcatcccagtactttgggatgccaargcaggcggatcacttgaggtcaggagttcgagaccagcctggccaacatggtgaaaccccacctctactaaaaaatacaaaaattagctgggtgtggtggcgcacacttgtaattccagctcctcaggaggctgaggcacgagaactgcctgaacctgggaggcagaggttgaagtatgccaagattgcaccactgcactccagcctgggtgaaagagcgagactctgtctcaaaaaaaaaaaaaaaaaaattattaaaatggaaattcattcaatctagccatcaggctaaattttctccaaaattgtctagtcttactgtgctaggatatagcttcttctttgccaggtagcacatgtaatatctctaaaaagctaagggaactgattctggattatttttatgtgttgatttatttttgtaatgcagttaataacacctttacctaaaatagtggtttgcttgtttttgcaagctccttgctaaaggtagtaattatggactttaaaaactatccatatataccattctaacaagggactctgatatgctcagagtagaggtatctttctatggatcctcaaatctcccagggaattcactatcaccagaatatagtctcatgttccaaagttagaaacaagcatatagtgagaattcatttggctatgtcttaaaatattatttgttttcctttttttgacagagtgaccttaaacctgaaagtggtagcaaggtaagaagtcagcggtttgtcttgtgtttatatttgtgtttactcaagtaggactgctttttgaaacattttttcttaacaagagaagttacaaagtatttactttttccccaagcaaaaatcctatttttctggaatttggactcagtatcatctcaggaataaaagaatagctgagtcttgaacagtaggaaacattttgctaatgcytttatacgctttttttttttaactgaaactccaaagctatgccctgtgtggttttgaaagaaattagtttatgggttcagttgtggaaaaatatcttacttttacattatgtaggacaagtgataataattgtttctgtgttggaaaaaaataattgcaaagttgttttgtttcttataggttatcttctttatctgtaatacagaggcctttctgtacttattttccaaatttaattcttttttcctgtaggctcaaacaggcccacacccttcccggttacttagtaatacagcgaaaacaaaagactaagtatttgagtgtttgaaaactttaatgtgtactacattgcataccaggaagaaaatatggaaccattttctgcctcccacatgctaggtggttcatttcccttattccctaacaattttccttaatttctgtccttcagatagctggtacacagcactctaatttaaagggacagcagtttaggtgccacctagaacataggaaagtgatgctgcctcccttccattttcctcctccttgctgcttgcttcccattcctcattgagccgaaattactgaataggtttgacacagcaattaaagttggcctagacacaagaattctattaactcaagagattgcttgcttaacagtgtctgccatctgttgccctgcaatccagagtgtttgtgtaaattaactcttccatgttgctagactgctactctgaactattgaattgtttctgaaaggggaatgaaatggttcttaaaacactttgtaacaactgttggttgtttgtcctctcctcctaacacatgtactatccattcttgaatccttaaaaaaaaaaaattaaatagttcaaaacagtattctgtaaaaagtttcttcctgtctcaagctctcagtgtcttagttccccttccctggaggtaaccagccatcattttttgttgttgcttactcttaataacttgtgttattatggtaaaatttgaacgaagcgtggccttgatttgtatattgaacatgtccagaaaataccactttcagaggtcaacatctgattcaaaggatataggagccataacacatttctgcacagcaactatgagagcatcttttatattaaaacaatagaaaaaatatgtttgcaattacaatgtctagaagtctacagattgcttcttgttgctgtttttctttcttggtagtacagttaggaccattcttaggaatgtagaacaatgttccccaaattctgttcttgtatcacctcagttggaatcccttggtatgtacatgaatatatataggaaatgtttatttcttgggcttctactcctactgctttggaatctctggagatagggtttaggaatttgcaatttaagtaatctaggtgataagtaggtagctaagcccaaactttttgctgaatgatatgcccatcttttcatttgaaaacttaggaaaatttaattctcttctgtggtaagcattgtctgccttctataggccaaaggattagagatttctcagctgaattaaaactattgagccatccaggtgcagtggctcacgcctgtaatccctacactttgggaggctgagatgggaggatggcttgagcccagcacttggagaccagcctgggcaacatggtgagaccctgtctctattttttaaaaatcataaaattagctgagcattataatgtgtgcctgcagtcccaactactggggaggctgaggctggaggatagcttgagcccgggagtttgaggctgcagtgagccatggtaacaccattgcacttccatctgggtaacacagcatgaccccatctcaaaaaaaaaaaaaaaaaaaaacccaaaaaactattgagccttagatttttttgtaagaaagatagaaaaagaaagcatttaagctcaccaagttctataataatttagaagtctccaaatgtagtttagcccctatctgggttaaaaagtgactaaaggcagtgttttcaatcctgttttcctcatgtcactgtactcaagggacatgtcttcattaagtagagagtctggctattgtgtttctagtcactctgctctacttcaggcagatcaggcaagaaaggccttttggaacattttcaagaccacctacataggtttttatagagctatattccaacctgacttcagttccaggaagaaattcttgatctctcagatttatttcttacagaggtttaaataggsacttggtgtctaggatgtaggtatctctcttctccatactttatctggtttaaacattcaccattaagaaatggaaatggagttcatttcattgsttaccttcctttctcttggttcatggtttctgaatctttatgaagaagtgatttttaaaagtcaaattaaaaagtatcttcagcctatgggagagagttttcatttccattttccttcttctccttcttctactccctgtctgaactgcaccatccctactgcccsccaagaaagaaacactcaaaatgttgctattccaaagtgtaagtcagtaaccattccctaattcttttagaaaacacctttcatattacttttataacacaggtaaataattaatggtcaccattgttttattgttagatggatagtacctgagttgaaggcccagaattaatatactaaaaacgtaaagacttaaaaacttaaagatgtagcaacagatttttttttaacccgcttcaatcaaaaataactaactagaattaaaaaccatttgtctttgtgaatctcttccttgctggattaaccctcatgctgagagccgtcaatctcctacttatatttgacttaacatttttctggtttgtttttggttacggaaactcaccttagaaacagactcagtgctctctgtgccagtttgcctgcctgcttgcctgctctttagcaagtaacctataaatattcgtggtctatgaattctctctttgatgatgtatttacttcttggttagctgttttatcacttaatctgccatcagttcaagagataaagtgcatacaaatcgtaacctgactaaaaaagtgggcaccatttcattcatttcttcaacagatattatctagataatagttcaactgctttactagttaaatcttgtagtcaaataggtctagtaatttgacctgttccccattacattttttttgagtgagtattataaaatgtacatggtaaaaaaaaaatttaaatagttcaaaacagtatactataaaaaaagttggccgggggcggtgactcacgcctgtaatcccagcattttgggaggctgaggcgggcggatcacgaggtcaggagatagagcccatcctggctaacatggtgaaaccccgtctctactaaaaatacaaaaaattagccggccgtggcggcgggcaactgtagtcccagctactcggggcaggagaatggcgtgaacctaggaggtggagcttgcagtgagcagagatcgcgccactgcactccagcctgggcgacaaagcgagacgccgtctcaaaaaaaaaaaaaaaaaaaaattccctcgtatatccagctctgagacttttagttccccttccctggaggtaaccagccatcatttttttgttgttgtttactcttccaaagattccatgcattcataaggatggatggatggatagacagacaaaccaaccatcatttcctttaaaaaagtaaaaagctggccgggcgcggtggctcaagcctgtaatcccagcatttggggaggcccaaaatttgagtagtcccaggtactcgggaggctgaggcaggagaatggcgtgaacccgggaggtggagcttgcagtgagctgagatcgcgccactgcactccagcctgggcgacagagcgagactccgcctcaaaaaaaaaaaaaaaaaaaaggtaaaaagcctcatacatactattcttcaccttgcttctctttacttaaaaattttatttgttggctgcacactgtggctcacgactgtagtcccagcactttgggaggctgaggtggacggatcacacgaggccaggagttcgagaccagcccggccaacatggcgaaaccccgtttctactaaaaatacaaaaattagctgggaatggtggtgtcccagctacatgggaggatgaggcggtagaatggcttgaacctgggaggcacaggttgcagtgagccaagattgtgccagtgcactctagtctgggtgacagaacgagaccctgtctcaaaaaaaattttttttttattcatcattatttcttgtcagtttattaacatcttttgggctgggggcggtggctcacgcttgtaatccgagcactttgggaggcccagctgggtggatcacgaggtcaagaccatcttggccaacatggtaaaaccctgtctctgctaaaaatacaaaaattagctgggcgtggtggtgcacacctgtcgtcgcagctactcgggaggctgaggcaggagaatcgcttgaacccgggaggcggaggttgcaatgagccgagattgtgccaatgcactccagcctggtgagagagcgagactctgtctcaaaaaaaaaaaaaagatctttctcattttttaagtagatatttagtattccatagatgaaagtgttgatgtgatgacatttgctttcgaaggatttgatctgttttttaaaacaaataaaattgtctccatagaggcttaacgtgtttttttaacttcatttttaacttaagaagcttgacttatgaaatctagtaaattttacatgttagaagcagtctattaattgcatttaaagttacattttttctcccagatgctactgacttttattatacatacagttttctgttatataatgtattatgtaacatacagtttacttcttttatgagagaaactaaaaggaatatattgtttataattatgaaatatagttagttgattacatcaaattaaaaattttatttttaagaattatttaatatccctaccatacctactacctaatttattaaagtttggaatgggatgctgatgccctttagacaagcagtgattgctatttaccagagaattttgtctggttatttcctgatttcttgtgtgtttttttgttttgttttgtttttgggcgggggaacggagtgttgctctgtcacccaggttggagtgcagtggcgcgatctcggctctgcaacctccgcctcctgggttcaagccattctcctcctgcctcagccttctgagtagctgggattacaggcgcctaccaccacgcctggctaatttttgtatttttagtagagatggggtttcaccatgttggccaggctggtctcgaactcctgacctcaggtgatccacctgccttggcctctcaaagtgctggrattacaggcatgagccaccagctactgcacctggcttatttcccattttcatatacacttatattttgtaacataatcttttgaaagaaagcatagaatgtgatgacaaaattactcctgaaagacaaaataccctttgctgagggttctcaaggactaatgtcttctattggtaaagctctacttagaaatgatgtatagttttgcaaaacagggttcagaagggtaaggaaacattcttttcaaatcagccctccaatgttataacaaatttttcacttcttaagtcctgatagagatcatcctgtgaatgtgttaattttttttcttgagtgaggtgttayatattttatcacaatgagttcttaagagagtttatagcaatttgttttaggggctgtttttcatctttgaattttgccatatctacagggaaatttttttatataacggtttgactctaggattatatactttgcaaggcagtaattgttaaattatattcacatccagaaagaaatggttcttactgacttgaatattttagtacattggagcttcatgagaaggctgtcctcaagatccataccacatgactgtgtcatagttgggactgtaaaatgctgaaatcatataccttcaatactcaaaacattttaggtggtaaaatgaacctaatattaaaattcatatagtgttagctcatgctataaggtccatggtattaagggggagaaatcttttccagtttagaatttgaagccagaagttcccaacttgtttttcataagttactggccacagggataccaaagtgttccaaattcaaagctacacagtctctaccagaccacctaaatacccattacatttgccaaaggtgtcctgtggcttaaaatctactttttccaattttaaatacttagaatcctcttggaatagcaatgtaggaattaaaacataaagtctttatataccttatatttgccttttaagcttttgaaagcctaaatgtaagctgtataggctgaaggtataatgccctgttttttggggtttttgttttgttttgttttgtttttgagacagagtgtcactctgttgcccaggctggagtgcagtggcacgatcttggttsactgcaacctccgcctcttgggttcaagtgattctcctgcctcagcctctcaagtagctgggactacaggtgtgtgccaccacacccagctaatttttttgtagttttagtagagatggggtttcaccctgttagccaggatggtctcgagctcctgacctcatgatccgcctgtctcggcctccccaagtgctgggattataggcatgagccactgcacccggcttccctgtctgtcgtaatgcgtcataatcatgattctggttcattctttcctacatttatgtcctgatgacaaagtacactccattccttaagtgtgtgctcttctctcatgttttctcataaacaaagttcatcgtgaaatccacacccattgacccccacatcctttctatgtggttgccagttgagacatttctttgttgttctctttttttttttttttttttggkggggggacgaaatctcactcttgtcaccaggctggagtgcaacggtgtgatctcggctcactgcaacctctgcctcccgggttcaagcgattcttctgcctcagcctcctgagtagctgggattacaggcacacactgccatgcccagctaatttttgtatttttagtagagatggggtttcaccatgttggccaggatgatcttgatctcctgacctcgtgatccgcccaccttggcctctcatgtaatycatgcctgggattacaggcatgagccaccgcgactggcctttttgtcattctcttaatcttatcaaattgggtcagtgcttatggtgcgacaaggatctgggaaattactcctctatgtagctggtggaagagagaaaaatctacttacggtagtgcttcttcagtcttcctagacataagagaatggtgttttcttctctctaccctttagaagcctgctgctctaggtttcaccacaatgtccttggctcagaaaattgtgttgagataattgaatatgactttagaattcacattgatctgagcttttcgttttacaaacgaggaaactgatttataacattgggcttgaagatattagatataattttaattttgagcagctttataaatattctattcaggtattacaaaatatttcctttttccctaaaaagtccgtcttttgtgtttatatgtatataaatatatttatttatttttgagacagggtcttggtctgtcctccaggctggagtacagtggcacaatcctagctcactatagccttgaactcctgggctcaggtgatcctcctgcctcagccttcccagtgttgggattcaccagatgtgaaccaaggtgcccagccctacttatttattttagtggggaattaaagccttaatgaaccttgaacttgaggaaccagttttatttaaacagttaatttccatgagttttgagctaaagtcagagtagacttaacagcaatttgttttagaacctataataccaaaactcacagcaattttgttgtttgccagtgtattctaagcttttcgaagaaaaagaagcatgcatattaattgcttggtaggggttatgctggaagaactttggatttgattcaccacttgtaactaaaatcatagtattgcaattattactttccaggccaaagattgagagcattaaaatctgggcatggacataamcagctagatatgcctcaatacctgaagggataaattaaagtcaactataaactgtaagcttttcacttaagcatccattagctttagtctagtgcttagctgtggaaatgaagactggggggaactgtgcctaggggaagggtggaggtgaagggaggttatgtgttaatagaacttttttcatttcagtttaaaaacaagcgatttggtttatttccaaatttggctgagagtcctggctgctaagagctgtgccttcaacatctctttgattattatgtatttgattaaaagtggggtcactatggtttgcatctacttggctatcagtatcctaaagggagtgtatgcctctttctcttctctttcctttaatgggttagacaggttggtcttttttttgcgtccccagggatggattgatcttaaaacaggcacattttgcagtacttagttcaaagaacaccatatgttttaagttatttattgtttagaaatttttacatttcagcatagtacggttttggctgtctttgttctctttcttcttcagttgcttattacctttttctaaggctcaccctacttagcagagatccagggcttttgattgtaaaagaggctaaaagctttgaaatttagagaatccatttatatgaagtrtatgatttttactctaattatagattaaacatcataatacatatattatgctgtgatgctctcatataagcctttcaaattatcccttttaaaaatagtaactacattttttgtctataaatcattggtatttatgtagctaaagcataaaagaccatgaacattttcttgatggaattcaattatttctcggttactgtagtggaatatttattttaaaaggcagcattataaattaacttgatgcacatactaccatcgctaccactcctaccttccgaatctgtagatagtaacatttgttgtatttttcaaagattgacttgtaactcattttaattaatcggatccttactagactagttgaaatgtcccagataatgataatcattaaagtcttaaagaagtatagaagtatgttaatatggtttctttaaaacctttcgtttgccatttttcttgcctacagactaatttctttcaggtttggggcatgtattcatttgcatgacagtgttttggatatatgaaattaaaactcatttcatggactgctctaaagtatattggggccaatgtgattggtttctggaaattcttggagattattgaaaacggtggttaagcagagctaatattccatgttcataccctgatatacttctacattttgcaaagatggtattttgggcagcagcaacctatgctaaagggttattgtcctctggcagtaagttagcaggccttttgtactatacagctggttaatggaatcaataactcgtttgatacttgaattgagtaaaaaaattgtaataacagctttatcgtgatacaattcacataccatacagtttacctatttaaaatgtacaaatcaatggtttttagtgtatttacagaactgtgcagtctattttagaacaatttcctcactccaagaagaaaccccatattcattagcagtcgttttccatttccccacaactcgtcctcctcacaccagccctaggcaaccactactaatctacttctaactctattgattgtcctgttctgaacattttatgtaaacagatttatataatatgtagtcttttgtgtctgctttctttcacttaggataatgctgtgaagtttgtagcatatatcaatacttcagtactttttattgccaagatttgttttttaagattattttatcattttctttcccttgactccattttttctcttttcattgtgaaatcaattctaaggtctcctgtcataattattatgatttcaaggagtgaaccagtatatttttgtgatctacaagcaatcatctgtatgatctagagcatttcacagttgatctacatgttagaagagctttttggactttaaaaaatgtttttagaaagtgtgatgttagctattgccagtggcaagcccagctgaaccaggtacatcatcatgaccacagagtagtccatttcaatatagtttgtatcattaacattttttaacatctaaaaaagtttaggtcatttctatgctttcattagtgattcttcactaggaaggaacctagtgaagtgccagtatgttatcagaaataaaattcccagtctatccattgcttatatatttgtaaacaccaaaatgcatgaaagatgaagttctggtatcagttacagggttgacatagcttgatcaagaaaatgtacatgtgctatgttaatcttctttctttttgtttgttatttttgaatttttttttttttttatttcaggacccttcmaaaaatgatacrtgcaaaaggttagtatctccttaacagctttccatacgttcaaggtaatgtctggcaagagactcttccataagtatatgtatgtaacataacttatgagtgcagtttgacaactaattcttttttggcccaaatcattgcaaattcagttgttccttgacattagaaaaattaacttttacagtttcagccattttgaataatctaaaagtttcatgccttgagtcattttttaatcttattgtgacataaattggaatcacactcagtaagaggccaggatgcatggacaggtagctactattgggtcagcctttagtcccgaagttcaacccagctacatgattctacttaaaacttaatcgcatttacttctcacaaccactctgtaaggtaagtgctattattacatattgcaggagaaaaaaatactacggtcatatttaggaatttgggttttctcaggtttatttacaatatattccttggcattaatattagtaattcattagtattagctctgaaagttataaattgccttaccttaagtgcctctatctaaaatgactgtggaatccttggcttgtacagtatctttgtggagattatatagagctagccattctattttttggacatctcgaagtatttcagagaaagaaaatatgtctttttttcccataaagtatcagatcyattacttgaggtaacggacacagtataaaaaattacaaactattagtaaatttagtttccttaatattaagggcttaggatcagcgaaatgctgcataaaaattttgaaaatacaagccacaaaattgcagattttaaacaaaacttatgcttatgcagggccgggcgcggtggctcacgcttgtaatcccagcactttgggaggctgaggcgggtggatcatgaggtcaggagttcgagaccagcctggacaacatggcgaaaccccatctctgctaaaaatacaaaattagctgggcatggtggtgcgagctttgggaggccaaggcaggagaatcgcttgaaccttgggaggtggaggttgcagtgagccaagatcgctccattgcactccagcctgggcaacgagaacgaaactccatctcaaaaaaaaaaaccaaaccttatgcttatgctataaaacttagacttaagcaaagcataaaactgataaagaattattaggtagaagatataaagaattcctacaaatcagttttttaaaacctcagtagaatatgagaaaamgatttaagcactttacagaaaaggaaacacaaatgtaaacatatggaaatgaggtttaatctcattcatcattagtgatatgtgaattaaaatcataggtatatttcatacctaaccagattggtaaaaattaaaaattttgcaaataagagttggttggaaagtttatcaccgactcttaagcactcctagggtaatgtaaatgagtataatcactttggaaaacagtttggcattatctagtaaatttgataggatgacttaacttttgacccagcaattccatttctaatgatatacttgatagaaatgtgtgcccaggtacacccagaaatatatgcaagaatgttcatagcagtgttattcgagatattcaaacatcagagacaaccctaataaattgtggtatattcatacaatggaatactacaaaacaataaaaataaaggaatcacaaacatgtagtagtctagatggatctccaagaagaaaaatctgtcttatggtaggaagttattgttgaacctgaatctcctgtgatgcagtataaatgtatttcctctggttctctcctcagtggcagttaagtattaggaaagattatgtgaggattggtgtcaaccattctcagtcttttgtactaaagaaattttctggccggcgtggtggctcaygcctgtagtctcagcaaactgggaggccgaggtgggtggatcacgaggacgggctgagacagaagaatggcgtgaaccccagaggtggagcttgcagtgagccaagatcgcgccaccgcactccggcctgggtgacaatgagactccgtctcaaaaaaaaaaaaaagaaagaaagaaagaaattttctccttcaatgttttctcaaggatcctacttttggattcttyagtctcttgcggttactcttcaaggagtctgaattcattactcttatcaggagattacttcagagttcccatgtgcatattgctgttatacgtgccatattgcttggttttgtaaacaaagctacctggctgatattctaaactagtccagagtagctttctgctgtacgtaagcatacagagtgctaggcatgtttaggcaaagagaatcatttttcttatgaacttcagctcgttttattgacttcaaaaccttttaataccaagactcatatgtcttaagtagaggggcagccgggtcatttggatcatggaagaattataccttaaaactagtgtgctaataagttctattaaagaattattatgttaaggagaatgatgactgttctgaagctcctaaggaaggtctcttgcagtacttttgaagctgccatttgcttcaccctgttagaactgtatatgctttgtgtgtatgtgtatccttattagtgtccaaacttaactagggattaagaggatgggtttggaatcagactgtccagctgcctttctagctttgggatttggggtgcaaagcttatatttcccttgtatgagatgagaataataaccctatttcgtaggttatcctatttcataaggattaaatctttaaaatacatatgaagcagataggatatttctggtagttatattagatatgattacttccaaatttatattgggatggatatgtttttatacatatatgaaatgtcacatacataatggtgttttttcctgtttaaaaatgtttaattgtagaatacgtgaaaagcaaaagcacaatgaagaaaatgtgagagtatccataatccctaactcagaaataaccactatatgactttgtagaaacacatatagaggcatttaaagacatcttatttgatatcatactattggttgtttttaaccttttaaaaaattactttgtaatattgtcactccaattcaaatatttttccccaactactttgtgataaaagcagttaaatttcccaaagtaaataaaaactccttgcctatataaaaacatgtgaaagctgaaagatagtgaacatttggcttaaaatattaacaactttattgctttctccccctattcctagttgctgggcatattggattttacccatcataggcgctgttctcttaggtttcctgtaccgctactacacatcggaaagcaaatcctcctgaggaggccttgctgaagttagaaagtgcatccactttggggcgaaaactagagacttgcttgggggctgcagaagtgccctctcctcgaatcctgccagttgcattcttcccccytggagccaagacgattggccagacatcacctcagatctgagaccagcgtcttccatctctcagagccttactcccaaagtacctgctcactgttccgtgttgaacaattgccggtgtttcctctcttcactggtttccatgagtacccttatatttcacaactttctgttcataagttatagtgacattgctctttggtaaaaatgcctgctttccaatactttgattgcatattagacattcttaacagggcggcagtctagtgttgaaagttttatttttccatttttcttttaagtaaattttttttaaaaaattctgatttagggctaggtgtggtggctcaggcctgtaatcctggcactttgggaggccaaggtgggaagatcgcttgaggccaagagttcaagaccagcctgggcaacatagcgagacccctatctgtattaaaaaaaaatctgatttaattcttttatttatcataaggggtttaattcctgaagtaaaggtttgcacctattaaacttaaaactgccaaatgatttttgttcttttatgtgcgtgataaaaatacaaagaatggtgtggccacctcctccctttcaagctagggcagcaggtagctcttcccagcccctgagcccagccccttcccaagtggtgccggacaaaaaactacatggccctttcgtgtcttgggggtggaaaggtagggatgaattggggtgatagaaccctggtgaattcagagtaatctttctttagaaaactggtgttttctaaagaaacaggataggagtttagagaaggcaccaaagctttcactttggtttggcaccagtttctaaccatctgttttttctaccctagctatcttttattggtaaaatataaatgtataattatgtttgtagagctttaccaaggagtttccctccttttttgtttgttgattagcaaatttttgattctccattttccaaaagtaagagactccagcatggccttctgtttgccccgcagtaaagtaacttccatataaaatggtatttgaaagtgagagttcatgacaacagaccgttttccatttcatctgtattttatctccgtgactccaacttgtgggtttgttctgtttttccatgagaataaaatactggcggtttttttctcagatgtgtgttcattgagaagtaggttactagaattatgttactgtgtcttattggttcaatgatgatttctctggcatattagacttttattttttccyccatggaagcacttgaggaaataaatagtacmctggctgttttctgccagcaactgtggtgatttttctccctgtcctttgagaattgctagtctgcttctgagccattgtcatatccagcagggagcagcttggttcaagaaggaccatagaggctgctcagcatctcctccctccctcccagcttgccagggatttgatgagacaggaaactgcccagcaaaccagggactgcccatgtaaactatttaagaaaaagttcaacccaggtcttgtatcctgtgatttagcagttgaatgaatacagaattcatcaaaataatattaaccttgtacttgcacacttggatatatttgggagtaattttaggagatttctggctgacttttattatcagggatatgggtttagtaaagcttttatytttagaaaaatgtttgtatgcattataagatgctacttttaagacaatattgaaaaaaactttggttattatttaacaaaagtggtatgacttgatgcttctctatttaaaggcaaggaaggattggtatatgattgcctgtaataaataaattgcgtgattattggagtacattggggtaaaagtaaagaacagaggagtattgaggagcttgaaagggaacattcaaactaaagccaagcctgaagataacttgaatcagttgtaaaagtgtgttggcaatgtccgaaattgaatgaaaaacatctggcttataagaaatgttwaagaactaccatcttaagtaaaattggtgtttttgttatttttaaggtaaatgccaatgcaaaaggtwtgtttttctacttcacattggttttcttttcctgtttacatctgcwcttgttttttgctgagagccagaggaaaagataattagactttgtctcttccacccatgaaatcccccagtacccagggcttcttctgaactactgccgatgtgatgtcactttgtatctggaaaatcactttggggtccatttactgttattttgttgcctacaaaaacagccaggtgaaagctaaatcttgtgtgagagtttgcagaggtttttctatacaataaagtagtatagcacactagccaaatccatccaaaaggaccttttttttaggaagtagacttgaattcacaaaacagtcttgacatgggtagctggtgaaaaaccctctggagagcaagtggagccagtccccattggctgacagtgccacctggagctggtctctggggtgttcggttgtttattcctgaggaagactagctgctgctgctgctgctgctgcaaactgtactgtacacatcatggctgctggacacgaaggaggaggtgagagaagtttcatgctaccgaaatagagggtgttggtaccactgcccctggcctgagagccagggtttaaacctgcctcagtagagtctagtttgaaatgacaccaaaattcctcagcccctactcagcaattggttttggtttccaaatgacttctgcatttgtaaagataacagagtggtggggtcaaagtttatcttgtgtttagatctcttcaagactgcttaagcaaaaacaaaaatcccttggaacctatcgtttgagcctgtaaagttgttttagcagttgtcataaatgcatatgttgtgaaatcagaacactgtcgagtttatactcatttagctgcaatgtgggacaatgaaaaatgctttacaggcctggagtatcattacttatggtatctcctgctttaaaatctcaagcgatatctatctggttaaattccattttaggagattgagatgcagaacgttaatgttcattacctcctcctaccccaagagaaatggattcagacatgtcttgtctcaacaagaaattgatttttttttaaactatctyattctgttgccaaatatcacagaagtaatgaggagtttagttacatttggctgttgtgctctgaaagagccaggtttggaatttgtgggggtgatctaggaagaaggttccaaagaagcagaggcatttgtcaagttacctaccctatatccagcatcctcctcatgagcttcagtagctgctctttgcccacgcytgtatcctacgtttgctatttgggcaaaccattacttcagttatttaacttccctttttttttaacttcacctttgactatgaacaagtaacggtaacattccttttgtgtattcaataatgcagttagtttacctttttcagaatattttgaacaaagatctttgtctctttctgctggaatgcgcacacagtgaacgtttgttagaactacacacaataaagacactgttttccttttcttgccccgactacacttattatttttaatttaaaaaggtgttttttaagtagaagtgttggttttgtaatcctcaggtgttctggaagaaaaggatttcagaagcatgacagtctcccgtgtctgtgctaatggtgtgtttagcataacgtggtggggagttccgtggttctccaggattctcctcactgttcttttcgtgaagtgaatcgttcatttgataatcrtgaaatgcaaaaagcaaggctgtgttttaatggctgtgaagtgggaacggggtagccaggtttgaggttctgtttccactgaaaatacctactgacagagaagccagtaccaggtaatactgttttgttatctgcaatgccagtcttcaaatgattgtttttcttggaaatagctaaactgttggggaaaattaaacactgagattgaagtttagtgactgtgttaataaaacaagggaaataaaccgtttttataattacctttgaaacatactgatagccatctaacattactaacatatcagatttctgttgagagattgttcattagggctcggctatttcactgtcacaggaactgaggattactaacaggaaaggataaccccattcttgttaccaaagtttgaatttaatgtttaatctttgatactagtaagaatttattatcacagcactgtccctgatgctgaatagtgggtaggtgcttgacaaatcctggttgattcgtgaaagcctgaggtagaagactgtccaattatgtaaatttaagggaagaaatacccacacaatctgttaaactgctggtaattgatagcataaatctaacgttaattagtgaactagattactatgtattttcaaagcccagtcagcttaatcacatatataccagcattttaaaaacaaaattatttgatgaagcagtgagagactagagtggcttttcaggtgaaacatgaggatgcacttgcaatgctgtcatttctctgatgcctactatgtgccatgcaatgtgatttacaaaccttgctgatccttactcttacagtgtccttacaaggtagtccctgtctaccttgtaaggacatttttatggcaactcagacagccacctgacttgaccacagaggtaagaggagagccagagtttttgttttgttttgttttgagacagagtctcactctgtcccccaggctggagcacagcggcgtgatcttggttcactgcaacctccaccttctgggctcaagcagttgtctcactcaccctcccaagtagctaggactataggcatgcgccacctcaaccggctaatttttgtatttttttgtagagacaaggttatgccatgttggccaggctggtcttgaactccyggcctcaagtgatccacccgccttggcctcccaaagtgctgagattacaggcgtgagccaccgcctgagagccagggtttaaacctgcctcagtagagactagtttgaaatgacccttgagtcccatgcaaaagtttcctgaagccagttaatgagaatttagatctggactatgttgctggaaacaacttttcataagaggcaaaggattgagaattgaggacaactgatgaaatccttaagcagcacagatgagaagtccttgcataactccatcagtctaggatcctggataaaatttaacctggaactgtgtatgtaaatatatagtttttggcttttgtaaagagggttttgctctattgtccaggttggagagcagtggcatggtcatagctcactgtagcctcaaactcctctgctcaagtctcagcctcccaagtagctcggactacagctgtgtgccaccatgcccagcaacgtcaaattttttttttttttttgtagagtctatgttgcccagtctggtctcaaactcctggcctcaagccaatcctcctgcctcagcctcctgaagtgtgtgtttacaggcatgagccactgtgcctggccccaatttccttttttctttttttcccatttttcagaaattgaggtgggattgtcttcccaaacaatacaatgatgttcataataagaatcttctgacagacctactcactctgattttaataacctaagaaatctaatcagagacaaatagagatagaaccaggagaggctaagtcatgaacagcactggaaaatgagcttccgagactcccagtctgacccttttttctcttttgtaactttttttccctacctctcatcctacctcatcttgcccccttgctttgccttgtgttttattttataaaagacaccacctcagctatactcctcttttctttttcttttgttttagagctggggtcttgttacgttgcccaggctggactggaactcctgggctcaagccatcctccgacctcagcctccccagtagctgggactacaggcacgcaccactgcactggctacatcttcatttttgtgttgtggtacaaaaatgtacttgacactctgtcctaaaaacactgggaagaaataatttgtttataagctggaccatccagaaataatgcagttctgtttgaacatctctattcaccttcgtttaaagctacattctagctctgggcctttcatgtgagtcaaatttgccttttaagttacttcaaatagggcttctgaaacccacgtctcttgacaactatggtctctgcaacttatctgaccttaaaacacttgcctgggtaatgtccttataagagttcttcctttctggccgggcgcggtggcttacacctggaatcccagcactttgggaggccgaggtgggtggatcacttgaggtcaggagtttgataccagcctggccaacgtggtgaaaccctgcctctactaaaaatacaaaaattagctggacctggtagtgcatgcctgtaatcccagctacttgggaggctgaggcaggagaatctcttgaacctgggaggtggaggttgcagtgagctgagatcgcaccattgcattccggcctgggggacaagagtgaaactccatctcaaaaaaaaaaaaaaaaaaaaagagttcttcctttccaagtatacctgagttcccataagacagaaagtcattttgttgctgttaattttttgagtaagggtctcacagtgtcgcccaggctggagtgcagtggtatgatcacggatcactgcagcctccacctcccagggtcaagcaatcctcttacctcagtctcccgagttgctgggattacaagtgcatgccaccgtgcccagctaatttaaattttttttatttttattttttttagagaaaaggtcttgctatgttgcccaggctggtcttgaattcctaggcttaagtggtcctctggccttggccttggcctcccaaagtgctgggataacaggtgtgagctactgtgcccagaaactcattttttattccatgccaagtctcagtatctctggaaagaggaaacattcttcactttaaaacacctacagattattattgtcatagagtaggatacagaaacccacttaagctcacataggtaagagagaaatgacttgctgtgaatcagtaacgaatgagtatctggtggaacacaagggtagaaatcccagctggccctcctgaggaactaggaacaggaaccagaaacccataggaaccaaagtggttactttagtttcctgtctaaacttctgaaggaaattaataattagaagtgaaaatgtggttggctgagtaatatgagtgtctacttctggtcccatcaaggggatggggacccatcccccagccttgaatgggaaagggatcatagggaaagcagtttccccagggagatgctgtaattgcatactgcatgtatatttaaatgtcttcattaatgaactaaaagccctctgaaggaaggcacttctgcatttctcagggtgccctgcattaggctgggccacagggagggcgaagtggattcagtatggcttatcatgctgtgcctgcatgcacaactatagccatgctataatgaagatagtataggccaggcacagtggcccatgcctgtaatcctagcactttgggaggccaaggtgggcggctcacctgaggtcaggagtttgaaaccagcctggccaacatgggaaaaccccatctctactaaaagtacaaaaaaaaaaaaaattagctgggtgttgtgtcatgcacctgtaatgccagctactcgggaggctgaggcaagagaattgcttgagtctgggaggtggaggtttcagtgagctgagatcgtgccactgcattccagcctgggcgacagtgggactccgtctcaaaaaaaaaaaaaaaaagtagaggtcccataaccagtttcccctattattaacattacatgtttatatgcgacagttgttacaattaatgaaccaatattggtacgttattattgaagttcttatgctagtttcttagtttttgcctgttgtcttttttctttttttttggagacggagtctcagctcaatctcagcacactgcaacctccccctcctgggtttacgccattctcctgcctcagtctcccgagtagctaggactacaggcacccgccaccacgcccggctaattttttgtatttttagtagagatggggtttcaccatgctggccaggctggtcttgaactcctgacctcgtgatccacccgccttggcctcccaaagtgctgggattacaggcatgagccaccgcacccagctgaccttgacagttttaaggagtactggtcaggtacattgtaggatgccctctgttaaaatttgtcagatgtttttctcatgattagacagaggttatgaaatggggagaggaagaccacagggataaattgccattttcattacttcatctccagaggacacactgtcaacatgatctgtgatggttgatgctgaccttgatcacctggctgagggactgtttatcaggttcctccactctctagtcactcttcaggagggactttctatattgttccacactgtggcaggaagtcgctgcacagcccacacttaaggagtggggagttatgctccatctccctgagagcagaatgtctacatgaattatttagaatctttctggataggagattggtttcatagattttaaaatttctttttatttacatatttatttttagagacagggtctcaactaggttgcccaggcaagagtgcagtggctcttcacaggtacaatcaatcactgcacactgcagtctcaaatttctggccttgaagtgatcctccctcctcagcctcctgagtagctgggactacaggcacataccaccacaccacaccacgctcaggtttcacagaattttatagtggattgatatttagattttttttttttttttttgagatggagtctcactctgtcgctcaggctggagtacagtggcgtgatctcggctcactgcaacctccgcctcccgggttcaagygattatcctgcctcagccttccaagtagctgagattacaggcatgtgccatcacacctggctagtttttctatttttagtagagatgggatttcaccatgttggccaggctggtctcgatctcctgacctcgtgatccgcctgcctcagcctcccaaagtgctgggattacaggcgtgagccatcatgctcggccccaaaaggtgtttagtaacttgcctaaatgtggatagccaaaggccatcaaccatttttggaaagccttcccatgaaacttagagaccaaaacaaaataagaaaaagaaaaaaacaatgcagaataaaactgacagggaaaacaaaacaacaagctgataacaccaaagagatgagagatgacattgtctccatgaatacagtaggatgctattttagaaaaggaatattcagccagctcagcctgtaatcccagcactttgggaggccgaggcaggcaaatcacctgaggtcaggagtttgagaccagcctggcagacatggtgaaaccccatctctactgaaaatacaaaaattagctgggtgtggtggcaggtgcttgtaatcccagctactcaggaggctgaggcaggagaatcacttgaacctgggaggcagaggttgcagtgagctgagatcacgccattgcactccgacagagtgtagtgtgacagagcaagactccgtctcaaaaaaaaaaaaaaaaaaaaagaaaaaaaggaacattcagagaataagacttctagaaattataagcagcattgtaaagaaatacttgtctgaaagccttttcttggcttttttttttttaggatcaatttcttgctctgaagttattcagtctaaagatgtgtatattgttaagtctctgtatcactttctaactactttctaagagtggcacaatttaccgtcccaccagcaagatctaagaatgcccgtttcactgtggaactggatattttgcatcttaaatccaatgctggtgtaccttttcttaggtacctggaaagtagaaatcattttggtcacataattcttttaaaatgaatccaatctatttacttaagaaatcatttgctcataagaattatgaattatcactttttttttttgagacagagtcttgctctgttgcccaggctggagtgcagtggtgcaatcttggctcaccacaacctctgcctcagcctcccgagtagctgggaccacaggcacgcacctccacacctggctaattttttgtatttttagtagagacagggtttcaccatgttggccaggctggtctcgaactcctgacctcaggtgatccacccaccttggcctcccaaagtgctgggattacaggcatgagccaatgtgcctggcctctaagctattctttattaaacattctttgagaactgcctgtttttcaatatcttctatgaattgatccaatactacctatcagattttattgcctagagaacctactttcagctggccacatccactgtcttctgctcccaccttgttctttcctaccccttgtacttttgagcgttgttttccatgagccaatatccaatatccactcccacccatttctgttggcaaatgaattttgtcatgagttctggctccagtggatgggcttgggttgcctggagcactgtgttgggtctgagctcagtaggaagtggaaccacactggcatgaagagagtggcagtacacaggcagcatatttgccacatcggcctagctaagtcatatccagccttcaaagaccagcctaagtctcactttctccatgaaacctcaaatcactcttgtccactccaactgaattctcccttccctgagtccctgtcacacttgtgccatgtcattttttggcacctgaatggtttttgtta

SEQ ID NO: 95407 - DNA, 13209 bp, Homo sapiens
tctatgttaatacctttaaggtctgaacttgagtttaaggatgccattaagaatgcacttcttgctacagccgtattttgtattcccctaacaagtctgaagcctcgaatacaaaggattatagacattaccaagttatttttaaagattgcatttatattattcacaatgtttttgccagaaacacatcttacaatgcagagaaactggagatcatatagttattacaaaaaggctgaatgttacataaaagaaaaatgtcaatttgcagttgatttttggtagttgcatcatgtttctatacttgatacctgatatttaaaatgtattccattgctcctgtgtaatagatttatggatgatgatgacgataagcatcataaacatcagataaattattactgaataccagagggataaaaattgttgcttaagaattagtatatacagcactattcacaataccaaagacatggaatcaacctaaatgcccatcgatgacagactggataaaaaaaaaaatgtggtacatacacaccatggaatactatgcagccataaaaaaggaatgagatcatgtccttagcagggacatggatggagctggaagccattatcctcagcaaaccaatgcaggaaccgaaaaccaaacactgcatgttctcacttgtaagtgagagctgaatgatgaggacacaagaacactgggaggggaacaacacacactggggcctgtcagatgggcaggggagggtgaacatcatgataaatagctaatgaatgtaaggtttaatacctgggtgatgggttgatgagtgcagcaaatcaccacagcacacgtttacctatgaaacaaacctgcatgtccttcacatgtatcctggaacttaaagtaaaattaaattttttttaaagaattagtataaagacttaagaactggacaaatcctctgtcttcaggagaatatgttgaaccaaacataccagatcatcaccagtgaacacctatttgtcacacaagagattcatcctgatattagcaatgtttgcttttctttaaaaacttgaaaatcatttcaaaagtctgagtggattagtagcagttagtgcatttgcagaaagctcttcgaaggaaagataatatataaacagaaactgactcgggagttgaataaaagcaataaaagcttttctgggaaagccagtcatgtgccatctccagacattttttatatgcctcaatatgagcatgccccggaagctgatgcattgaggcaaaaagtatgcaaacaaccaaggtctatattttgggacaattaactcatacactgggcagccagtggccacaaaattcagaacccgactccagctgacattcaaggcaatcacttagctcctccctcgccttcatctctcatgtgcaaccctaaggaatttcaggcctgccttagtccattaactccttacctcctgcttccttagtcatggatgcagaattaggcagaagtccctacagtatatacagatacatatatatttgtgtgtgtgtgtgtgtgtgtgtgtgtgtatttatgtatatccatataaaatacattttataaataatgctattttagaagtgatacctataaatatctaagtatatattcacctaaaagtatattttagtattcagttaacatgtgcataattataatggattgagtttaaaaagcagctaatacctgtcatgttcttttcagaatgtcaggtattagtaaagtcagcagttctgcaaacatgctgtttctgctgttagtttcatggctactttacctgcagaagagtggctggcacaaagtgaaagctcaagaaacactagatcaaaaggaatggcataaaggaaacactagacttgcagatagaatatctacattcaagtttgaactaattcccttcaaatctttctgaactgtaaggtgggaataatattccctcacttggctctactttccccatagagatctccatgatagtaacagtttcagtaacagtaattttatctgtagaactggcttcagtagcaggaacagtagtaataagtggaaattatttttactataaacattatattggaatggattcattgattcattcattccactgtaccaggaaccacataattggctagatacacagagagaagacagaattactaccccaggtagggagggttatcacctagctagggaaaaacatattgcatgacatgggataaatgtttgtacacatggatttacctgaatgttttctctttgcttcttgtcaacgtaaaatgttccaccacaattttctgggaaatacaactagccttttcaatgtatccctttttcttactgtctaaactggaacaagtttcttttcttggataacttttacatcctctcttattaacctaggtcttctttttaacaaacttttcattgattcacttggtacgtaccagacactttgctaaagctcagatttcaaagataaaagagtcctaccttcgagcaaagaattttcctctattttcaggaaagcaataaaaaaaaatccaaagcaaccactttgaagatagttataagctcactttgtgaatgaagtcttagtatcgagggtaaagtgctaggatatctaaaacttaccttcaaatagtatagcaaaaaaaatatgtatttatacacagggagagaaagaaaatttataacagttgaatgcaacaaatataagttcattgttttattacttcaatttttttgtatgtttgaaatattttcttataaaaagtggaggaaatgaacaaaagtttcaatggagtcagatcactctgggttacaatctgattccagaactgtccagcagtatgagctggacctcatactagttattaacctcccaagatctcagtcttctcattgctaaatgagattttacatgccagagtgggttcttctgcacattaaattagataattcatgtaaaacatgtaacacagtcctgatgcttagaagaataaaacaaatattaactactattattttatctgtaaaagaatacttcagccgggcatggtggctcacgcctgtaaccccagcactttgggaggctgaggcaggtggctcacaaggtcaggagtttgagaccagcctggccaagatggtgaaaccccgtctctactaaaaatacaaaaattagctgggagtggtggtgggcacctgtagtcccagctrcttggggggctgaggcaggagaatcgcttgaacccaggaggcagaggttgcagtgagctgagatcatgccacagcactctagcctgggcgacataacaagactctgtctcaaaaaaaaaaaatctgtgaaatgatgtagaatttaaaatatggagatcaggaagatggcatttccaggaatagtagaaagtgtgtttcccgagaggtaggcaagctttggagcagcatggctctgagggtatataccaatctctggtggttttaatccagagttctaagggtcccatgactggggaggacaagagaccaagcttggggcttagagagtacaaaatttcagatcagagacaactgaatgaagctggggcttttgtaaagcgacatcatcaataagcaatctgaagaaaagccctgttggacaatgggagatggggaagattcttgcttatatctgcctacctagtgagtcaagtgaggctttgggtggagcccacattcacaggcagttagaaccagaagttttatttctgtgtacttgaaaatttatttgaaaatgaactcaagttagtagcatcctctagcatctggcagaagcaaacacgatcctacggaagagaaggcacattaagtccacacttcaaaaaattcctaaagattccatggaacattaattcacaatcaaaactaataaaatacataaggaccatggaaacatggacagaagtcaaccaaaacaaccagctacagaatcagactcacaaaacttgtttaaattcaataagcttgttaaaataaattcattttaaaaattagaggtattaaaagtatgacagtagaaaaagacactacagaaatgcccagacttttgaaagaacacaaatttttactgctagaagtgaaaatctaaaatgaaaatgaaaaaattctttacaaattaaatagaggagaagcagcgtaaaaactatttaatgaactgaatcatagatctgaaaaaattatccagaacttaatatagacaactaaagaagtagaaagtataaaatttcagatggaaagaataaaaggaagaggatactggcaatattcaaagagaaaatgactagaaatttcccataattgataagatgaatcctcagattcagaaacaatgtaatcataagcaaaaataagtagaactaaatctacattatattgtaactgcagaacatcagagacaacaagactatctttaaaatttcaacaacaatggaagccagaggagagtggaattatagattttaatgctagacgaaaataacaaagaattatataagaaaactacacagctcttatagattcataactaaaaataaaataattgttaaggtaagaaaactttttcaaaaaagtcagataagaaaaaaactgagagtgtttatgccaacagaaacaccaaagaaatttccaaaagaggaatactactaagaagaaaaattatctcagaaggaatgcctaaaatgcaaaaagaaactatgagccaagaaaataataaacatgaggtaaatgtaaacaaatatcaactgtagaatatattaatcaaaataataacatctgattttttggatttttaaaataaagatagaactgaaatactgcaatggtttaagagtgggaagttattaacattaatgctttttaggataaaagtaaagatgtgaattttattcattgctaagtttaaaaagtactttaaaatttttattgaaatctaaaagaagagaaatgcagtatatagcttcctcacctcatgaagttttttttaattgaaagaaaaatttttattgaaacactaaaggaagagaaatgcagtatatagcttccttgcctcatgaagttttttttaattgaaagaaactgtacagttaaagggccaaatatttcaagctgtattaaatataaacaaaacccactaaatgccatttcaacatcatactgtaggtcctatttaacagttaacatttattagatacaaccatgtatcaggcactgttgtgagcactttacagaacttaatacaatatcttataaggtatgtatagtgttatccatttttgcagatgagaaaacaagctatatagcttgtccaagattatataacaagttagtagcagaggatagacccagacagtccaaatccagaatctgtgctcttaaccactaccttatactctaccaccctactaatacactaatataatttagcaaagttgctagatataaaatcaatatataaaattctattgcatttcagtaaaccagtaacagtttgaaaactctacttttttttttttttttttggaaatggaatctcactctgtcaccaggctggagtgtagtggcacaatctcggctcattgcaacctctacctcccgggttcaagcaactctcctgcctcagcctgctgagtacgtgggactacagttgtgggccactgcgcctggctaatttttgtattttttagtacagacagggtttcaccatattggccaggctggtcttgaactcctgacctcgtgatctgcctgccttggcctcccaaaattctgggattacaggcatgagcccccgcacctggccgaaaactctacttttaaaacaatgctatttaaaatagcaataaaaagatgcctactaataaatctaacagaagttgtggaagatctttatttagacaattataaaaatagttttagagtttctaaggatcatgtctgtgagtcaggattccagagaccatggtcctgatgggatggagcctggagacgtcattgagagtaactggaatgaggttgacgacagctttgatgacatgaacctctcagagtccctcctccatrgcatgtacatctacagttctgagaagccctctgtcatccagcagtgagccatcctaccttgtatcaagggttatgatgcgatcgttcaagcccaatctgggactgggaaaatggscacatttgccatatcgattctgcagcagattgaattasatctaaaggccacccaggccttggtcctagcacccagttgagaatcggctcagcagatacagaaggtggtcmtgacactaggagactacatgggtgcctcctgtcaygcctgtatttggggcaccaaygtgtgtgctgaggtatagaaacagcagatggaagctccccatatcatcgtgggtactcctggtcatgtgtttgatatgcttaaccggagatacctgtctcccaaatacatcaagatgtttgtactggacgaagctgacgaaatgttaagccatggattcaaggaccagatctaagacatattccaaaagctcaacagcagcacctaggttgttttgctgtcagctataatgccttctgatgtgcttgaggtgaccaagaagttcacgagggaccccattcggattcttgttaggaaggaagagttgaccttggagggtgtctgctcattctacatcaacgtggaataagaggtagaagctggacacactgtgtgacttgtataaaaccctgactgccacccaggcagtcatcttcatcaacacttgaaggaaggtggactggctcactgcgaagatgcatgctcgagatttcaccgtctctgccatgcatggagatatggaccaaaaggaacgcgatgtgatcagaaggagtttcattctggctctagcagagtattgattaccactgacctgctgcccagaaatattgatatgcaacgactttctttagtcatcaaatataaccttcccaccaacaggcaaaactatatccacagaatcagtcgaggtagatggtttgaccttaaggatgcggatattaacatggtgacagaagaagacaagaggactcttcgagacatcaggaccttctacaacacctccattgaggaaatgcccctcgatgttgctgacctcatctgaggggctgtcttgctacttagccccagccagcgttcaatcttggggggctgagaagcagcaggagcgggtagggaagggagccaagggatgaatatcttgtcatttttttttctttaaataaatgtcactttttgaggcaaaagaaaaaagttttaaaacttaaacacataaatttataaccatgtttgtggacaaaagtaaacaatattataaaaattaatctttccaacatattctgtagattcaatgcaactgcagtaaaagtctaccagtgtattttctgaaatttgcaaatgtgattctgaaatttatatagaagatcaacgatctaagactatctaaaacactcctaacagaaaaaaaaatttgaaatgtttgtcccccctggatatttatttagtataaacctgtagtaatttagtcaccatgatactgacacaagaaacaaactaacgaaactgaatagagagcccagaaataggccacgtgtatgttaatacctgatataaaacagtgctacccactacagttaatgaggaaagaatggactgaaaaacaagtgattgtaactcatatggggagaaaaattgattcaaatacccactttactattcacaaaaatcaattccaggtggatcaagaacttaaacataaaaggtacaacttttaggaaaaaatatgagagaatatcttatggcttcggtgtaagatagaattttgtttaaaagactcaaaaatgcaaactgtaaagaaagatgagtgaatcaaactgcatttaaagtaagaatttcattccaaaaagctgacaacacacacacacacacacacacacacacacacataccccataaaggcagtgaaagacaagccacagactatgagatatttgcagcatctgtgattgttaaaaggttagtgtccagaatacatacagaatgcctgtaagttactaagaataagacaaattaccctatattaaaatggtcaaattatattaacaggcatatcagagagaaggaagcacaagtggccatcaaacatgtaaaagaaattcacactctttattaatcaagaaaaagcaaagtaaaaccactatagtacatcattttattctgagataaaaatgtaaacacattggctaagatgtaaaacaaaagaaatttgaagacattattagctcgagtttagattaatacaatttgtaaaatatttaggcatcatcttttaaagttgaatatatgcatgcctcatgaccctgccattttatttgcatatgaatcttagagaagctgttatatatgtccaccaagatatacctaaaaatgtttgtaagagtattatttacaataccaaaaaactgaaaacataactgtacaagagtagaatgcaaaaatgaattgtgttacctttatgcagcagtatatgacacagcagtaaaagcaaattaaatacacctacattcatcaatataggtgaatctcaaaagttatgttgagggaagaaagctagacacttaagaatatatatagtgtgattccatttatacacaggtcaaaagtataatcagacaaatatattactcaggaaatcatacctatgtagtaaatgcatttttaaaaagcaagccaagatattagcaaaattgcagaataggaagctctaaattttccttttcccccatagacacatcaatttaaaagcaatacatggatcaattcccattgtgagaaatcaagaagctaattgacactacagcaagcttcagattagaacaaacaaaagaaagaatcatcaaactaaaagatgggtcatttaaaattatctagtcagaggagcaaaagaacttgagggacttacaggacatcatcaactggaccattagaagtacaggagtttcagaaagagaaaagagaatgaaccagaaagcttattcaaatgaaataatggctgaagacatcccaaatcttgagaaagaaattgatccagatttatgaagcccaaagtatccaaaatgagataaatctaaagaaatccacaccaaaacatgttataattgaattatcaaaagtcaaacacaaagaattttgaaggaagcaatagaaaagcaacttttacatccatgagaacccccaaaagaatatcaacaaacttttcagcacaaaccttgcagtccataagacagtgggatgatatatttaaaatgcttgaaaaaaactgccaatcaaaaagaatatacctggcaaaactatcctttaaaaatgaaagagatgtaaagactttgccaaacaaaagctgaggaagtgcatcaccgctagacccgccttataagaaatactagggagttcaacatggaacaatcattaagcagaaacacaatagcacaagaatgtataaaacaacattggtaaaagcaaatatataaacctatacagaatgctatattaatgtaacagtagtgaataagtcacttttttttttttgagacagttttgctcttgttgtccaggctggagtacagtggtgcgatctcggctcactgcaacctccacctcccgggttcaagtgattctcctgcctcagcctcccaagtagctgggattacaggcgcccacgaccaacacagctaattgtttgtatttttagtagagatggggttttcaccatgttggccaggctggtctcaaaccccagacctcaggtgatccacctgcctcgacccccgcaaagtgctgggattataggcgtgggccactatgcctagccaagtcacttttaattccagtataaaaggcaaagataaacgtattaaaataactataattttaaaatatgttaatgaatacaaagcataaataaatgtaaatagagatatctataacaaagtgtagtggggtgagaagtaaaaatatagagaaactgtatgcaattgaagttatcagcttaaaatagactgttctattttaaattcagttctttcctataaataatgactttaaatttaaataagttaaattctgaaatcatgtagagcaggtgaatgtttttaaaaaaaaaaaaaaaaaaaacaagatccaactatataccatctacaagagactcactttagatttatggaccaatacaggatgaaaataaagggatggaaaaagatgtttcatgcaaatcatctaaaattgagcaggagtgattatattagtatcagaaaaaaatagactaagtcagaaactatcacagacaaagaaggatattatataatgataaaatggtcagtttcctaggataatattacaattataaatatatagaaacccgacattaacacacttaaatgtacaaagaaaacactggcagaaatgaaggagaaaatagatgacaatataaaaatagtgagagacttcaatgccccactttcaataaaaacatccaatcaaaaaaccagtaaggaaacagcacacttgaactattgctttagaccaaaggaatctaacagacatatgtagtgcattccacccaacggcagcagacacactttcttctcaagtgcacatggatctttctctaggaaaaattatgttatgtctcaaatatatcttaacttaaaaatattaaaataccaaggatctcttcttacccacaatggaataaaactacaaatcaatagaagaaaaactgaaaaatgcaaaaatatgtggaaatagaacaacacacaccagtgggtcagaaaataaatcaaaaggaaaattagaaaatatcttgagacaaacaaatcacaacataccaaaacctatgggatgcagcaaaacgtactaagagagaagtttatagtaataaatgtacatatagacaatgaaatggaagaaacagcccaggaatatatccacatatatagtcaactgattttcaacaaaaaaagccaagaatatacaatgggaaaaggacagtcttccctcaatgaaggaagttggaaaaactagatgtccatttaaaaaaaaatgatctgcaaataaataacctaactttatgattgaggaactagtcagggagaaagaacaaactaagcccaaaagtagcagatagaaaaataataaatattaggaattaatgagtagaaaaacaatagaaaaaaaatcaatgaaactaagttttttgaaaagataaacaaaattgacaaatctttagctagactaagagaaaaaattcaaataaaatcagatataaaagaggagacattacaacttatgttacagaaataaaaagaaactactatgaacaattgtatgccaaacaacttgataatctagaagaaatggtaaattcttagaaacatacaacctaccaatactgaatcatgatagaaaatctgaacagatctataactagtaaggagatcgaatctgtaattaaaaaaaaaaaaactcccaataaagaaaagccaaggatcaagaacaaagcaaggatgcccactcttaccacttatagtcaacatagtattataagtcttagccagagcaattacacaagaaagtaataaaaaccatctaaatcagaaacgaaggaatcaaattgttcctgtttgcagatgacatgatcttatatataggaaaccccagagacttcatatacacatacacacgctcacacacacacacacacgttataaccaataagtgaactcattaaagttgcaaggtataaaatcaatatataaaaatcagttgtgtttctatatagtaacagtgaactgcaagagaaataatggaaacaatcccatttacaatagcatcaaaggaataaaataggaataaatttaaagagttgaaagacttatatactgactacaaaacattgatgagataaattaaagaagacaaaaaatgaaaagacattctgtgttcacggactggaagacttaatttaaatgttcatatttaccaaagcaatctacagattcaatgtaatccatatcaaaatctcaatggtagttttcatagaaatagaaaaaaaaattctaaaatccttatggaaccacaaatgagtagccaaaacaatcttgaaaaagaacaaagctggagaaatcatacttcctgatttcaaaatatgtaacaaagctacagttatttttcaaagtatggtactgacatacagacagacacatagaccaatgaaacagaagacagcacccagaaataaatccacatagatattgtcaactgatcttcaataaaagagccaagaatgcataatgggaaaaggattttttttttttttttttttttttttttgagatggagttttgctcttgttgcccaggctggagtgcaatggcgcgatctcagcgcaccgcaacctctgcctcccagattcaagcgattctcctgcctcagcttcccgagtagctgagattacaggcatgcaccaccacgcccgtctaatttttttgtatttttaatagagacggggtttctccatgttggcttggctggtctcaaactctcgactttaggtgatctgcccgcctcagcctcccaaagtgccgggattacaggtgtgagccactgtgccgggccgatgaaaggatcgtcttaacgaatggagttgagaaagctagaagtccatatgcaaaagaatgaaatagtacccttaccttacaccacatacaaatatcaactcaaaatggattaaagacttaaatgtgagacctgaaactgtaaaactactatgagtcataagggtaatgattcataatattggttttttggatatgaccccaaaagcacaggcaacaaaaacaaaaatagacaaacgggattacatcaaactaaaaagctctgcacaggcaaagaaacaatcaacagagtgaagacaacatctatggaatgggagaaaatttttgcaaacatctgataaggggttcatatcaaacagatatgaataactcaaacaactcaatacaaggaaacaaattaacacaattttaaaaacaggaaaaaaaaaca

SEQ ID NO: 95408 - DNA, 44397 bp, Homo sapiens
catatgatatcatatgttgcaaataatatttttacctataaaaatgtttacccttttttaaatcacacatatccaccttttcctttatagatttggatttggaatttacttagaaatgtttccctcactgcagccgggcgcggtggctcatgcttgtaatcccagcactttgggaggccaaagcgggcggatcacgaggtcaagagatcgagaccatcctggctaacacggtgaaatcccgtctctactaaaaatacaaaaaattagcctggcgtggtggcaggcacctgtagtcccagctactcgggaggctgaggcaggagaatggcgtgaacccgggaggcggagcttgcagtgagccgagatcgcaccactgcactccagcctgggtgacagagcgagactccgtctcaaacaacaacaacaacaacaacaacaacaacaacaacattagctgggtgtggtggcgggtgcctgtaatcctagctactcaggaggctgaggcaggagaatcacttgaacccgggaggcggagcttgcagtgagacgagatctcgccactgcactcccgcctggccgcagagcaagaccccgtctcaaaacaaaagcgaaagaaagctgtatccctacctcacttctcacatcaaaatattttctcagtaaatttatttttataatcttgcagaggagggcaggtgatctgcccgcctccacctaccgaagtgctgggattacaggcatgaaccactgcgcccagccttttttcctctctctttttttttcccataaagagtagctattgtaattgtcgccataccttattttattttgagacagggtcttgctctgatgcccgagctggagtgcagtggcatgatcacggctcactgcaacctctatctgctgagctcaagcaatcctcccacctcagcctcctgagtagctgggtctacttgcacatgcatcaattttttttaatttttttatttttagtagagacaggtcttgctatgttgcccaagctggtcttgaattcctgggctcaagagatcctcccgcctcagcctcccaaactgctgcgattacaggtgtgagccactgcacctggcctgtccccacattaaaaaaaaaaaaaaattcctctccttccacttaaatgtcacctttctcaaatattaaaagacagtatacatgaggactatttctgttctttcaattctgttctatttgtctagctgttgattgcctctttagtactaaactttattaattcattttttttgagacagggtcttgctgtgtcacccagacttgagtgcagtggtgtggtcatggctcactgcagcctcgaactcctgggttcaggcaattctgcttcagcctcctgagcatctgggactacaggtgagcaccactacacccagataatttttgcattttttgtagagatggggttttgccatgttgcccaggctgttcttgaactcctgggctcaagtgatctacctgcttcggcctcccagagtcctgggactatagcctcagtactaaactttaaaaattgttttcatatttttaaatcccacctcccttggtcccataactctttttttcccagaactttcctattattcaccaatgtttatttttcctgatgaattgtggtagcatttaataaattctctgtgaaaaatacttcttatattttaattggaattgcattgggtataaagattatttcagaatgaattaatataattgcactattgaactgttctttccctagccatttgaggtacattttatcttttatgtccttcactagaattttaaagtttttttctcccaaatatcaataggtctttcatttttcctattaagtttataaattggtatttaatctttcttgatatcttagtttggattttttctttcattatacttaataattatttttgtccacaggaaagtcataatgttttttttgtttgtttgtttgtttttaagacagagtctcgctctgtcaccaggctggagtgcagtggtgcgatctcggctcactgcaacctctgactccctggttcaagctattctcctgcctcagcctcctgagtagctgggattacaggcacgtgccaccaagcccagctaatttttgtatttttagtagagacggagtttcactatgttggccaggatggtctcgatctcctgaccttgtgatctgcccgcctcggcctcccaaagtgctgggattacaggcgtgagccaccgtgcctggccggaaagtcataaatttttaatatcaattgtatactctgccatcttaaattttttcatcatttctttcttgtaatttgtttctttttattggtgagtaaatatgccattgtatggatataccacaagtgaatgaatatttatccattcacttcttgatggacacttgaatgggattaatgcccttataagagaacttgaagggagcaccctagtccctttggcccctactgccacatgaggacacagcgttcatccctttatgcccgtctttctttctttctttttttttttttgagatggagtctcgctctgtcgcccaggctggagtgcagtggcgcgatctcagctcactgcaagctctgccttccgggttcacgccattctcctgcctcagcctcccaagtagctgggactacaggtgcctgccaccacgcctggctatttttttgtatttttagtagagacggggttttgccatgctggccaggatggtcttgatctcttgaccttgtgatccacctgcctcagcctcccaaggtgctgggattacaggcgtgagccaccgcgcctggcctatgcctgtctttctcttccaccatgtgaggatacctatccagtgccatcagtgaggaacaggccctcaccagacactgaaccagctggccccttgatcttggactttccggcctctagaactgtaagcaataaattactattacttcttataaattactgtggtattttgttatagcagcaggaactgactatgacaggttttaatttgcatttccctgatgacaaatgatgttggatgagtgctttctcatatgcttattggttatttgtatatcttcttttgtgaagtgcatgttcatatcttttgcctgttttttgattgggtggtttgtctttttattgagttacaggagttctttattctgaatacaatctctttgtcagatatatttcttcctagtctcccagtctgtggcttgcctcttttcttttcctttccttttctttcttttttcttttcttttctttttttttttttgagacagggtcttactctgtcacccagcctggagtgcagtgtcacaatcatggctcactgtaacctctgcttcccaggctcaagtgatcctcctgcctcagtctcctgagcagctgggactactggcacaagccaacatgcctggctagtttttgtaattttagtagataccgactgggttttgccgtgttgcccaggctggtctcgaactcctgggctcaagccattcacccgccttgaactcttaaagtgcttgaagggattacaggtgtgggccactgcacctggtccctggtcctattttcttaatagtgttttgttttgttttgttttgttttgttttgttttgttttgttttgagacggagcctcaccctgtggcccaggctggagtgcagtggcgcgatctccactccctgcaacctccgccaccacacccggctaatttttggtatttttagtagagacggggtttaaccatgttagccagaatggtctccatctcctgacctcgtgatctgcccgccttgacctcccaaagtgctaggattacagacgtgagccactgcgcccggtcttttttttttttttttttgagatggagtctcactctgtcacccaggctggagtgcagtggcctgatcttggctcactgcaacctctgcctcccgggttcaagcaattctcctgcctcagcctcctgagtagctggaacggacacaggtgtgtgccaccatgcctggctaattttttgtatttttagtagagatggggtttcactgtgttagccaggatggtctcaatatcctgacctcagatgatccacccaccttggcttcccaaagtgctgggattacaggcatgagccactgcacctggccaatagtgttttttgatgagcaggagttttaaattttgatgaggtccatttatcaattgttttcagggtccatgctttttttaaaaattttttctttttttagaaacggtgtctctttgtcacccaagctgaagcgcagtggactgatcatagttcactgcagccttgaactcttgggctcaagcaatttgcctgcctcagcctcctgagtatgtgggatacaggctcatgccaccatgcctggcttttttgtatcctttctaggaaatctttgcataccccaagatttaaaagataccctcctgttttcttctagtagctttatcgatttgctttatgtttaggccaatgatctctcttaaattgcgttttgaatatggtgtgaggtagggattgggtcccttcaggcacataaatatctacttgttccaacaccacttcctggtgttcttgtccaaaatcatttgacccatatcagatggatcagatggttctcattatttttccaacagtaaacattgcagctaagaatgtgtctcatgcagtctctctccactcaaaaagtgtggtctgcagaccagtggcgtcacatcacctgggagcttgtcagaaattcagaatctggcaccactccagcattacacaaccccctagtgagtctcaggcacgttacattttgaggagcaatagtgtagatatttcttgaggaatgaggataatttttgaggaatgaggggaaacatcatcatgacatttgctgcctctcacagcctccccatgcactacagcctgtggggcctgccaacccattttccctggttactgtgcagggctagatttacttccagacttaacctctgggtccacctctcctgacatgtgctgtgccrttctttgctgctgggattgagggaagggggcccactcactcacccactcctcaccttttaatacccacaaccacctgctcactcacccagcagttcctatgctctcccctatacacattctttcaccaggaacctcagtttcctcaattgcagaaccaaaataagaatggtcttgatatcaggaactactgtgaagggaagtgatctgaggagtacctgggcatggagacagcacaatataagtcagttatcgtcatggccatttcagagctctttttccagtaaagcccctggatgctgctcgcctctgctatgtagcctcactcccctgcagccgggcagaatggagtccccctcctctccagcctgacttctcctcccctgctccgcgtccccagggcagcgtgcaccgataaatctttcccagcgcgttgcattgttacagcgagttgccctcgcatccgaccggccccccgccccacctctggagatcttcaaacccaggatctgtgccttggtcgtctttgaagccccggcccctggcacagcgcctggcacctggagggcgctcaataaatgtttgcaaaatcgaattctctgttgagcaggtgtccacccctccactcgcggagggtgggttgcgcgggcggaagggaagtctggctgtgtgccagggtgcggggggacacaggcaggggactcagggagcgggagagcgggagcgggtacgacgccggctagcggagcccggcccggagggtgcggcggtgccagacgcggagggcggcctccgctcctcccccgcctcctccccgcgccgcgcctcctccccgcgccgcgcctcctcaggctccgccacccccgcccggcgcggcagccgcagggaggggtccgggaaggcggagccagcggcggcccaggctctgggcactcgcgcggctcccgttcgcggagcacacatcccggcgcgacgaggtaggaggccgcgaggggaacggacgagggagctgggcgccgcggcgggaggggcgggaggccgggccgagaccctcctcccgtgctcccggacagcctcgcggcccaccgagcccaccgcgggagtctcaaccccgcccctcggcccccgcctccctcttcccgcgcccgccccgccgcgcgccccccgctccctgctgctccgcgtcctccgggaccgccctccgaggtcccccggggtcgctgctcctgcgcccagtgcgctccttgttctcccacaggttccttcggagagcgagcgggagtcggtgctcggcctcctgcggggagcagcccgagggtgagtccggcgtggcgtggcggggcggggcggggcggaggctggaggrcccggggccgctcttacgcctcttagtggcaccggggctcggcgctgcgggctggctccatgtttgcggaatgaatcagtcatgactctccttctcctcttcctaaggaggactttttgaggtccacgtgctgcagagcacctttggagggcctcatgagataggggtcccccctcctgcatagtggaagcccgactcccatttccccccctcctctctgcactccagtctggaggctccctttggsttgggtcttggggggtcggggacagggggcttgtaggcccagccaggtagttgtggaaggtgtgtcccagcaggagacttgagccagggctcttagaaggttgcagtggagggggcgcgctgcggaggacagctgacactgtcaggcagggtcacttggcacctccaaggccagcctggaagagcctgcttgaatatggattttgacccacagcttactgaaagcttccacgccgctgtttcttcatcaataaaatgggaacattcgcagtcatttctcaggactttgtgcagacaaaaagtttatcatagaaatcaccccacacaatgcttggcacatcgaggacactcagcacatcttagctttatttccttcctctctgaaaaaagtaagcagagttatttgttcccatcctctctgtccacagcctggtctcagagaacacagtagatgtgtagtcagtttgttcaataaatatgcttgatggagcttcaatacccacctccacccccttctcccagaatctgcagggagaggtcgggaggtgacaacgccagcatgccagtgctatcggaggactctggtaagtacctcccccyggctggacctgccacagycctgaagacaagagcctgcctggcagcctccaggccctggcagtgagagcctggggagagaatgtcctcacggcaggactgaagtgctgtttgaggccccactcgggctcctcgggggcagggagcacccactgcgtttgctatcctttgtttttctcacctctccccaggtttgcatgaaaccctggccctgctgacctcccagctcagacctgactccaaccacaaggaggagatgggcttcctgagggatgttttcagtgaaaaaagcctcagttacttaatgaaggtgaagtcccacgtcatcctgcgtggaagggtgtctagaggtctttctagctgtctgtggccgtctgaggtcatcctagtcatctccctgccccaggaaggccttcacttgcccactacacaggactttctcttatggtgccctgtcagtggcccagtctgctgccccaaatgtccccacagccgtgggtgggatgtgtggtgtccagggtgcatctgaaatactctgtctttgcagattcatgagaagcttcgctattatgaaaggcaaagtccaaccccagttctgcacagcgctgtggccctcgctgaggacgtaagccccaggtttctccttacagtgtctgccccactccccaccctgtagggctccttcatcttgcctcgcttgcttagtgtggggacaccgggaatcaggagcccaaaggtgaagaggtgttttcttcccttgtcctcctccttctcttcctctctctgggttccccgaaaggtagggaggaacccgtgagccttggactgggctgggagacactgtgacatggagctgcccacttactgtgtgttctttagcaagtctgcttcctctgctgtaaatgagagcattggattggctcagcagttcccaaactgccctgaggactggtgatttgaataggtcaataagacattatgtctgtgctttcctgaagtcaagggacctacagtgtgtccccgcatactggctcaggcttctcattttttaaaggaacgcttcttaatttcttgtggacctagtcgtctatgttgcgtggttggggaaaacccattctggttgattactaagatcagttcctgaataaactcacctaaccccaggagatggcctggggagggatgagtgcagcttgtgggtgcagagccctgggcccttctccactgtggaatgtgattaggggcacattagattgcctggctcccaggctcagcgctgcctgtcccaccagctctgtgatgttaagtaggccactcaacctctctgagctcccatttcctcattcataaaatagcatctgagagccagataagcccaggttcaaatcctagctgtgctgtatatgagctctgtgacttcgggcaaaatgtttaatctctttgagtctcaggattctcatctgtaaaatggcaaagtaacaagaccctctgcatcaagttggttgcgagggttcagtgagaagatccacataaagcagaaagcacgtagggcttaaaacggtggctccttggaggatggccccatagagctgctcctgacccctggtgtgatgttcccaggatcatcgtcgtcgggtggttgagggtctggtgtgcccctgggggctgcagctgggtgggcccttccaaagaggaaggacccagcagatatggggcaggggcacctcyagccatcagtggcgcctgtctcattctctgcaggtgatggaggagttgcaggccgcctccgtgcacagtgatgagagggagctgctccagctgctgtccaccccgcacctgagggtagtcacacagagcccctgcccagccatgcctctgggtctcctgggatgggggcggagggagctctcctaatgaggctgaggagtggaractgagggagcgatcctcagcactagtgtctgggcagttgtctctctggcatggcgtctgccaccctccataccaccggccagctgcggcctgctgaccctgtgagcggygggccagccttccttttctctggctttcccggcaggctgtgctcatggtacatgacacrgttgcccagaagaattttgaccccgttctcccgcctctgcctgacaatatcgatgargattttgatgaggaatcggtgaagatcgtccgcttggtgaagaacaaggaacccctggtaggtgctgctgcctgcccctctctaacccactcttcccctgcctctcacccccacccagaacactggacaagatcctccccgaagtcttcagagtgagtgacggcagctttgcctgcgctgctgctcatccctgtggtgcctctgtgtgcagggcacccctttctctaggtggatacagcccctctcaactgtggccaacaccctttgtgtagttaataacctgcacaattgtacagggtgaccctgatcatgctttaagccagaaatggacaaactacagcccaagggccaaaaccagcccacagcttattttttaaaataaagcttttttggagcacaaccaggcccattcacttacagattggctgtggctgcctttatagtgcgatggcagagttgagtcgttgtgacagagactgtgtggctggcctcaaatatttacatgtggccccttatagaaaacgtgtgacaatgcctgctctgaatgttgaggaagcacagggcattcctctccccagcagacagactgctatcactttggtcctggttcagcattgatttaccgagcaaagggacagcgttgtttatgagatgctcagaagtggtggaagcccagagaattgagattggctccagaggatcccacagctggcattctctatttccaactttccccaaatgacctccgacgagcctcttctgcaaacagacgaggatctctcctctgcctctgtttcctcacttgtaaaatggagtggccatccattgatttagcaaacacattgtgagccctcctatccaggctctgtattgggtgctggcggttcagagctgaataaatgatggatagcgatgctggaaagttctcagttctggggggctagaagtcctgaggttcttagctgatggcctctctttctagcaataattatcttacgtacttcaaatagatggcacagatgatgttaacaataagtgtgcaaatgtgtttgcagttacagccactaataagtggttaacatatgttgagtgcttactgtgtactaagtgccttgagtggaatccttgcaacaacactgtgagttaaatgctgtcccacatctcacaggaaacaggcttggagaggataagagatttccttgttaagtccacatgctttttgtaaacggcagaactgtgttcacacccaaggctgtccagccctagagcttagctcttaagctttctgccgtcctgctgcagtccggcctgtgtggtgcaggaaatcgagggctcgttagtgcctttctcatcctaagtgtcatctctgctgtgcttcatgggccaagtcctggtcccgaagccctggctggggtgcataattggtttccctcagcagcagcagaaggcccggtaaccctgtgattgggtagaggcagggtgagaattagctggcacgtgtcatcctcattattaaatgtctttgcaagtggtaggaactgtgatatgagagagatgtgatggagaacttactggatttggcatcacaaaaagctttcccctttaccagctgggtgaccttgaggatatttaacttctctgagccccagtccctcatctaaaatgttgcagcattattgtgccttgtaaactgtacagtgcagggctatattaatgggggatgttggttttgttttgtcttcagcattgggaaggtccccactgatctctctggactgtcagagggagggactggggaggctgtgttgggtccagagagtaggggtctgaggtttggagctgctgcttaagaacctgtctcttctgtctcgggttcagggtgccaccatccggcgggacgagcactcaggggctgttgtggtggccaggatcatgcgaggaggcgcagcagacaggagcggtgagtggcggcagtgcaaagctggcccagccccgatcatggccattgttccagagccctccacctttgctaataggtccccttacctccctcctatcaggtcacctgtttgggatttgctttgctttctggggttgtggctggaattctcatctccttcccaagtcagtagaaattttaatagaaaatataggccagctgggcatggtggtgcacacctgtaatcccagcactttaagaggccgaggcaggcggatcacttgaagccaggagttccagaccagcctagccaacatggcgaaaccccatttctactaaacacacaaacctgggaggcggaggttgcagtgagccaagatcatgctgctgcactccagtctgggcaacagagtgagactctgtctcaaaaaaaaaaaaaaaagaaaaaaaaaaaaaagccaggcacagtggctcacgcctgtaatcccagcattttgggaggccgaggtgggcggatcacctgaggtcgggagttcgagaccagcctgacccacacagagaaaccccatctctactaaaaatacaaaattagccaggcttggtggcacatgcctataatcacagctacttgggaaggctgaggcaagagaatcgcttgaatctgggaggtggaggttgcagtgagccgagatcgcgccattgcgctcccgcctgggcaacaagagtgaaattccgtctcaaaaaaaagaaaaaaagaaaaagaaaatataggccatgcacgggtggcccacacctgtagtcctagctgttcgggaggcccaggcaggaagattgtttgagcccaggagtttgaggttgcagtgagccgtgattacaccactacactctagagtgggcgacgcagtgagaccgtctcaaaaaaaaaagaaaaaaaaaaaaaatatatatatatataaatagtcatggagtactttggggtgattgagaaaaagctcatgcgttggtttagtccaaggactgtgacagttaagaatatagcatgggcttgcgggattactaactgtgggacagggttgacacccttccccaccatcccaggtcttgtcaagctactattacaaagagagtgtttgtgccccagattcgtttgggtagaaaggttgagaatcaccggtgtgtggaagagctactaagctgggagacaaacctcctggtatagggcgatgttacccccaaagtctggggggtcatcgttgcagagaatcctagaccagcactttgcaaacattaacgagtccacgaattccctgagcatcttgttaaaatgcagactgattcagcaggtctgagctaggccgaagattctgcacttttaacctgcctccaggtgatgctgatgcagccgggccagtgcccactttgagtagcatatagggccctaatatgcagagacattagtcattcaggcagaggctcatagtgtgtttacactcttaatgatgtcttcattggtgcctttgtctttccttgttaagacttaagaatgccattctaagagttaatgataattttaaagaagcagagattatagcaaaaagaacacaggctttctacatcataataactgtgtttgaatactggcttcattatttctcagcaatgtggccttaggcaagctgcttaatcttcctgggtctcaggtgccaacttgtaaattggagattttactgggtgatttgagccctgcatgccgagtgaggtgcccagcacttagcagggcttagttcgccccagtcccacccatcaactttaaacctcgagttggccctgcagtgggcttctcaggccggcccctgtggtgcttggagctctgagcgaggggtgctcaggtcctcctcctgtgctgatggtcagtccctgtgtctcctaggcctggtccacgttggagatgagctccgagaagtgaacgggatcgcagtcctgcacaagcggcccgacgagatcagccagattctggtccgtgctacaagcctgctagggatgtgctgggtcttcagacacccagagcaaggcacttcctggagccaggacagattctggcttagccttgctgttgtcctgaggaggtrgcaggcaaagtggccttatggtgtgcccctaacagtgtgcccggggtatggggtggcagcaggaggaggggaacttcccttccatctgcctctcttagaccytctcctcagcacagccttccttccttcccctggttccctttcacaaggcccctcctgggtcctgggtcctgggtgtgaatcctggctctgcctccttccagctgtgcaamcttggacaagccatcagatcatctgagtttccatttcctttcctttaacgttgggatagagtttctttctcaaccaatgtgtggttatcattggcatgctaacatctggaaaagggtaaagcccttcagaagtgtaaggggattttaaggtataaaatgcttggctgaaaacctccatggtccattctggggagttgaagtcaaaactgaaattgtgaaaagccccaatcatagcttggtcccctttatcctcaggattcctcccctgacctgacactctgctaacttctgatggttttgggggcagaaacaggatgagatctgaaaagaggaggcccactgtttaaagccctctctgggctgggctcagtagttcacacctgtaatcccagcactttggaaggccgaggcaggtgggtcacctgaggtcaggtcgagaccagcctgggcaacatggtgaaaccccgtctctactaaaaatacaaaaaattagctgagtgtggttgtgggcccctgtaatcccagctgcttgggaggctgaggcaggagaattgcttgaacccaggaggtggaggttgcagggagtcgagatcgtgccactgcactccagcctgggcaatgagagcaaaactccatctcaaaaaacaaaaaaacaacaacaaaataaagccctctctgtagaggatgcggattgcaggcaggcccttcagtccttttgcccaagcttgcttttttgtggctttgggtgccaaccttcttgtgctccagagcaagggtctgggctttctgggtagtggagaggccaggaggtgatcttttgggccctgctgtcctggtccgactgcattcttcctttgttgggcccctggcattgggctacagggtctctgtagatgagggtgaagggagctcctagaaagctgggcatggcctgagactggggagatggaagcaaagagggaagtattaatcagagaccagccccaaatcaggcaggaaagaggcaaaggaaaccgaaatgggttgttcagatgacccaggagaaaagcaaggaagggagccctctggggccgtagcggtcaggagggatggagaattggaattcaacacgtagtgtccttgggttctcatggaaagtcttcygtccctttgacttttgaaaatacagttaccaacccgccactgctaaatttgaactggcttaaaaataataaaaatactaaaaaatacaaaaatgtacagttacttggttactgagttttgttttagttcattcaaccagggcaccatcctagaagagtgggcctcaggggaggctgcaagtctgactttctgaacatcagtttttaggcctgagaagtaggagttgaactcttggagggttagacctggtaggcgagaagcttctgttctctttcgtttcaggcccagtcccagggatccatcaccctaaaaatcatcccagccacccaggaggaagatcgcttaaaggagagcaaggtatggggaggtgggtccgcggtgccctctctcagcttgagagatgcagctygctggctgggggctggatccagtccagtctcttgtaacagtcatttgcgaacagatcatagatctgatcctagtaatstgtgcccagtggaggactttaattccgtcacaragtgatgcatttgtttgtatcctgcctctttctaaacaggatttgacgtggcttactaataaaagacaaggttattttaattgaaatagaaactcagggccatgaagaggaggagaaggtaccaagtgtgctgaattctgaaccaattaagcaactgccatttgtttaattgttgctgagcctgccttatttggtcacctactctgtgccaggcactctgccagatgctggagacagggactcttggtagctgcaaggcttcctggtgcagaagggcagcaagtctttcattgctatgtgataagtgctttgccaagattctgtacaaagagttacagtcaccctagagggtgtcacagaatgggggtgttggaactgaggcctgaagaaggtaaagacgagtaggaccttggtggggtctgcccatacagaggctccctggcactctggagaggagcacgttaagggctatgtggtggggctttgaggggaggatggtggtgggttttgctggggaggtgggttaagcctatgttctgaatggcctcgaatgccttgttaagggttttggcataatccttgcttagtgtggggcctcttagaagctgaccctgagacaaggattgaatgcaaatggtttatttgggaagtggccccaggaaataccagtacaggactgggaaagggaagacagccaatctgactaagggtgtgttatcaagcaggttaccactatgggcagctggagcttagtcctgctgggaacttggggaactacttcttcccctgtagaacacacgcctccatcatcccacccaggggccctgggagctgggcgatctatataccaactcctgccaggctgcacccgggggattaattcctagcaacttctgcctgctggactagagatgagtaggttccagtggccagagaaagtaagtccttaggcaaagagatgcaggtgctggcagctggaagtcagcccaggctgcactgaatggtccagccctggggcatatgggagggcatcccacagcccaagagataatcccataggttctaataagctcttttttttttttttttttttttttttaggatgggagtggtgcagttatatttgtgttttagaaagctccgtgaggcagccacggggaggagggtggagtgggtagaggttggaggcagggaggcctggtagaaggctcttgtaaaagcccaggtgagacgttaagacctgaactgtgagatggtggttgatgagatagagaggagggcatcactttgatttcatagtagagtttcctggcagccaaggcaaaaaggagagcataatgaattacatactgttgagcagagaatggaaggaagcatgccagtttttcaagacattcccatacctgcctctcagtacttaatgcatgaaagaagaaacattacagcatctagcacagaggagatgtcagtcgatactttgaagaatgtggatttgtaatggactacgtcttcaatgacagttttttacagcaagtgaagaaataatctttatatagctgtttcttatttgtgctctttggttaaatcccagggcataatatttcctcttacctggtggaaagtgattcttcctaggacaagcgaatgtggtccgcacatgcaactttgagggttctgacttgaggaaacctctttgaggaagagaacttggttttcctaaaggacaaaatgagtagcctgtcccccagcctgtccttcttgaatatttcttcttgatccagatgcttgatttgggctggccacttaagattacattcttctgagtgcttaggaccctggtaacatctgtggctggttaagggcatctgtccccacaacatatgccagaaagttcttactgttgtccagtggaatcttttctggttggcatacaaaggaatagagtttgtatctgtctgaggaagacccctgattgctttttttttcctgtttgccactgaagtgattgggccctaatggtctgaaaatagaaataaataaagttaatccatgccactaaattatcgaagagaacaaggaagtgtgaaaaatgctgtgtcctcacaccatcttctccagagagggtgactctagagcagaggggggaattagggcttggccgagtctatggcagacgaggcaggattgagccgtaagagctgtgggtgtcaattacccactgaaaagtgatggtgaggagtcagtaacagtagttttgttgatatttgtgttcttacccaaacatctagattacttatataacagatggctgctgccttccgtcagcgcagttggcgtatcaaaaataacacttgagttagaaattgtgcttgcctttactttttgttcccaggattagttgttgctgtgtgtatgctaagaggctgttatgaggacagctggtcaagtaaataaggaaatatttaggtaggaaagagacattcagtcatggggcttattaattttctgattcttgatggacttcctgactatagtatcccaaatggttgaagaacagttaagaacatacgtgcagtgtatttccaagtagctttctatttgaaaggccacttggtcctcctaagtgtggatggtcgttgtcatgtggcctttgatgtgacaatgacctgtctgtgctcacttggggaagggccgcctcaccagagccctccttgtgcaggtgttcatgcgcgccctcttccactacaaccctcgggaggaccgggccatcccttgccaggaggcgggcctgcccttccagcgcaggcaggtcctggaggtggtgagccaggacgaccccacgtggtggcaggccaagcgagtcggggacaccaaccttcgagccggcctcatcccctccaaggggttccaggagaggtgggtctggggtatgttgtgaagggctggttccagagtggcagaggcacaggtacatggcagacccccaagtctctgccctcacagccagaggggcctgctgagcattgttcccccaaggtaagtaccagttgcacttgtgtttggtcttttcccataactagtgatgatggttatttgagatttaaaggaatctatggaaatttatgttattaagttaatgtgtgtgtgtgtgtgtgtgtgtgtgtgtgtgtgtattttttttttttttgagacagagtctccctctgtcacccaggctggagtgcagtggcgaatcttagctcactgcaacctccacctcccgggttcaagcaattctcccgcctcagcctcctgagtagctgagattacaggcgtgcaccaccatgcctggctaatttttgtatttttagtagagacagggtttggccaggctggtctcaaactcctggcctcaagtgatccacctgccttgacctcccaaagtgctaggattacaggcatgagccactggatccagcctaagttaatgtatattttataatgcatgctcagagaatgctgataaacaaaatataaaaatacagaagagaggctgggcatggtgatgactcacgcctgtaatcccagcactttgggaagccgaggcagaaggttcccttgggcccaggagttcaagaccagcctaggcaacatagtaagaccttgtctctacaaaaaataaaaaattagctgggcatggttgcacacacctgtagtcccagctactcgggaggctggggtgggaggatcagttgagcccaaaaaggtcaaggcttcagtgagctgttatcacaccactgcactccagcctgagtaagagtgagaccctgactcaaaaaacaaaacaaaacaaaacaaaaaaacagaaaaaaactgaagaggaggactatgaaaggaaattccccacgtctcacccttatctaaactgcatagtttgtttccttactgtgctttttatgtgagtgttgcatacagaatttggggtcttgctttttttttttttaaacatttttggcgtgagtattttccatattatagcatcgtttttgtagtgtgattttagtggctgtatactaactcatcaggagctgtgccattcattcctaggcggcaggtatttaggatgaattgagctggccttgtgctggcatcttgcgggctgctgtgaatccagggtttctgccctggaggagcttatagttcagtggaaaagccagacgctcttcaaacacacagtttatataaacgtgatgggtgcaagggaggaggacatggtgctgtgtgagttcatattaggaggctgcgccctcatccaggaatgcagggaaggcttctcagaggaactagctaagtgatttcactgctttcctgtggctgcacttcgattaggttgttcccaattcttcacttttataaggctgcagtacttacttactttgcacatagactgttcctcatgtttcaaattatttctttagacttccaggaaggtcagtcttgggtcagagggtggcagttgtgacttccactgtgggttgtagccctcacatcttttggtgtgtggactgtggtaaggacaggaccttggggttcacccatttcagtggccctcaaggtgtggccccctggctgggggcttcagcgtcacctggggacttgttagaaatgcagatccatgggtcctgcccagaaactcacattctaacaaatgttccaggcgattctgagatgccgaagtctgagaacgaagctctgtctcctcgggaaccccagacccatctccattttagggttcacaggtcttggcaacatcttaccagaggatgtgggggacagctcttcagctgcattttttttttttttttgagacatggtttcactcttgcccaggctggagtgtagtggtgctatctcagctcactgcaacctccacctcccgggttcaagtgattctcctggattctcctgcctcagcctcccgagtagctgggattacagacgtgcaccaccatgcccagctactttttgtattttttagtagagacggggtttcaccgtgttggccaggctggtctcgaactcctgacctcaagtgatcctcccgcctcggcctcctaaagtactgggattacaggtgtgagccaccacgcccggcccttcagctgcatttaaatgtggaaatctagtgacctctgagagccccacctctccactcatggccacattggacagtctgcccgggctgagccttccgctgaggggagggtgttaaattagggtcacttctgtcctcggcctctcctgggagtcattctgctatttctcagctccctcagagatggggaggctggggagtagagaaggggctgcctctccttagaaattggccataggagagtaatgaccagctgaggattgtacaccgggctggatcctgtgtggccatcttgagctggatgagctatttctggagcaagagactcagtttcttcctcctggtgagccagtgagccctgtgaaagtgttcccttcgttggaacttagtgctaagcaggaggccctcagagtgtccagtgtgtgcccacctgtgggatccaggccttggcttcccaagttttccagaaggttcctttcaagtggttatctggcccagctcacgggcccgcccatccccttgtgtccctgcagacgactaagctaccggagagccgcgggcaccctgccgagcccccagagcctcaggaagcccccctgtgagtagattgtcagggatggcactccagggagggcccggggttagggcgagggaggattcaggctgggaagaagtaggcagtgggctggagggggcatcaggggtcttgtctgagctcatggactccagaggaaggagggggtgggaagtaggaggtggggggcagctagtccctggagaggagcttgtatatttggagtccatagatgatgctggggggtatgttaacagctttcccaaaatgtgcagatgtgtgtgtgttcacacgcgtgtgcatgtgcgtgtgaggatccacagctttcgttagattcccaagggctctctgaccttgaaaatggaagaagcactggcgttggaagggaatggagaaggccatgtgtgacctggtgcctctggtagggctgccagattgccagactgggcaaatacaaataaaggatgcccagttgaagcttgaatttcagatagatgacagattggtttctagtataagtatgtttttatgtagtttttattatagtataagtatgtcctgtgcaatatttgaggcatacttatactaagaagttacttgttgtttatttgaaattcaagtttaagtgggtgtcctgcattttatctggcaactctacaccgtgtagcactttacactttagaaaacatgtccacctacttcttggaaccctgtgaagtcggtagagtcagctatcttttctaagctgggaatatgtagggtcacaaggttaagtgagcagagttggggtcacattttctgaaggcctgtgatcagagccccagggtagggccccgtgcagagaggaagcttttccagagcatggtctctctggtactagagggcagacttgtaaccgagtgagcggcctgagcaggtgccaggtgaccagaacacagatggcctgcagctctgctccaccccgctccatcctcaggcatctgcgttttccagggccagactccaaccccagaaaagagagagtgggtcctattcccaccgcaggatcctagagtaagctgctccctgggcccctgacaatggccacttttccagacttgctgtcaggttagaagggcagtggccttgaggctgctgtgccactgatgagctggctttctctggtgctaatgagacacatacaagaagactaattagagcaggtcttggggtttaataacgtaccacagctcagatcacaggttcrttggaggaaagggaaagaggccagatggcgggctcctcaggcactcgggccgtggctgccctcagccgcagggtcccygcttccctccactaatgctgttccatctgtcttttgtgcaaaccgcagatgatcagccttgtgacaaaggtaggcccagtatckatccgctgtccacaggcgtggccccttttccgtggaacgtctggggcctgaggggctcgtgttctttccctatctgggcagctgtgcccctcccactgtctgcgyacctcttcctgctctgccagctggactgggctgttccttgaggcaggcaaagctggtggggacagggttcaaggccttaggggcacctccctgccctcctgacacgtgcggcccagcctttccaggactcggctacgctgtgatggggctggataggagacaaggggtgggagggcagggcaggctggagtgaatccctccctattcacactgctcacactcagggactggggaggcctgctggcctagaatccccctcagggcctggaaaggctgttaggggcctaagcatggagaactgagcaaaacagaggaccttgctttcttggggtgtccaggacatgggatttcccctgagctccccacgagacaccatcccagggggctcttcctgcctggccatccaggggctgggtgccctgggccggatgtgtctggtgggactcactggcttccctccctctgtttgcttcccagagacctgtgactgtgagggctacctcaaagggcactatgtgggtaagtagctccccctgacacccacatgcacgacctgccccacccraggccccagagttagggagaggtcaaagcagggtgatctgagccccaggagtccttctggagcagtggagcctatgggacccccatctctcctcagttctctcaacccaagcaggagctgagcctgcccaggcattgggcccccacccagcttttacccagctgtggggcacactgccctggcgggaaaggcacacacacccctacattaataccaattctattatcaccatcattgcaattggagtttattcaatattaacaccactaccacgcagtgaggggtgtttgcggctctccagagccccttttcacttgttttggtcagttttttcaaaggtcttagagataggcaaaaagttttttttgttttttggttattttttagagacagggttttgccctgtctctcacgctggagtgcagtagtgtgtgacattgcagcttgcagcagcctcaatgtcctaggctcaaacaatcctcccacctcagcctcctgagtagctgggactgcaggcatctgacaccatgcccagctgattaaaaaaattttttttgtagagatggggtctcgctatgttgcccagctggtttcaagctcctggcttcaagcaatcctcctttctaaaaagtttttaaactttttttaaacttattttttgagatatggtcttgctctgttacccacactggagtgcagtggtgtgatcacaaatcgctgcagcctcagcctcccaggctcaagcgattcttccctctcagcctccctagtagctgggactacaggtgcatgccactatacctggctaatttttgtattttttgtagagacagggtttcaccatgttgcccagctggtcttgaactcctgagatcaagtgatctgcctgccttggcctaccaaagtgctgggatacaggcatgagccactgcacccagccccttaacttttgtcctgaagtaatttcaaacttactgaaaaggtgtaagaattatacaaagaactctcatatactccacacccagattcacyagttgctcctttgccatgtttgctcaatttcctttcccacatctctgaatttttttttcctgagtcatatgagacttagttgtagacatcgtgtccctttaaccctaaatctctcagcatgtatttcctaaggccaaggactttctcagggcagtgatcaaattctgagaatttaaaatgtatccaaatctgttatatgctgttatttaaatgttaacaattgtccccatcatgtcctttatgacattttcccttggtccaggatctaatctaggaccacacatagtakttgtagattcatatcttcatttcacaggtaaggaaattgaggctcagagagatgaagggacttgtccaaggtcagtcacatgccaagtaaaacagtgaccttaagccctagtttgtgaatgcaggggtcaccctttcatcttattattgtatttcctgaacaacctcttccagtagcaggaggaggttgggagaagtcagtgggactcagtcccatctccaggtctggccaggtgggaaaagtctctactgggagatcctgggacaactgggacaaatgccatggtgtccctctgcccctcctcccaagctggtcttcggaggagcttccggctgggctgtagggagagactgggtggctcgcaggaaggaaagatgtcctccrgagctgagtctccggagctgctgacttacgaagaggtggccaggtaccaacaccagcccggagagcggccccgcctggtggttctgatcggtaggtgccatcctgggtttccaggaagtgatctggtttcctccctggagcaggtggggagggagctcagcagggaccctggtcagccttcytcttgtttcccagggtctctgggagcccgactgcaygagctgaagcaaaaggtggtggctgagaacccacagcactttggcgtcgctgttccacgtaagagggcccatgtgggagtgtgtgtttgtctgcacacacacaaatattccatggagacttaactccccagatccatccaaatccttactttgggtttaaaggatcaccaggcactgcctgctattggcaaattgtgggacaaaggcatgatgggaagaaatccactcccagtggtcctctgagaccctctgaggcagaagttggaggaccacttgcttggttcctgcctggggtgggagatgagtccagagcacattgtaggcaaagtggcagcctcaacctgacaccacggggcccccacagtagggggcattcctcctcatcacagtgaattttgactcctgtggccgctgccctctgcttggatgagagggcaggtcagagaagccacagagccctgtgagtggtatttctcggcactcccttatagccagattccagtttgtcagggtagctgggtacattcctgggtgatgcctcccctgccaattcctggggcttactgctgccaggggcaccctgggatgtcaagctccagtgggcagaggatcctggttctgaatgtgataaggaggatgaggaggaggagaatgaaggtgccaggtaatgcaccaagagcttttatgtgtagtgccctgcgtcagccctcccagtacccctgagaagagagattgttatcatcttgtgtggcagaggaagacagtgagggtcagagaggttaagtaacttgtccaatgtcacacagttggtaagtggtggagccaggattcatacccaggcagcctgccccagtcatgttcttaacgaggatgcacaatggcctctcacctgccgcctcccacttcgtgcccttggctgccccttttctttctgggactcactctcagtccccctggcctcagagggatgcagtgtgaatgcctggtggctactgagaggggtgctgtgggggccctaatggggcctcctcagagtgttctggggcagagcaaccatgaagccttgctttgatcacaccgctctccctgggcccctgggcccagcgtctagtctgtgggttgtcagagctgtcttccacagcccaatctgaagtggcagggatgtgggggaggtggtggccctggggaggccatcctggcagcacacctgtgatggacctggagggcttcagggagccacggccttccaagtttcaggtggactgaaacaggacatgcagaggttgctcacacactgatcgttcagaaccccttggatccaccccctggagaagaggtacctggatggtcaggcccacctgcttctaggcactccacagataggagactttcctcctttgttttagaaactgggggagtcagggaagccttcccagaggcagtgacttttatgctgggttctgaagagtaaataggagttttccaggcagaagagaaaggaatagttctctttacagaggaaacaacatgtgcaaagggacggagcagtgttggggaccggggagattagtgtggatggtgtgctggaaaatggagctgagaggttgggcagatcacgcaggtctcagatactcagctagggtgtttagaatgtaacccatagataaatacaagtttttaagcagggggatgacatggttggaaaagtgaccctagcacctctaccggaggttggactaagatgccacagaaagaacacagggcataccctgggtggttcccatgggccagaagacacagtgcctcaagatcccattttatcttttggaaaatactgtgtgtgtggctttgtgtgtgcccttgttctgcagaagacctgattttcctcagaagtgtgcatcccaattctgttatggaaatcaatgagaaaacaccatgtgtttcaacatttttgtttgagagccagccttgctgaaacacatccgatctatatagggacggtctgtcttcctgtctcctttttctggagatgagaactaattgactaaagaattaaaagcatacatcagggtcaagtgtatgtgtggctcctttgctctcaaaaaataaaaaacaatgaagaattaaaagttaggactaggggtcccttaagtgattctttaaaagccacagcatatgctgggcgcggtggctcatgtctgtaatcccagcactttgggaggctgaggcgggtggatcacctgaggtcgggagttcgagaccagcctgaccaacatggagaaaccccatctctactaaaaatacaaaattagccgggtgtggtggtacatgcctgtaattccagctactcgggaggctgaggcaggagaatcgcttgaaccgagaaggcagaggttgcagtgagccgaaatcatgccattgcgctgtagcctggggaacgagcaaaactccgtctcaaaacaaaaaacaaaacaaaacaaacaaaaaaaaaacacagcatcagggagtcagttagcagagtggttaagggtataagctgggcatttggcagagagaccgattctggctgtgctctctactggttgtgggtcactgtgcacagtgctgaacctctccgtgcctcagttttctcagctgcaaaaggaaaagcctccttttgcctacatcaaagagttgttgtgtgaatcagtgatacgcctgcctggaaaggcacagtgcctgatacagggacatgcaatgaggtggaagtgcctggtttagacacagcagcagtgaactcccaaatgagtgcctaagcctgctgctgtccctgcgtgctgtgatgtgacatctctttgcccagctttccttctttctttaaaagataccaccaggccccgaaagagccatgagaaggaaggagtggaatatcactttgtgtctaagcaagcatttgaggccgacttacatcacaacaagtacgttgcttgatgggccagttggccctccaggcagttgtgtgtttttgtatctgtattccactagagctcctgggaggactcccggaaaggatgggggaagcgggagagaagtcatgttgggaggtcccctttgctttgctaatttaggaaagctgaggaactaaaggccttttcccctttggtggtgttttaggttcctggaacatggtgaatataaggaaaatctgtatggaaccagcctggaggccattcaggctgttatggccaaaaacaaagtttgtttggtggatgtggagccagaagtgagttgctgggcctgctggccatttctggttaacggaatttataactaggggattgtacattttacacaacacttaacctcagtctaaggaatttttagtctagaacactggctgttcaatttctttgggtcttcctttgagaatcaaatgaaagccttgtaccccaaaacatgcccctctatccacaaatgctgcattaattgtagggagcttgtggacactctggtggcccacagacccaggctagtaactcctgcgtggaacagatcatgcaatagttggtggcgctgactggccattgcaatgtgccagagaattagatgtcagtacccaggtgaaactggggctgagctctcggtgccaggcctccccctccccaaccagggcaggtggagtcagtggcttagagaaccactcagggaggcagtgaggagagcagtttaaaggggaaaaagagggagggagacacggccctgggaagtgcttcaaaaacatttccactcctgcacacccagcatgctgtggactcagcaggggcttaaccatctttttaaccttgtcttttagaaaaacttccaagctttgaactcaatctggggattttttttcccctctatagaaacagatctctgattttatgctataaactgtaggctttattttaaagaagtttgcttgaaatatattccaaaaagcacgttatgcctataaaggaaaacactcatttggacttacagggagttagtgatcaaaattaaaagtctgagtttcaaaattttctttgaaaagtgattttattgatcactttattgatcaagggtgcagataatgcatatagcagtttaatactagtgtttccaagtggagcccttacttctagataaaatgcattaatcaagagtacaatttctttttctttttttttgagacagattcttgctctgtcacccaggctggagtgcagtggtgcgatcttggttcaccgcaagctccgcctcccgggttcacgccattctcttgcctcagcctcccgagtagctgggactacaggtgcccgccaccacgcctggctaattttttgtatttttagtagagacggggtttcaccatgttagccaggatggtcttgatctcctgacctcgtgatccacccggctcggcctcccaaagtgctgggattacaggtgtgagccaccgcacctggcccaagagtgcagtttctacagtctacagttttaaatgatctgttcagtaatctcatttgctttgcaaaccttttcttctttgaataccaagaggagatgtaatagcacaaagtttgtaataatgtagtccgattgatgacatttgactaaatagatacacactgactcctgcttcctcacccatcagaaatggaaggtggagaggagcctgagaaggttaattatagccggaggagtcagagctaagagagacagcaactgtctctgagctgaggcttaggaaccttctgttggcagtgagtgtgacttcagggccccgctgagttcaacgtcaaagtgaaggatgagaaaaggagcagttggtctgcccagttgaagtccattgtcatgggacccatgtaaccaggacctttgctgttgaggttatggtattgaagcacacgattattgagctttcaaaagtctrtttcacaacaaaacacttcaaaagtatataatattcctgaactttctttctcaggcactgaaacaactgaggacctcagaatttaaaccctatattatatttgtaaagcctgcaattcaggaaaaaagaaaaacgccacctatgtccccagcttgtgaggacacagcagccccatttgtaagtttaaagttgattgtttcttttctgaaggcctaagggaggctgttacaggaacgcttctagctgcataagggtgcttgcagctgaagagggatgcgggacacaccttctacatgtgattgtctttccattttgcctattgaaaaacttaagagaagatgattacatggccagaaggctcaaggtgaacagctggaagtgcctcccaaaccaggcaggtggctttgcctgggctcacgcccctccactccctcacataagcgccctcccgcaaaatgtgacacctgtcagggacctcatctgagtgtgacagactgtactcatcaaactatactcctaggccaaatccaagtattttaaattgaaaccccaactaacaaggtcattatcactgctatcaaaccagtttgaatcatcagtgaatgaagggatttctaaaactagtggatgagatcgtctgatgtgtcctaaatgaacttctgtttcactgtcatagattctttgttcagcccagtctatgtcaggatggcgagaccctcacccaaaacckaaatatttgacagagttcttccaggaggtgtgggcttggtgactcatcttttttggttcttaacagggtcagttagcagaatgagttggaagttgttgtgggtggtgggggcagtcagaagcaactcagtcccagaatagactttacttgctgtcctatatagctggtttcatctgaaggaggccttctcggatccttccccttggtcaggaagctcccgctgagtcaagattttgatgcaatcctagttcatactaattctcagttttaactgtccacgttgatacactttttattttattattatttttttaaagacagggactcactatgttgtccaggctggtcttgaactcctgggctcaagtgattctcccaccttggcctcccaaagtgctgggattacaggtgtaagccactgtgcccagccttttatttttttggggacaggatcttgctgtattgcccagactggagtgcagtggtacaatcatggctcactgcagccttgaactcctgggctcaagcagtcttccttcctcagcttcctaggtagctgagactacaggcatgtaccatcaatgcccagccaattaaaaaaaatttttttatagagacagggtgtctctgtgttggccaggccggtctcaaactcctggcctcaaatgatcctcctgcctcagcttcccaaagtgttgggattacaggtgtgagccaccgtatctggtctcagtaaattatttagaatggcatacatacaaggaacattagaaattctctccttggccaggtacggtggctcacacctgtgtctcagcactttgggaggctgaggcgggcagattgcttgagcccaggaattcaagaccagcctgggcaacttggtgaaaccccatctctacaaaaaaattacaaaaattagccaggtgtggtggcacaaacctatagtcctagctactcgggagactgaggtgggagtgggaggatcacttgagcctaataggtcaaggctgcagtgagccatgaccatgccactgcattccagcctgcatgacacagtgagactctgtctcaaaaaaaaaaaaatgtagaaaaaagaaaaattttctcctttagaaactctaagggggaggctggcatggtggctcacgcctataatcccagcactttgggaggctgaggcaggcagatcacctgasgtcaggaattcgagaccagccaggccaacatggtgaaaccccgtctcatactaaaaatacaaaaattagccaggtgtggtggtgcatgcctgtaatcccagctactcgggaggctgagacaggagaaacacttgaacccaggaggcagagcctgcagtgagccaaaatcacgccactgcactctagcctgggtgacagagcaagactccatctaaaaaaaaaaagacacaagaaactctaaggggaataggggaatatcaacttaagtctagaatcatttagaaacatacaatattggctgggtgcagtggctcacacctgtaatcccaacactttggagggccaaggcgggtggatcacctgaggtcaggagttcaagaccaacctgaccaacatggtgaaaccccatctctactaaatacaaaaaattagctgggtgtggtggcacgcgcctgtaatcccagctatttgggaggctgaggcaggagaattgcttgaacttggaggcagaggttgcaatgagccgagattgcgccatcgcactatagcctgggcagcaagagcaaaactccatctcaaaaacaaaaaaaagaaacatacagtatgcccatcatataacaaaaaaatcagagacaacctaaataatgttcactgtcaggactcagttcaatatactccattatgtgacacttacaggatgtattgaagtattatagccagttaaaagccatatgttggggccgggagtggtggctcacgcctgtaatcccagcactttgggaggctgaggtgggtggatcatcagaggtcaggagttcgagatcagcctggccaacatggtgaaaccccgtctctactaaaaatacaaaaattagctgggcgtggtggcaggcatctgtaatcccagctactcgggaggctgaggcaggaaaatcacttgaacctgggaggcagagttttcagtgagctgagattgcaccactgtacttcagcctgggcgacagagcaagactctgtctcaaaaaaataaattaattaaataaataaataaaagccatgtgttggaggaatatttgatgacatagctaaatacaagaaaaaataaatcaaaataaaaaatcaggattctaattttgtgttacacacaaaatacactaaaacgctaaaggcaattctccctgaatagtgggctcatgactaaattttgttttgttttctgtgtgttttttggagggggagttaacagctttactgagataaaatttacatactgtacaattcacacatttaaagcatacaattcaatgatgtattcacagagttgttgcaactaccacagtcaatttaagagtattttcatcacttcaaaaagaaaccttgagcccattagaatttcccattatctgttttcctccagccccttcctagccacaggcaactgctaatctactgtcactataaatttgtctattctaaacatttcatataaatggattcatgcaatgtaagaccttttgtatctggcttttttcacttaatataatgtttttaaagttcattcatgtatcaatacttcattctttttttatggctgaataacattccattgtatagagtaccacattttgtttacccrtttatcgattaatggacatttagattgtttctaccttttcagctattatgaatcatgttatgaatgttcatatacaagtttttgtgtgaacatatgttttcatttctcttgggtgtataccttggtatggaattgctgggtcatagggtagttctatgtttaactctaccatggcagctgtaccattttacattcccagcagcagtgttcaagagttcccatttctccacatcctcaccagcccttgttattgtctgtctttttaatcatagcactactagtaggtgtgaagtggtatctcattgtggttttaatttgcatttctctaatcatcagtgaagttgagcatcttttcatgtgtttattggccatttttatatctttcttggagaaatgtctgttcaaatactttgtccatttttaaatgtccattttttgttattgagttgtaagaattctttatctatttggatacaagtcccttgtcagatgcatgatttgcaaatattttttcccattctgagttgtcttttcactttctttttttttgagacagagtttcgttcttgttgcccaggctggagcgcaatggtgcggtgttggctcactgcaacctccagctcccaggttcgagtgattctcctgcctcaacctccaagtagctgggattacaggcgcatgccatcatgctcggctaatttccttcgtatttttagtagagatggggttttaccacgttggccaggctggtctcgaactcctgacctgggtgatccrcctgcctcggcctcccaaagtgctgggaggcaccacgcctggtccttactttcttgatagcatcctttgaggcataacattttaaaatgtgataaagtccaatgtatctattttttcttttgtcatttatatttttggtgtcatatctaagaaatcattgtcgaatccaaggccataaagatttactcctttgttttcttttaagatatttatagttgtagcagttacatttggatctgtcatctattttgtgttattttctgtggattgtctgaagtaggggtccaacttcattctttgcatgtggatagccagttaccccagcatcactggttgaaaagactattttctcatttaattattttaacacccttgtctagaatcaattggcaagaaaagtaagggtttctttctggagtctcagtcccattccattggtctacatgtctrttcttaggccagcaccacactgtcttactttgattactagctttgtagtaagttttgaagtcaggtttttcaagcttgttttggctattctgggtcctttacatttccatatgaattttaggatcaatctgcccatttgttttactatattggctttgttttgttttgcaaatatttcaggattgaataagcagggggaaatggctcatttttcaaagagtcaagaagtcactgggagaataagaggcagcttcctagractcaaggccaaatcatcaggtccacaggcagtgccagctttctaggattcagaaccctccctggcccatggttgttatttcaagagaagcagctgcattctattcccagtgtccttccagcctggccggttttgtcatctatcccatctcctttattgcccaccagaatgctgcattccaagcaggtgggctgatgatgaaatgcagctggcccgttcatgctccaccacactgcagctgtgagtaggcagcagggtcacagtgaggctgttcaacacagagtccccggttctactcccagagattccgacctagggggtttggagtggggcccaggcactccatttttaacacacagcctttcatgtggttttgatgtatgttggcagaccccagatgacatttggagaaattcctcacaaaggcatgggttttgtgtaactttaaatatctgtccattgtctggcacctgagttcctggtaggggacccaaaacatcctctgtttccttgctgaccacaagttaatggggcttctggcttctgacccggcaaagctgatccaacctgggggtgacggacagcacaggggaatctttcctatgtgatcttcgggactgtgactcttgctgaagacacaggtgggcgagttccatcgttacaggccaggaaaggagttcaggggatttatgactgctaagcaaatgtcacacgtttttactccattagagatttacttaagttctttccagatgcagatatttattaggtagattgtggttctttgtggcaaaaattttccttctgtaatttctcaaatagccaaatgcttccaggatgaaccgtgtgggtgcctggaggaggggaaactggaagcagcagacaggtctataggatgggtgtgtgtcagggagtggggaaggtggggttgaagatccgggggcagttacgggatagggcttctgagtatgaaagtagccctgcaagaatattctatatagaatatagaattgagaagtgtctcccaatttaatcgaattttttccctcctggaggagaaaaggagaagaaattatctcagccttctcttacatttctactatctttgaagtagcatgccaaacccttttcctggatcttgaggactcgaatcctgaaatttcagatgctctcactaatgtaggaattgggttttgactggtgacagagaagaggggggaatatttggaatgtaggtctctttgggagagaacagaactcaccctttccctgtggcagcatgaaaacactgagcccctagaagcagaggggagacagcaacagagaactaaaaagggcagtgagtgaatgccagcgacaaattttattttgtaattttacttagaatgggcctgccactttcctgttttccaaaaccaggctaattgtcagacaactactcacttgaaataatacttattagaggttcttttgaatgaagatgcaaacagtgcccacattgtgtaagatggagttgttgcctataccttaatgttaagtgtcagaaaagcaatctgattaaagagatcagctgccctaaggaaatggggaatttgattagaattgtccagtgctttcttaaataactccactttgctgtgctagtgtttggctctggtgtgaggaagtgaattgagttctgcactgtgaatttaggagtcttcaggagggcattagaatgatttcttctccttcttccaccagttgattgcagaaatgtttgctctgtttttatatagttattatttatagttctttcttataattatttaacctgtgtactraatgtcatgcggcacaatactactacttctttggaagtacttctgaggcaggaagtgtgatattagcatatatacacagttatagaatcagcatccccaatgcacttcctatcgtggctttgagttcataggtcctcaggaggtattctgtgagtgaatgactgaacagtgattgtgtctactgcccattaactttctttgaagtttgacatgatgttgtccctatgctctgttcttgtgtacacagttggttatcagtgggacctagtcatccactcatcacttaaaagttaaaggttggaacattgctcaagacaaaggttataggtttgttataggagaacaacccagttgctccttttaccacccctttccttgcaggatgagcagcagcaagagatggccgcttctgccgccttcatagaccggcattacgggcacctggtagacgccgtgctggtgaaggaggatctccagggtgcctacagccagctcaaagtggtcttagagaagctgagcaaggacactcactgggtacctgttagttgggtcrggtaactttatcccagaacatccaagctggacgggaccttgaagatcatctagtccagactccctcattttaccatcaaggaatctcaagcgcagagagggagagaattctccacaaattccatcatcgagaagagtataagtgggaagtcttgtttgttgttggtttttgtctgttgtttttcactgcacctctttggatcatgatttgaaaggggcatatcagaaaacaacacatttcatttattaaagtatcacaggcaagctgaccctgattctttgtaccaaagttaagtagccactgtcttttgtgggtggtagtggttaatttatacagtactgattcgcagaatgtttaagctttttaaacatagtgacgcttagtagtttttttggaagctaacttgttttatccaaggggattttacatgtaactgaagttcccctgtcttcaagcactaaaacgttgatcttaaccttttttttgaagtgcttgcctggtaatagaaaacgggttctctgcctattttaaaatagtgaatatacgtaaattttctctggaaggctgaggcacacttcaccatcaacatgaattactgtactatcctgtactgcagtggtgccttcagggactcgaggaatgtaaggttgcctttcccctttctaaataccctcagattcctaacatcgagcccatgctttgtttgatttgttctattccatccattgtcccttttgttactgacagttgccttggtcctagccagtccctgccatgagatcataggggttcccattgtgctagatcttgggaaaccagatgactctccctgtcaaaactatggctacgtcactgtaaaccatttctgtcaagaataaaagtatgtagacccagagtgtgggcctaatgggttgtctctgagcaaaaatgattatcacccaggattcatgatatatcttaggtgctcagagaatttttttttattattaatagccagcaacagtctttattctgtgctggatgctatgctaaggcctttacatacattaccctgataaatacaccaagccaataaggtaggattcttatcatctcattgtacaaacgagaaaaaaaataaagcttagacagtttaaataatgtgcccaagcttgcacagatttaaaaaaaaaattgcaggccaggcactgtagtgcatgcctataatcctagcactttgggaggccaaggtgggtggattgcttgagttcaggagttcgagaccagtctgggcaatgtgtcaaaaccccatttctacaaaaaatacaaaaactagccgggcatggtggtgtgttcttgtagtcccagctactcaggaggctgaggtgggatgaacgaggaggttgaggctgcagtgagccatgattacaccactgcactccagcctgggtgacagagtgagaccctgcctcaaaaaattttaaaaattaaaaaatgcagagctatggtatttgagcctaaatcgcccaaataccagagatgatcgttaaccactatactatactgcctcattcttttgtggtcccataatcgaggctactcactaatataattcacttataaatgatgaatgtgtttacagctagaatttataatatgaagtgtgaccataacttctaagactgaaaagaggctacatacacgtgtacattttcaacttcttttactcatgaaaggaaaaggaggccaagttgaaggtgaagcaccagggagaaggtttgccacccatttagaaatttccattttaccttctacacaaggatacctttgcaacgctctagctcatgaactggtaggtccacgtaacaggatcacattcttcagaactttctagtaaaaagatggggacttctttacacttagagagtattggattcttatcaagtgaaattggtcttgagctgatctacagagagccaggccagggagggcagctgcccctgaagtgtgaccagcacatgcaaagttgttatgcaggataatgcctgtaatcctagcactttgggaggctgaggcagtggatcacttgaggtcaggagtttgagaccagcctggccaaaatggtgaaaccccgtctctactaaaaaaaaaaaaaaaaaaaaaaaaaaaattagctgggcatggtggcgggtgcctgtaatcccagctacttgggaggctgaggcaggagaatcacttaaacctgggaggcagaggttgcagtgagccgagaccgtgccactgcactccagcctgggtgacaaatgagactctgtctcaaaaaaaaagttgttatgcaggagagctgggatctgaagtctgctcacaggcaaaagcaaaacaaacccacatacgttaaaaattacttttgaagatcccctcaggaggcatcatggtggacatcctaatcaagtctcaaagccccatgtaggtggttttccctccagtgtgggaacacagtggttgggcacccaatgatgttctttctgcattttataccactccacaggcattttctgctgcttacataatatttttacacaattgtcagattaaatgatggtaattctctttacatgtattatgaagcagagtattaaaaagtgatccttagccaagtgtggtgactcacgcctgtaatcccagcactttgggaggccgaggcaggaggatcacttgggctcaggagttcaagaccagcctgggcaacatagcaagaccttgtctctattaaacataaaattagagccagcagcattggctcacgcttgtaatcccagcactttgggaggctgaagtaggcagatcacttgaggccaggagtttgagaccagtctggccaatatggtgaaaccctgtctctactaaaaatacaaaaattagccaggcatggtggcacacgcctataatcccagctactcgagaggctgaggcacaagaattgcttgaacctgggaggcagaggttgcagtgaaccaagatcatgccactgcactccagcctgggcaacagagcaagactgtgtcttaaataaataaaaacaataaaataaaaatttaaaaattagttgggggggtaggttccaagatggccaaataggaatagctccagtctgcagctgccagcatgagcgatgcagaagatgggtgatttctgcatttccagctgagctaccaggttcatctcactggggcttgtcagacagtggctgcagcccatggagcagggcagggcgtcacctcaccctggaagtgcaagaggtcagggaattccctttcctagcaaagggaagccgtgacagacggtacctggaaaatcgggacactcccaccctaatactgcacttttccaacagccttagcaaacggcacaccaggagtttatatcccgtgcctggctcagagggtcccatgcccattgagcctcgctcactgctagcacagcagtctgagatagaactgcaaggcagcagcgaggctgggggaggggcgtccacaattgctgaggcttgagtaggtaaacaaagcagcctggaagctggaactgggtggagcccactgcagctcaaggaggcctgcctgcctctgtagactccacctccaggggcagggcatagctgaacaaaaggcagcagaaacttctgcagacttaaacgtccctgtctgacagctttgaagagagtagtgcttctcccagcatggagtttgagatctgagaacggacagactgcctcctcaagtgggtccctgacccccgagtagcctaactgggagacacctcccagtaggggccgactgacacctcatacagctgggtgcccctctgagacaaagcttccagaagaaggatcagatggcatcatttgctgttctgcaatatttgctgttctgcagcctccgctggtgatacccaggcaaacagggtctggagtggacctccagcaaactccaacagacctgcagctgagggtcctgactgttagaaggaaaactaagaaacagaaaggacatccacaccaaaaccccacctgtacgtcaccatcatcaaagaccaaaggtagataaaaccacaaagatggggagaaaccagagcagaaaagctgaaaattctaaaaatcagagcgcctcttctcctccaaaggaatgcagctcctcgccagcaatggaacaaagctggacagagaatgacttcgatgagttgagagaagaaggcttcagatgatcggtaataacagacttctccgagctaaaggaggatgttcaaacccatcgcaaagcagctaaaaaccttgaaaaaagattagacgaatgggtaactagaataaacagtgtagagaagtccttaaatgacctgatggagctgaaaaccatggcatgagaactacatgacgcatgcacaagcttcagtagctgatttgatcaagtgggagaaagggtatcagtgattgaagatcaaatgaaggaaatgaagcgagaaaagaagtttagagaaaaaagagtaaaaagaaatgaacaaagcctccaagaaatatgggactatgtgaaaagaccaaacctacgtctgattggtgtacccgaaagtgatggggagaatggaaccaagttggaaaacactcttcaggatattatgcgggagaacttccccaatcgagcaaggcaggccaacattcaaattcaggaaatacagagaatgccacaaagatactcctcgagaagagcaaccccaagacacataattatcagattcaccaaagttgaaatgaaggagaaaatgttaagggcagccagagagaaaggttgggttacccacaaagggaagcccatcagactaacagcggatctcttggcagaaactctacaagccagaagagagtgggagccaatattcaacattcttaaaggaaagaattttcaacccagaatttcatatccagccaaactaaacttcataagtgaaggagaaataaaatcctttacagacaaacaaatgctaagagattttgtcatcaccaggcctgccttacaagagctcctgaaggaagcactaaacctggaaaggaacaactggtaccagccactgcaaaaacatgccaaattgtaaagaccatcaatgctaggaagaaactgcatcaactaacgagcaaaataaccagctaacatcatgatgacaggatcaaattcacacataacaatattaaccttaaaagtaaatgggctaaatgctccaattaaaagacacagactggcaaattggatagagtcaaaacccatcagtgtgctgtattcaggagacccatctcacgtgcagagacacacataggctcaaaataaagggatggaggaagatctaccaagcaaatggaaaacaaaaaaaaagcgggggttgcaattctagtctctgataaaatagactttaaaccaacaaagatcaaaagagacaaaaaaggccattacgtaatggtaaagtgatcaacaagaagagctaactatcctaaatatatatgctcccagtacaggagcacccagattcataaagcaagtccttagagacctacaaagagacttagactcccacacaataataatgggagactttaaccccccactgtcaacattagacagatcaatgagacaaaaaagttaacaaggatatccaggaattgaactcagctctgcaccaagcggacctaatagacatctacagaactctgcaccctaaatcaacagaatatacattcttctcagcagcacatcacacctattccaaaattgaccacatagttggaagtaaagcactcctcagcaaatgtaaaagaacagaaattataacaaactgtctctcagaccacagtgcaatcaaactagaactcaggattaagaaactctctcaaaactgctcaactacatggaaactgaacaacctgatcctgaatgactactgggtacataacgaaatgaaggcagaaataaagatgttctttgaaaccaatgagaacaaagacacaacataccagaatctctgggacacatttaaagcagtgtgtagagggaaatttatagcactaaatgcccacaagagaaagcaggaaagatctaaaattgacaccctaacatcacaattaaaagaactagagaagcaagagcaaacacattcaaaagctagcagaaggcaagagataactaagatcagagcagaattgaaggagatagagacacaaaaaacccttcaaaaaatcaatgaatccaggagctggttttttgaaaagatcaacaaaattgatagaccgctagcaagactaatgaagaaaagagagaagaatcaaatagacgcaataaaaaatgataaaggggatatcaccactgatcccacagaaatacaaactaccatcagagaatactataaacacctctatgcaaataaactagaagacctagaagaaatggataaattcctggacacatacaccctcccaagactaaaacaggaagaagttgaatccctgaatagaccaataacaagttctgaaattgaggcaataattaatagcctaccaaccaaaaaaagtccaggaccagacagattcacagccgaattctaccagaggtacaaagaggagctggtaccgttccttctgaaactattccaatcaatagaaaaagagagaatcctccctaattcattttatgaggccaacatcctgatatcaaagcctgacagagacacgacaaaaaaagagaattttagaccaatatccctgatgaacattgatgcaaaaatcctcaataaaataccggcaaaccaaatccagcagcacatcaaaaagcttacctatcatgatcaagttggcttcatctctgggatgcaaggctggttcaacctatgcaaatcaataa

SEQ ID NO: 95409 - DNA, 573216 bp, Homo sapiens
  misc_feature (1)...(573216): n = A,T,C or G
gagtcatcatcttagcaggaactcaggtgtgcacagaggggcccaccatgaatagcaaagatactcctatcactgcgaaattccagggatttagaggctcccttacaggaactgaagacaaagaccagacatattattgcacaacagtgtccaagccgggtctgactccaccttgacttttcattctgtgcgtaaggagcacagttacagactgactgacgtgggacggcctgtgtgactggcgttgggaggaagacgagggtggcctgtgtgactggcgttgggaggatgatgagggtggcctgtgtggctggtgtaggaaggaagatgaaggtatttctttctgaagttttttttttttttttttttttgagataatgaaacttttttgccagggaaataacctagacatgtctcaagcaccttttggagttttaaacattttgaattaagttagggtgaaaatactgcagtttggagtgaaggattttgtttctgtgttacttaaggcaatgaaacagtaataatttgcccttatgctaactcttctttcatgtttaatcccttatttgaagttcttaactccctgacctatttagtttatgcttttatgtatgttacataaaagttatcataaataaactaatatatacatacatattattataatatttaatgtattggaacaaatttcaaaaacctgtcagcatttttcattttcttcctcaaaaccatctccatggaatttgtttatgcaatggatagaaattaggtgttgtcctcacttttacctgctcccctgacaatgtaaggtccatcattgtccttgcttcctcgccagtgacttccacattcttattgccacgcacacattccaagtgagtgaaacgatgaggaatttgagtcattcagtaaaatgaaaaacatgaccaatcatgtggttagagggttgaaaatatgaaaatatatgttttgtacaatgaagtgaacaaagtgcacggaggagacatcaaccagagagctagagctggtggaaggtgagctgctgagtgagtgtccctccccttccaccccctcatgcttctgtgggtcactggtgtatctactgtaactgatctgctctcctctgcccttccctgttcttcacctgtcctcttattgctggtctctggtgggcattctctaccatctctcttgatttcctaacattctgttctttctccaaccccgggcagaaactctgaaggcaggaggaggaggacaggggtgcttatctcattagtcttgcacttcccacccactttggggcttcatcaaaacctactggcccagatrttgctgtgaagactttcctctgccagattcagcctcctgggtctggcttgtagcatttaacagcatctgtgctagattatctaaaatcctgggcacctggtggtgatctacaggtgaataggaatttgtccctcctctttaaccctttttgcttttccatcttatagggaaaaacaggttctctgcatactgctttaccacactagttaagatacgtggttatgagaagtttatagaatgatcaagtggtggctcatggaacccaaaccccctaatgcagctgggatctcggagaggactggacctaggacccaaaaaactgctgcctcatttctatctaaaaaaaaaaaaaaaaaaaaaattcctttctctgtctcctggtccactcagagggtagaagacggccatctagagacctggtgtgtatatgttaataggtcagccatatgcagaaatggtccctaccagttcccatgtcaaagttcccagaagagagacccttggtggcccaatttggaccaagtaaccatccctggtccaaagagctgtaacaagtagatggtattgcacggtatgacctagctgatgggctccctggcttgtatgaggaaagaggtctggttcaagggagacagagaagggagcagctggttcagcggctgggcaggtacctaaaaggcacctactacattagcctcttatgtattcatttgacatattctttcagactgtctactgggtgctaggcatgatccagggcactctatccagggatagagctatgaatgagacaaagtctctgccctcacggccttgaccttccactctcttgtctgcatttccactttgcagggtgggggcaaatttagtgcttttctctttgcttactcttgttctctcagttctttcccttccctttggtttctttctcagctaatagatatttattgaactcccactctctgctgacacagcacctgtttaaatggtggaggtgtaagcatatactcattttatgtggtagtatttgcaaaatgcattaactcagaattatctcatgaaaccttagtcataatgtgctttgctgtagatggtgtaatgtttccttaggcaatatgttttccacaaattttttttgaaaatttttttttctaatacagggttaggttgagatgaggccactgaggtagaaagaatttatctgaatcttagggacaggtgcggggtggtataactatttctacctaggaaaaaatcccaaggttttccctgttgtggtatagaaagctgtgttggcctgaagcatgctaggtagataagtgggagatattattccacttcattctgtcatcactatttactcgtgtcaataatttttttcactccaatatttgttatccaacatctaaattcttgtttggaaaagttattgttcctgttatttatcagtgattttttttttttttgtcccagtcttcttcaaacctcagtggtcttgtgtttcttcctttcctggtgcacacatttaaacctcacctccccagaaatcttgcagagttttctttctttctttctttctttctttctttctttctttctttctttctttctttcttttctttctttctttctttctttctttccctccctccctccctccctccctccctctctctctctctctctctttctctctttctctctttctctttctctctttctctctctttctttctttctttctttctttctttctttctttctttctttctttctttccctccctccctccctctctctctctctctctttctctctttctctctttctctctttctctctttctttctttcttttttggtagagatgaggtcttgctatgttgcctaggctggactcgaactcctgggctcaaggcatccttcccaacttggcctcccaaagtgttgggattacaggcatgagccaccatgcccagctgagggttttctttcagatgtttcttatgtccatccttttatcccaacctccatttaattcatgcttttatcatcttgcttctagattgtagaattaatttcctacctggttcgcttatctaaaaattctcctcttctgctcttccccctttgccatcactgccagatgctcttctctcctgctcagaaacttcctgtggcctcctgtgaccttcaggatgaagttcaagcttctttgcttggcattgagtcatccacagtctggccacaggctattttttttggtgaactttttttctactttttcccagtttggaccctcagggttgatttgttttttttagttggccctgatacaattttgtctgcttgggcctttgcttaagctcttcttgcccttgcccacaatgcccttccctttcctacaatgcccttccctttcctaatccacacctcacccacattgccaggctcttctgtctgtactcagaatctattccaccacctgccctcccagcacaaagaggctgctgacctctgagcctccttagcacctttgggcccactcttagtcacacactggtaagtaaccatggttacacctttatgccttaattgagggaacattttcaagggcaggaacctgatcttctgtttttgtgttctcagcggcatctaacaagtgatcctgactgggtgctcatcagcatcacttagtgatctttagaagcaaaacacagtgaccacagaatctgagagggcagggcccgggaactaatacattgtggaagctgcattggtaatactaatgcacaggggaactgagagccgctaggtgagcaatgaaccactttgaccacgcactgttcagtgaacccagcctgtccctactgtcctggagcttgggcttctgggtgcagtgagacagagcatccataaataaaatcaggtaatgatgatatctggtactgtggaggaagacaaggcagggttagtgggcagagagaaaagcagtacttccatataggctagcttcaaaaatattctccatctgtcttacatcagcaaatgctccaacacctggccttccctgattgaagtccgggagccccagctggtgggccagacagtctggaagaagggattcttgctctctgctgccgcttgttgatgagtagacgaccaagcagtgtcccatggggagccagaaagaccccagagagtgggaggttggagggaaggagatgagggatcctgtctgagtgaggaatagccagggtgctgtgggcacacgcaaaaagcaagaggaaaactggagtgtgcctggcctgtgaccagggacctggcttgagccccggagcctgcacccactaggcgtccccatctaggtgaagggagaagccttagcccacttcagacttaactcttacttaatattcggaataatatgtcagctttcagtaaacgagtttacatttcgcttgtccctttcttaggataaggattatcatccttctaatcactttaaaaagatgatgtagcgaaaactttctctttaaaagtgtttctctatgacagtgaaaagtattctttgtaacagggaagtgaaggtttacttgcgtaagatgtcagtttttttttttttttgagacgagtctccttgtcgcccaggctggagtgcagtggcgcgatctcagctcactgcaggctccgccccccggggttcacgccattctcctgcctcagcctcccgcgtagctgggcctacaggcgccctccaccttgcccggctaattttttgtatttttagtagagatggggtttcaccgtgttagccgggatggtctcgatctcctgacctcgtgatccgcccgcttcggcctcccaaagtgctgggattacaggcttgagccaccatgcccggccaagatgtcagttttttaatggtgtgcaacgtccgtttctttgatagttggaaagcgtggcaggtattagagggcgaatgtatatttaagaaaaacaagataagtcttcatctgtagagtattaatttttctgtgatcctttatctcagacgcctctcctctgaaggtcactgctcaagctgggcagccccttctaagaagggatgctgccttggagttggagatgaggttaagatctacgtgcgggtaccagtttcagtaataactggatccttctctaggtctaggctggaacgtctcaagtgaaggttattggggggcaggggtttgggtccacccaaaaaggcttgacccataggactgaaatcaaatcttgagctaggctggcttgccacgtaaccacagaaacagtaatttaagcaataaaatgaaagctcgagcgctggtccagagctggggttgggacagctactgcactcaggtctccaggtgcatgtagggagaagagcagcggatcccttgcagacaatggtgggagcgagctcttcaccctggggtctccgaagcccatttttagcgtccagaggtgtgctttcgccatctccttctgcggtggctgcttgcagggcgcattcccattgctgctgtctctgttcctaaggaagatcaaaggatcccagaaaacccagttccagagctcagttcccgggactagagggtacgctcggccagatggctgggggtgccgctggccttggcgcccccgccgtccccgcgcggtcgcccaccccggcccgacaagcagcttgggcrtccagcccggcccggtccctgcagggagggagcgcaggagctgggggcggctctcccggggcggggctcgctccacaagcgccaggggccgcgcggggcgtgggcgtgggcggggccgggggcggggccggccttggctgccgcggcacaggcggcggcgtctccagggggagccaaggtacgtaggcggcgtccgcctcacccgagcatccttccccgccggtggccgcccgcccgcggcccgcgctcgcagcctcccgcctggcggttgacttctttgtgtcgtattctctgcctgcgccctgtctctgcaggacctgttcgttcttctttgggctataagaaggcagaggatgagatgtcccgggccacgtctgttggagaccagctggaggcacccgcccgcaccatttacctcaaccaaccgcatctcaacaaattccgcgacaaccagatcaggtaggagaaggcggccggctcgcgcggaaggcggtggagtcacagctgggaaggggctcgtcctcctgcgcggggcttggccgcgcacctggccggcccccgtccatctcccccagagccttcccctgccccctccccaccccactagcccgcggtgcagccccgcgcttccagtagggtcatgcgaatgcagccctcaccgttctctcctgcgcatccgttctgcgcccagcctgcctctgagccctgagaagttttcactctaatgtcaccgacaaaaacgaggtctctgctcttttcatccctgggcttccttctcggaaccccttctagccttgttttaagccagttgatagccttctttagcaatttttagaccatactatgggggacgtgcttcataagggaatcccacaagtcacaaggaatcacattcagttctcagtggtccacgacaattgttaagaggtcttcatttgctgcgaaactttgcccagagttagcagaaagatggacagargctagcrtttaaatgtctacttttgctggccgctatgtcacacaccctggctatagcagcttagtgaatcttcataacctattgaagcaggccaggagactggaatataaagatgctaaataatgtacctatagtcatacagctcctaaatggcagggctggaaattgaacccagcccatctgactactaaggataaaattttttctgctgtgcaaagctagttctttatcacgggtgttcgtacattttcaaatttcattaaactttcaggcttraacaactttgtatctgggagagacttcagaggatgtagttctgtgagctgctcagaacaccatgcttgggtgtagagaagttcagtgatttatcaggttacacatagattattgacaaacctgagttccaatccagtgttcttttttggaagacaaaaactttgttgttatatgtttaagtattccactactgcactaacacttgtacaaatgacttagcctgacatctttatttagaaaggtcaggcagttggacattattggggtagaataatggtgcatattatatggaggtggaattttcacttattaaaggagtgttagattatgcagctttattttgggttttaagaatgacagttgggcatattttatacttaaaagtgtaatttagaagaatagctgagtccccatttcagaatgtgtgggcttcgtttaagatacagagcatcagtcgcagtgagttaccacttcacaaactagggtggctccaatcaaaaagacaaataacaagtattggcaatgatttagagaacttggtatcctcatgcattactgatggggatgaaaaacgatggagctgctttggaaaacagtaaaaatgatggagctrctttggaaaacagtttggtagttcttcaaaaggttcaatgtaaagttaccatatgacctagccgttctactcctgggtaatctgcccgagagaaatgaaaacctacgtccacacaaaaactcatacacatatatttcacagcagcattattgtgaatagccccaaagtagaaataatctaaatgtccatcagctgatgaatgaataaataagatgaagtatatccatacagtgsaatattattgggccataaaaaggaatgaaatattgacacattctacaacatggatgagacttgaaagcattatgctaagtggaagaagccagtcacaaaaggcctcatagtacatgattccatttatatgaagtatccagaagaggcaaatttatagagttatgaggtaaattagtggttcctggggctggggaagagagaaaaggttggggggaaatggggaatgactgtgaatgtggatggggtttcattttggggtgatggttgcacaactctgtgaatttacctaaaccatttggaatcctgcactgctcatgtagttccatttctttacaccttctcgcatgtgtttctattgaattgctttcaaaaagatgattttctaaaagrtatatactgtataaggatatgggatttgaagagctacttttctttttaaactttagtgtgttttcaagatgtatttttgcttaatttctattaattcctttaattttgttatccatttatgcatgcttaaggctgggagaaaaaaaaaatagaggcctttgtttttgtctaaattcttttgttttaatggaaggtaaagttttttttttttttggagatggagtcttgctctgtctcccaggctggagtgcagtggtatgatcttggctcactgcaacctccgcctcctgggttcaagtgattctcctgcttcagcctcccaggtagctgggattacaggcgcctgcccagctaatttttgtatttttagtagagacggggcttcgccatgttggccaggctggtctcaaactactgacctcagaggatccacctgcctcagcctcccaaagtgctggaattacaggtgttagccaccaggcccagctggaaggtaaagatttttaagagcactgataatggagcttcactacctgttctgtaatcaagattgaaagctgacccagactgattgtattattagtcagagggattccgagtagctgtctgctgtgcagtttcatctgtactgttttgagagaggcagagtaagttggggatgtacagtgggttggtgaggaataaagtagtcagttaccagctattgtattgaaagctttatgtaagtatataattgaattagttgaaatatattaaaattcatataatttctgagttcatggcttatactgtgagcgtaagtttccgcatgcactggatagggtctaagaaattaaaatgtggtccttgatgttctttaaaatggcctttgagtatttggttcgccttgactctgtgtttaaataggaattactaatggttatcagtgacttgtagttcattaaaaaattggttgtaggccagatgcagtggctaacacctgtaatcccagcactttgggaggccaaggtgggtggatcacttgaagccaggagtttgagaccagcctggccaacatggcaaaaccccatctctaccaaaaatacaaaaattagccgggcgtggtggtgcttgcctgtagtcccagctactcgagagactgaggcacaagaatcgcttgaatccaggaggcagagattgcaatgagcccaaatcacaccactgcactctagcctgggtgacagagcaagactccgtctcaaaaaaaaaaaaaaaaaattgattataaagcttcttagcattatggtttaaggatttgagaaaacgtcgagccatattattttagcactttaatgttactgaactcaagttttatgataatattgatttttaaaaataaggccttttatcttggccatgaatgtttgctaaaagttaatgaagctattcaaaggaatatttttataaaaggataaataatttgttttttaatataatttttctggagaaaaggttaatggttttcttagaggcagggcatggagagtttatcccagttcctttgcccctaaattgagctttttgaaaagaagggaccacatgggatagatgaggctcaggcctgtctgctgactcagggctaacttaccttgttgtactccttggcaggcctgtcctctctggaacagagttctctcccctactttcctcaaccctaagccggttttggtttgaaaccctctggatcatagcagttgctctgcgcttgcctttctgggaagctggcgtttgactaggaatgggagtttgatacagaggaagggagggcagcgaggggcggcatgctgtcattcaggacaggaattctatgggtcaagtttactggaatggaattgatgtgactgaagaaagagggtgggtctagggaaatgcctagaaagcaggagtgaggtcccctctgaggtccattgtggcctcagcacccccaggggtatgcactacatgagaactctgaattctggccaattccttgaatttttgggagggactgtgctatgtatatagatgtctcaccaaaccttgttctcattcttgacgctgaaaataccaccagtgtttgatctgaagtctgtggtaggtttattaagtttttcattattgaagccaatgaattcagattatcataatgatggagaattatgaagtagtctttttctactagggattgattttctaggaccttaactatgagaacaataactttcttcatcctctggaaatgaatagtaattaatgggattcaatgtttatatacatatgtaagattatgtatgtgtccacctaataagatctccttttcctggagtgtacaatcatatctcctttcaaatgttttaaaggttttagtgcacaattcagccatctgaagtatacaattcagtgatttttaatatattcattgtgcaactatcatcacagtcaattttggaacattttcatcacctccaaaagaaatattatactctagctatcatctcccatcccttcctccccccacccctaaggaaccacaaatttactttatatttctgtagatttccctgtactggacattttgtataaatagcctcatatccttttaagttaaatattaaatgcttacaaaagctcactatttagaggaaactggtggtgaatttttaattttatatatctaaattttcaagaatgtttaaagttaaaatgtttttttcccccagaaaaatcttgaaataatgtgctgatcaaaggaatgagcaatacttatgtcatcactatcagacatatgtaatctttctatgtgattagcagcatgccatttgaaatagtgaatttcaaagccataaggcagttttcttcaatatttgaaatgaggtcttcaaagctagttaggaatgtttatagttactcagttttgaatgactcattcatttcaggtgggcgttttagctagcaaaaacttcattacagtggtaactcgagctttgtcaagttactgcatttcttcaggttggtttgccttaaaggaaattacttcatacaaatttttggtaagtttttgttggctttgccaaggttaattttaaatagaatattacctttacagggccaggcgcagtggctcgcgcctataatcccagcactttgggaggccgaggtaggcagatcacgaggtcaggagattgagaccatcctggctaacatggtgaaaccccgtctctactaaaaatacaaaaaaattagctgggcgtggtggtgggcgcctgtagtcccagctactcgggaggttgaggcaggagaatggtgtgaacctgggaggcagagcttgcagtgagcagagatcacaccactgcactctagcctgggcgacagagccagactctgtctcaaaaaaaagaaaaaaaaaaaaagaatattacctttacagaaaaaggaattgagcactgtatgctaggttggtacagtatcattgtttataatattaatgctgagatcctaattttttttttaaccttgttttttggttgttttgttttaatttatattttaggttcgggatatgtgtgcaggtttgttatataggtaaactcatgtcataggggtttgttgtacagattatttcatcacccagatactaagcctagtactcaatagttattattattattattatctgagacagaatctcattctgtcgcccaggctggagtgcagtggtgcratctcggctcactgcaacctcttcctcctgggttcgagcctcagcctcctgagtagctaggattacaggcatgtgccaccatgcctggctaatttttgtatttttagtagagatggagtttcaccatgtttgtcaggctggtctcaaactcctgacctcaggtgatccacccgccttggcctcccaaagtgctgggattacaggtgtggctcacacctgtaataggccactgtgcccggcctcaatagttattttttctgcacctcctccttctcccaccctccaccctcaagcaggcctcagtgtctgttgtttccttctttgtgtccatgagttctcatcatttagctccctcttgtaagtgagaatatgcggtatttgattttctgttcctgtgttagtatgctaaggataatggtctccccctcattccacattcccgcaaaagacatgatctcattcttttttatggctgcatagtgttccatagtgtatatgtacattttctttatccagtctgttgttgatggacatttaggttgattccatgtcattgctattgtgaatagtgcttcagtgagcattcgagtccacgtgcctttatggtagtaggacttatgttcctcttggtgtatacccagtaatgggattgctgagttgagtggtagttcggttattagctctttgaaaaacttccaaactgcttttcacagtagttgaactaatttacactttcaccaacagtgtgtaagtgttcccttttctctgcaacctcaccagcgtatgttatattttggctttttaaatagccattctggtggtgtgagatggtactcattgtggttttgatttgcgtttctctaatgatcggtgatagtgagcatttttttcatatgtttgttggtggcatgtgtgtcttctttagaaaagtgtctgttcatatcttttgtccactttttaatgcggttgttagtattttgttcttataaatttgtttcagttccttataggtgctggatattagacctttgtcagatgcatagtttgcatatattttctcccattctgcaggttgtctgttcactctgtttgatggtttattttgctgtgcagaagcccttaagtttaattagatgggatcataattctaaaagaatatttttgtcttaaggagtaaaaagaacaaaataatcttcagtaaccaatttgtccatgaatagtggggagagattatatatgtggtactagatccaatgtcattgagtactgtgaggatgaagaattctcctctaaatgttttaatgctgcagaatttatgtaggatctggtcttaatgcacaagctgcttacaatttagcaaagaagcaataccagcatcctagttagaatcataacttttttttttttttgagatggagtctcactctattggccaggctagagtgcagtggcgcgaactccactcattgcaaacctttgcctcctgggttcaagcgattctcctgcccctcagactctcgagtagctgcgattacaggcacccgccaccacggccagctaatttttgaatttttggtagagaacggggtttcaccacatgggccaggctggtcttgaactcctgacctcaagtgatccatctgccctggcctcccaaagtgctgggattacaggtatgagccatgacgcctgacagaatcataacttttttggtttatgtaaagatcattatcttaaaaaccaaggttatgtaatctctgatttgagactgctgtctttatcaagtttggcaaaggtaaaagtattccttatcaagagtaattgctgatgttgaaaacagtctcaagattttccttctgggtatgctgctttttgtttagaagtggatatacttggttaatttccaagccaggcactgtactttctgaacgtgaatggcacaacaatcctgagttcttattttcgatgtaccagcagcaattaatgccatagaagagtcttgtaatgagaactgttatcacctttacacccctggacaagtcttttgaggaatcctgcagacgaaaatattggaactgggggagctttggcatagtacattccaggtaaccattgaatgtgtgagctttcttgaagagtatttttagaaacagaaaagcctgtcagcattgggccagttttatatttggtgtttctaaggaaacagcaaatgtctaagaggacagactttcatggtgatttctttatcaagttgacccctgtgtgggtggataatggagcccagtttgaatttgaccaaaaaaaatctgtgccatttccactgtttaaaataggtaaaagcatttggtttgagaattttggtcagtaatttatttcccctctctcctcttcccaaattctgttaactcttattgtctgctgtgaacttggaagcatttatgatttttgattaaaaagaattaagcatcaggatttgtgagacaaattaaaactcaaccagaattggaagagacccaagacgtgacaagtaagtactgtgtgggtccctgaattggattctggaacagaaaagacattggtggaaraactggtgaatcttgaataaagtctgtaattggattagcattgtgccagtgttactttcgtagttttgacaattgtgctatggtgatgtaagatgctaacattgtggggaaactggacgaaggatagatgtcaactctattatttttgcaactcttctataagtatacagttttcggccaggtgtggtggctcacacctgtaatcccagcactttgggaggccgaggcaggcagatcacctgaggtcaggagttcaaggccagcctggtgaacatggtgaaaccccgtctctactaaaaacacaaaaattagccaggcacggtggcgggtgcctataatcccatctactcaggaggctgaggctggagaatcgcttgaacccgggaggtggaggttgcagtcagcagagatcgcaccattgcactccagcctgggtgacgagagtgaaactctgtctcaaaaaagaaaaaagtatactattttctcaaacaaatcttaaaatcaactagaagtatctgagagaataggaatgaaatgctaaactcttgtttttctgttgaatactttagtaaatgtttggatctttaattggaaacatacatgattttgaagggaggatggtcagaagaaaaaaggatcagtatcttcatatgtttgttgtgatgagtagatgggaaaacccttactctcggggcatcaaagaacattccctatgctcacaaacagcaccaagggtttgtttgcataatgtctgatctagttgcttaagttgaaaaagtaggtaacaaagtagactgctctgtttttgctcagtttagtcatgtgagcttctgtgtcgttatccagaaagttgcatctaagtgtttgttctactacttatagctgagtcactcaacagacagcaaaagcttactcagaaatgctaatcagcaaccctttcaagagggacaatgcttagacagaacaaaaggagaggtctgaccattgtggggatgtagggatgtttaacaaagaaatttcctgaaatccatgaggttgggtttggtcattcaaatgctgacccattcttttctcttaaatgaaagccagctcttcaaaactgaaatcataggtttttagcctttactattttatattagatgtcattaaaaatgatttggggttgagtttgggatgatgttagtcactctgatggattattctatgtatcttcagtctacgtataacatataccatacgaaaggcttttggagagtgttggcaggtttcagcttagaaaagacttcagcttgagagtggacctaactctcatgtaagttctctgtctatatcagtggtctccaaaactttttcattggatgtcccatttgtaacactttttttttttctttttggagtcttgctgtgtcaccaggctggagggcagtggcgtgatcttggctcactgcaacctccgcctcctgggttcaagtgattcccctgcctcagcctcccaagtagctgggactacaggcacgtgccaccatgcctggctaattttttgtattttagtagagacggggtttcaccattttggccaggatggtatcgatctcctgaccccatgatctgccctcctcggcctcccaaagtactgggattacaggcatgagccaccacacccagcccataaaattctttagcatgaacctttgatatgtatatttaaaacattggtatacatgtgctatcattgttagttattatctgaagacccagtacatatttaccaagattctccgttaaggattatggatgtaagtacatattgttcacagtcttctctattattttgaatgcttttggccgatttgtcagatttgattaaattaccctaatgtttaacctagtaaaatggttttaaagagcttttactaggaatgtaagtgtcaattctgctgctttttattttcttgtaattgcattattaataagtataatttccaatttgtggttttgttgtatgattcttttatttttatttttatttttattgatcattcttgggtgtttctcacggagggggatttggcagggtcataggacaatagtggagggaaggtcagcagataaacaagtgaacaaaggtctctggttttcctaggcagaggaccctgaggccttccgcagtgtttgtgtccctgggtacttgagattagggagtggtgatgactcttaaggagcatgctgccttcargcatctgtttaacaaagcayatcttgcactgcccttaatccatttaaccctgagtggacacagcacatgtttcagagagcacagggttggggggtaaggtcacagatcaacaggatcccaaggcagaagaatttttcttagtacagaacaaaatgaaaagtctcccatgtctacttctttccacacagacacggcaaccatccgatttctcaatcttttccccacctttccccgctttctattccacaaaaccaccattgtcatcatggcccgttctcaatgagctgttgggcacacctcccggacggggtggtggccaggcagaggggctcctcacttcccagtaggggcggctgggcagaggcgcccctcacctcccggacggggcggctggccgggcggggggctgaccccccacctccctcccggatggggcagctggccgggtggggggctgacccccccacctccctcccggacggagtggctggccgggcagaggggctcctcacttcccagtaggggcggctgggcagaggcgccccttacctcccggacggggcggctggccgggcggggggctgacccccacctccctcccggacggggcggctgccgggcggagacgctcctcacttcccagactgggtggctgccgggcggaggggctcctcacttctcagacggggcggttgccaggcggagagtctcctcccttctcagatggggcggctgggcagagacgctcctcacctcccagacggggtcgcggccgggcagaggcgctcctcacatcccagacggggcggcggggcaaaggcgctccccacatctcagacgatgggcggccgggcagagacgctcctcccttcctagatgggatggcggccgggaagaggcgctcctcacttcctagatgggatggcggccgggcagagatgctcctcactttccagactgggcagccaggcagaggggctcctcacatcccagacgatgggtggccaggcagagacgctcctcacttcctagacggggtggcggccgggcagaggctgcactctgggcactttgggaggccaaggcaggtggctgggaggtggaggttgtagcgagccgagatcacgccactgcactccagcctgggcaccattgagcactgagtgaaccagacaccgtctgcaatcctggcacctccggaggccgaggctggtggatcactcgcggttaggagctggagaccagcccgggcaacacagcgaaaccccgtctccaccaaaaaaatatgaaaaccagtcaggcgtggcagcgcgcgcctgcaatcacaggcactaggcaggctgaggcaggagaatcaggcagggaggtttcagtgagccgagatggcagcagtacagtccagcttcggctcggcatcagagggagaccgtggaaagagagggagagggagaccgtggggagagggagagggagagggacagggagaggaacagggacagggacagggacagggacaggagtactggtcttcatagttacttcccaatattgtttttgcccacattttctgatgggacatgcagactgcatttcccagtttctcttgtaactagcgactgtgtggccaacttcaggccagtggtctctcagaagagtcacatggcagttctaggagccctcctgagactcaacgcccatgcatccttcattcctcctccatcctgagccaggaatgtggatgcctgtatgattcttaaaccatttgttcttttgggagggttaatttagtttaaattggataaagtgatggatgactccacctagctgggacctggaaattgaaatgtgtagtagtaaggagagagacagacagggagggtaccactgttatccctgtattagctcaggctgccatagcaaaatacatagactgcgggggcgtaagcaggtgttcgtcttctcatagttctagaggctggaagtccaagatcagggtgccagcatgatctggttctggtgcgggctctctcctggcttgcagatagctgctttcttgccatgtcctcccagaacagagagagtgagcaagagcaagagcgagagtgarggagagacagagtgagagctctctgtctctaataagggcactaatcccatcttgagggtcccaccctcatgacctcatctaatcctaattatctccaaaagggcccaacagtagcatcccatcacattgggggttagggcttcaacatatgaattttaggaaggacacagttcagtccatagcaccacccacccttcccattaaagaggttcctctccagccacattacatagaattacgttgggacaccagtgtcagtgcatttaataaatgttcctgaagcttattttttggaggtatatataaatataagctctgatagcatcttcccaaaccccacttggaagccacctgctttagattcagttgattagggcccgccttagaggaaaaccatctggtcagacccagtctgacttttactttaggccccaggaactctgagactgatcataagtcttgttccttaagtaccattcataatcctacatttggtatatgtgaggtaagcattgcagtccctctctgtcaagaattgggggtgcgtggttagtggcagcactgcaggggtgggaaagtagaaggacggggcaaaactgctagtagagaccaatgagctgggcctgaaagatgagtacgagtcagcctggaaacttgggtggggcttggtggggagggcaggccagacatggggaaccccatgtgcagaggtgcagaagagtgtaacggccaggtgtatgtctttccagaaaagatgtggaagaagaaggtgatgtggtttggctctgggtccctacccaaatctcatcttgaattgtagctcccataattcccatatgttgtgggagggacctggtgggaaatgattgaatcatgggggcggtttcccccatactattctcgtggtagtgaataaatcttatgagagctgatggttttatcaggggtttccacttttgcatcttcctcattctctctttgcctgctgccgtccatgtaagacgggacttgctcctccttgccttccaccatgattgtgaggcttccccagccatgtggaactgtaattccaattaaacctctttcttttgtaaattgcccagtctggggcatgtcttcatcagcagcgtgaaaacggactaatacagaagggatgatggacaaagtgctgtgaaaggccaggctactggagacgggctgctatagccaagaaaagcttttatgagccaggtgacaaagtgatagatagtacttgggtttgatgtgcacagccacctgctctgcatttagaataagcatatgaggctgctgtcattgcccaggaagaggtgcagggctatactgctgcaggagaagagaagcacttgggatggttagcagtggggctgtaagtggacagagcactaggcaagtgtgatttccaggttccagtgttagtgacggagaaggtgttgatgctgtttcttgtgtttctgagttttgttttgaactattttgaactgtggaatggggcaaggtgattgacctcagaatagcagaaagcccctttcaccccagtatgagaccaccccaggggagcagagatacacatgtagggggtgatctctgttggttgcgtcatgaaggagctccttcctccagcaaggtaggggcagcactggcgctcttggagagacaccaaacttttgacagatctttccctacctctagatctgtttggtttcaagatactccaattaataaactggaagtagaataatgtcatagcttacagcatgatgagaattaaatgagaacatctgggcacagtggctcatgcctgtaatcccagcactttgggaggccaaggcaggaagattgtttgaggctaggagtttgacaccagcctgggcaacatagtgagatcctatgtctacaagaaaaaaataattagatgagaatgtacctgtttaaggctgcactgtgtaagagctcacagactcacacagagttgctcattgacaccagttatctggttattacgaatgttgttcttctttgccactcattttgctctctaattctttgataaccaaaacaatcaattataagctgtaactcggggaaaagggaagtggacttgcgtattactctgcccaagagttacacattgccaagggaagaaatatgcaggctgaagaatcacaaggtaggttttgggcattagggtcttttgtacatatatgttttctagcctgtaactgctaggaacaagcaggctggactgcgagcataagatgagtctaaaatgtgtttgagagtgcatgtgtggattggtgttaaatcaagaaactggcttctccttttggtgtcgtgaaagaacacagttgcatataaattcacattaaattcactgacacctcctcctgcaaacaaacaccaaaattctttatgatagaatggttaaaaccttaaacttggtccacatgtatgactagagttgtattgaattgtgactataaagtctgcatctgtatctttctaccctccctccttttttcccttccatcttgtttgggaccatcaactttttggctctgtggggctctgctttgaatatctctgaggaacttggcactgtgcataatatggaaactgaatacttaactgtagattcaatgatataaaggaatattatttatttatttatttattttaaaytttttctttttttgagacagagtctcgctgttgcccaggctggagtgcagtggcgtgatcttggcttactgcaacatcccactcccggattcaggtgattctcctgcctcagcttcctgtgcagctgggactacaggcgttcaccagcaggcccggctaatttttttgtatttttagtagagatggaatttcactatgttggccaggctagcctcgaactcctgacctcaagtgatccgcctgcctcagcctcccaaattgttgggattacaggcgtgagcgaccgcaaccggcaggaatattctttaaattattgaataaaaaatatgacacttttgtttttattccagtgaaaggtggaagttttgaaagtattgctgtctagcatatgaaacacgttaccaagctctgacagtttaaaaatagagctctttattttaaaacagtaaggccatttgctgaatagtatcacaattatttctctagtactcagctttgttaaaactgcctcatagtcattttttaatgttacctttacaaattagaattcattgaccattctaacagtgatgtaccagagtaaactgaataatttcacataatgaygatgccgtggtaaggcagaaacatgaacttctctcagtatcactgttttgactgtcagctgtcatgcagtttcaacactacacctatttcaacaaagttttgttcactgtataagattagacatagcagaggaagtaattttaagtacaggatagtgcgtgtgtgtgtgtatgttggggaggtaccaccattattctctgtacatgggtcagtcatatttgtaagccaaacaatgtggacattggaaagtcaaaaaactccaagacagaaaacaacataagggaagatttcttttcatacttttaccaacctccttccactgctttatctaaatgtgtacacacataggcacatgccatatcttttaacgcttataattcactgggcctacacatgaacatctgtcttcctgggggacacaccatttcacctggaaaaccattctagtccacagtgagctggtgttgaaagttcttcctctgcatcgaggcttcctgtgagtcccagatgatggttctagactgtggccgacgcataagtggcagtcgacccataacaactgcaaacatgtttaattactataacaaaacgttaattctcacattatatttgagttagtattggactgtcaggaatttagtagttctcttaatgtttagtttgatagtcacagacccatttatagagatgactcttcaggactgccccagggagcatatgtgacctcttcatatgttgttgggtgttctatcacattgttgggaaagagtgagttttcttatttcaccaattgacaacattgctcctatactcaacaaaaatttaaatgagggttggaaaagctttcaattttttgcccctaaaattgtacccccaaactccagtactccatattagtatgtacgaactctgaggaaatgctgagaaagctggagactatctgttacttgctgacagtcttttcctgtgtctagttcactttctgaggtccttctgtgtctagttttatggtccctttgctagtattttgtatggatggttgatgggtgcaatgtgcaatgcagtattccaaatattttttttatcatgtgtcatgcacttaagtagacaagaagctattttcaattcagtgctggtgtttgccatagagttaaatacgttttttatagaaatcaacctgtgatatttataaatattttagaagagtagattataagaaagttaactgacttggattttaaaccatagtactttttatataaatagtttaaagatattgatttagcattcttcacagccaagtatgttttcttatatatcctgaagataaatttattatgtgccatttttttgaactattgtgttaagggacatgatgaattttgatattttgagatacaaccattagaaaaaaatgaagagagtctgaatatgtagccctttaaaagaaacttatgtgctgcttactgtttgaaatacattgaatattttaaaattaggacagcatcaacatggctccacatatacccgtggaacaattgttacaacaaatagaggctgggcatggtagctcacacctgtaatcccagcactttgggaggctgaggcaggtgcttcgcctgagctcaggagtttgagaccagcgtggggcaacatggtgaaaccccatctctatcaaaagtacaaaaaattagctgagcatggtgatgcacgcctgtggtcccagctacttgggaagctgaggtggaggatcgcttgagcctggggggtggaggttaaagtgagctgagattgcaccactgcactccagcctgggtgacggaggaaaaccctgtctcaattaaaaatattaatagtaataatataacaaatagagctgtggttgagttatgcagaagtgatgagctaagatgtattatctgcttagtaagacttgaaagacagtctctaactaaaaaggtgaattgtttgtaaaacctttttgccaaggtttatgttctccataaaattctcaaatacaattttgcggagtctttgcagaatgatgtcagtgctagtatttacttttgctttccagttctcgttcgtggcatttttgtattccacaggctgtcatgtacctctcatttcctgttttgtgcatataaaggtaacttggttggcgaatcgatgatatatagatcaggtattttatttttagccttccattgcataagaaaaatctaggttcatttcgtctggggcaggctctgatttctgtttgtagccagcactcctggtgattttgctgaaggcggtcctcatttgttgtcaccctcatgcaacaatgtatagttcataggaattttttgaagattaaatgagttaatatgcatgaggcactttaaacagcacctcactgagtgctttatatattttgctgttgctgtagttgcattttagatagtgtgtttgacaacaactctcccatcaattttggaatgtaccacttgggttttacaaaaaaaaccaggtattgtcttgtattagtagagattaaaaggtaaggtgcatatcgaataggatgaatgtgtttcaggaacaaactagaaatgttttctttttgcactaacctgattttgaagattaattctagtttgcctgaggttatcatggagaactttaaattattaaacatgtaatggaaaaaacatgcagtgtaatctttctctctttctttctttttttttttgtaatagcctgagtgggagggtaattagctatagtataaggaacaaaacataacaagtacatgagtcttggctctaccagggaccaagtgaatgaccttaggtcaagtccatgatttcgctgagtctgactttccttgtttgtttgatggaaacacacttccctagaaagcatgtcgggaagctaaatgagatttcagatgcaaaaatgcctaggacacagtacagtggccgtggatatcgtatatcccttcctgtttgacaggttgggtaggcttgttgctcttttttctttcttttttctctttattgtggtaaaatacacataacatgaaatttatcttctttattatatttaagtatacgattcagtagtgttaaggatagtcacactggtgtgcagccaatctccagaaagcttttcatcttgcaaaactgatactctgtccctgttaaacaactccctgttcttcctccccgtgcccctggcagtcaccgttctactttctgtccctgtgtatttgacttctccaggtccctcatgtaatagtcttattgctcgttgatatagtaattacaactttaccattacaaggagtcttgcctgggcatggtggctcatgcctgtaatcccagcactttgggaggctgaggtgggaggattgcttgagctcaggagtttgagaccagggcaacatggcaaaaccctttctttatgaaaaatacaaaaattagccaggtgtggtggcatgcgcctgtagtcccaactacttgggaggtggaggttgcagtgagccaaaatcatgccactgcactccagcctgggcatcagagccatacctgtctcaagaagaaaaaaaccaaaagcagtcttagtactctatcacacggtcatttttggtggtgtttttgtcctttttctatgctttatctcatgtcttgctgtgtaccacagtaagcaccactttttaaaaaataggtataaatgattaaaggaaattcagatgactcccccaccccccaccccccatttttgctgtctggttgactttaccatttgcatctttccctgacaaccctggctaggttgggatacaccaggaccagggtacagagtcatagtgcccaggaggacgcttgatggggtgggtatagattttaaaccagatctgcttttttgttgagtggattgttttcatggcactggcgctggttcagtctctcgtgtctccacctgtgacagagtttccctttcaccttcccgattgctggtggttatcgttctaaaacagccaaggcactgtgattctccctgttgagggaccatcgctgcttctcttttgtctccagtaagatacacaaggccactctcgttctattcccggcttaccgcaccatctccccaggctcctcttcctgtgtctggctgcagcctttaatcacggcactttccctggaacactgtctcctaatctactcaagttcgtcctcctggagggccctgtttttcaggctcaggttgcatctctgtaagcaagcattttcttcctcgtcctgcatctccaccgtttgcaggcggaggcagcccctctgtgccgcagcgtttctcagactcttttgctctggaacttagcatgctgcaccacatctatttttatccatctctgactctcctgctctgctgtgtcatccttgatgacaaagtctgtctgtttcccctcgcatcctccccagcacgacgcacagttcctgccaatgggaagtggaaaacctttgctgaaggactgcgctctgcaagcgaaggtcagaattgaacagaaaatgagaattggcttaatgtgttgttctcagatatcccttcacacttaattgcttattgaacaaagtagaacccccatggtgatgtgcagttacttatgcctcggaaattgatgtattgtgtagtgttgatgttgtactttcatatataaactactcctaaaagggggctgccgaggtaaatgcttttaatgccaatttcttcagacttggcagatggatatctaccctcaaatggaggtacatttgggatttaatgtgacagctggcatccttagtcatttatgttggtcaaggtttaaaacttgtgtgttcaacaaatttttttatggtagccggtgtatactgtcttggtgcttggtgttgcagcgcagtggtggaatatcgagggctctgcctgcaaggttactccttagcttttcgggtatatttgagtaagggaagtgtagtagagaacacacatgttgaatgatccatttccatggctaagttcgtggcccctttttcctcctgctctctggctcatgcccttagcctcttaaagaagwgttacggragagaaactccgagcagcctcctggcctgtttttcctgagccgtaaggtgggtgcttcactcttcacagggctagccccgtatagctttaattcccacagcactttccttagaagctctcctcgcggagcacagcacggacgggccaggagccggggctcccatgcctgaagctgctgtcctccaggagcctcagatgtgaggcagagccagtcccagctggcatctccatggcacagatgaggaaacacaccagaaagagttacataacttgcctgagttcctacagtcggtgagcatcacaggctgtgtgggatgcattagggagtggtctgcctgargtgcaggcaataagaaggtccacacaataaaacccactaaaagtccatctgcttttaatcatctccgtgtaccagcagtaacattctcctccctgcaaaagccttcttttggactaaattytaaataattgccgtgactactaattagtttttttgtttttttttktttgtttgtttgtttgttttttgttttttgttttttttggagaggaggtcttactctgtgggccaggctggagtgcagtggtacagtcatacttcattacagcctcaaattctcccacctcaacctcgtaagtagctgggaatataggcacacgtcaccatgcgtgactaattaaagaaaaaatttagagggtcttgatgtgttgctgtgttgcccaggctggtctcaaactcctgcccctaagtgatcctcccacctcagcctcccaagttgctgggattacagtcacaagcctggctacttttaaagatttcacatatgtatatagcagatatagtgtgtatatatataaaatatacacacatatattcttcaatgtagcacatatttattttatttactttttctttttttttgaagtgctgttggacttgatttatttcttttaagtgacgattatattctacgtggaaattcattaggagcattcccagttaaccctctgtctccagtgcccacaaccaactgaacagtacatgtgcattttgagagcaaggtcctaagagttaggacaggtctggagttccctttggacacagtgctctccaggagccccatggtgctacatattctggagttagttagtttatgtacttatttatgattattttgtagagatggggtcttgctatgttgcccaggctggtcttgaactcctggcctcaagtgatccttccagcagagactctcaaagtgccgggattgcaagtgtgagtcaccatgcccgacgcctgagtttacatagtagctatgaaatagtgacagtacrgcgtttataaacactaagaaagtagaacttgagttacttcgattctgtcattttatgtgaccacgtggggttttttacatctaacatttaagatagcaaaacagagtatgaactgcagggtatgatattttgtttggtaagctcacattttagtttggtaaatttttcctagattcttacaattgaaattcattaataattattcattgttttaaaattgaagaccaagtcaagaaaagaaaatatgacattagtggtgtgatttagtaggtgtttatacctttgatagagcattggttttgttaaatttcacttattagttacttgccaattaatgacataaatattgtatcagtctgtaaccaaaggatcaaaattcaagttgttacatagatataaaaaccattgaataaatacttgtgctttattctcttttttttggacgataaaaatttttattattttatttactggcatgattagatgcagttttattttttttgtttttgrgacggagtctcactctgttgtccaggctggagtgccatgttgtgatttcggctcactgcaacctttgcctcctgggttcaagcaattctcctgcctcagcctcccaagtaactgggtttaccggcacctgccaccatgcccagctaatttttgtatttttgtagagatggggtttcaccatgttggccaggctgktcttgaactcctgacttcaggtgatccacccacctcagcctcccagagtgctgggattacaggcatgagtcaccatgcctggcctagatgcaagtttaataaagactatttttgctgtttgtttcttttttggtcaattttatgttctttatagttatcactgaaagaaattttgccacatagagaagggggctgcttacaaaaaaaattctcttggtgtgaaacacactggggacatcascaccctcagccatcatcacaagatgcccagccttgacccagtctggaccctcctactgtttctaacctttgagtgcagctcctcccaccccgtgtagttgtgtttctgtagatgtagcactgcgtcttakaagccctcagtttcctactgtgtgaagggaagggctttaatgagagttttcaacgtttccctcaattctgaaatcctgtggttgaatggaccctaagctgtgctctgatcgtggtggggaaagtgtttccattacctgttggcttgttattacagtgaccgcagcccctgctgtttggagtgtctgaggcaggtggggcccagtttcctttggcaraagaagaaactggcaagacatggaggtggtccaaggatgtggggtccgttccctgttgctttagtgmctgcacgaggagcgagggacttattccaggtttccctttgtgcttggaaggaagatgtattctccataggctccaaaattcatttgtttagacattttaattacattttttgaatctgtatttttagcctgtccaattagtcagtttgataatagcatcaatctcctgttacagctttcttggtccatttgcttgtgaattttgttttacatgttttcatgtaaaacataatttacattttgagtaaaatttaattttatgtaaaataaagtgtaccacactggtggtaatgtggctgtaatttttactctggccttatgctcattaattatktctgtcttaaacttggtggtgatgttactattttagcctttcctttctttttgctcatgtttgtgttatatgactactcataactttgtttttaattttttgaagttacataagaaaatccccacagagatcctttttcatttgatgggggcgcttaaaccatttgttggtgtaactttttggtagggcattttttgttttatgctttttatttttgcttccttggtgttttctcaactctttggcttagttgagaaagctcactgtgggattactaaacatatgcgggaaccggaagtgaagacatcagttgtcatcacgttgatcttgcagagtctgtggacattcaggtaggtgtatccagagaagttaaatatgctggtctagacagagcttgtggtagacatccaagctgggggtgaatttgataaccatttgatgagtacactggtgctaatttcagccatacatggaaaagatggttcagtgcattgaataaagaccaaaggcagaaaacctcagggatgatctctgtttcagggtcaggaaaaggagtgtggaggggaggtggcacaggagccctgggaggtgtaggggctaaccaggaaaggagggctgccagtaggtgagctcaggtgcaatgtttattgatttgggcaagaagaagagagacttctttatcaatagggtggaaagagctttgggagtcggtttgtgtgtgtgggtgtcaaggtgaatcacgtccactctaaagcttcagtttactccatgaaatggggaggaggcagagtgctcaaagtgaaggggctggggtagggcggagagtttgaggagagagaacggttggaacagccaggrtggtgcatggggcagggagctgtccaaggtctgtggcaccaagaacctaggtgacatcagaaaacacatgtgggtcaatgtctgttaagggacccacttagaattgctgtgttgaataatgtacttccgtttcttaatcctttggtgattaaaaaaattacaaggaaaagatcagtctgggtctgctgcatttaattgtgtgtatagtagatgtaatctccaaggtgggcggtgggggtagttggagggatcgctttgacctttctgccactgcagagactcctgctgccaatattgaaacaatcataaatatcttattaggtttcctgggaacaaagccatgctgcaaagggtatgaaagcctgtttggcagggatgaaggtaggaaggattatatgaaaagagaggagactgtggggacacagcccgcttttctgtttgtttgcctgcttgtttgtttttatgaggggcaggctctgtggtatctgcatctatattttagaagcgcgttgctgttgttctgatattcacagggccttcatctgtgtttaaaaaactgaaaacataaggataaaaactgatttgaagcttctgacatttttataattgttttcaaacacagttaacagcatcttcccttttactgttttggacaccttctgtccgaatccttctagctgtgagcgaattcgactttgtaatgatttcttttttcacagtgatgtcagcaaaatcacacagacctaggggtccagcccggagctttgcaatgtccttctagttccctagaggccctctgctggctagcagcccttgggtgacagcttgctttcttttcacatctcttgcctctcaaatctgtttaagattctgcttcttaaactgtctgaattaggtgtctccgcagatttccctgtggccagctacctcccaaaccaaacacctatgtaagcccaccttggttgttgttcctgagcacgttgaggacatttgggcaaacacaacaagaacaggaagtcgacaacgttccagttataacctcctgctgctgcccttccagggtggggctgggcttcttccaacccactttaccacctgtctttgttcaggaaaggccagagtgtgccattgccttggaaatggcctgtgtaagaggctgagaaggggtttgaatgagtccaagaagcagcaggattggatctggaagggttgatgaggactgggtgaggtgttgtggggttgtgagtcttgtgtgggcgagagctggaaagcacagatggaggtggaaggacccttccttaccttttctctgctctctcttcctacctatttggttttttggttgtatttttgctttttaagagacagagtcttgctctgttacccaggctggagtgcagtggcatgatcgtagctcattgcaggctccaactcctggcttcaagccctcctcctgcttcagcctcccaagaagctgggaccacaggcatgcaccatgcatgccttgcttttttttttttttttttttttaagagatggggtctcactatgttgctcagtctggtctcgaactcctgacttcaggagatcctcttgccttggcctctgaaagtgctgggattacagacatgagccactgctctagacccctgtctgtttttatagcttaaagtcacttttatacttcccatggctgtgttctgacagtttcatactgtgtataccttgatctgagctgtacacctcaagctgcttggttcgaatatatttcatctttctggattaaaaccctttgaacaaagagaacaggattcttgctcatctttatacaggcagcactaactgagcagtttatccaccagaactctcatcaccagggctcatgcacattcaggctgtatgctccaacactagatgttccccgtgaaacacccgagggtaacctggctgtattgtctgacttctttgaaaggtgctgtcctgtggaaggagtgagggtgtgggctttctttgcttgactgttttaccaagtttaattgtaggaagccattcctacaattgatgactttatgtaattatgtaattaaaatgaatcattgttgaagaggagactgagtgggagaaaaaggattgggagcatcttggcacatggaagcagctctggggaaactgagagtctcacacccctggctcatgtgccacctccagcttggatgttagaccacctgatcattttcctattgcgtctggcttattttgaacccctgcatgaaatctacattgaagaggagagaatactttttttcttttcacattatagttaattgctgaaagaaacagtttaggaaatctgaaaaaaataaatagtgacttaatctaaatggacctcaatttcctcactggcaaaaaggagtggatatttgaaggctaaataaatgatgcaaaaaaacaaaatacatgtgaacaaacacatgatgagcatagtgcccagaacacttcgggttttcaggaaatgttgttttccttatcatcagtaaattggaaggtaacagagcttgatgattatcaggtgctctgatctctaatagcccaggattttaaaaaaagtcctatttacttagaggaacaatttgttctcttagagaggcacaggtggagttgacctttgtatgcaggtcacattttggattaatgcattgctgtgcttttgtactagagtatttaatattcttattaaaatatcaggaggaaatgggaaatctcaatattataatctgcttgtgtgggttgatgtgttaattcagccctttggatgtaaagctgctctgggcacggcttatgtttggctggcacagtgctgaagtgttgagaccatcgtgctaatgagaccaaggtgcagggtctgactccctcggcaggctgcggggccctcagaggaccagtcacctcctgcaggtgtgtgttcttcatgtgagcaggtggtggggtgtccacaatatgtgaagtatcatgatcaacacaggttaatcacctgatttgagaaattctttgaagtttgaggtgggccattagtagtatcaaaaacagaaggaatattatgtgtgattaaagtcgtgaaaggagctattatttctgtgaaatttgtaggcttcatattttactctaacacattttagactgagttaaacacagagtagtttttaggtttaatttaaccattcaaaagaatggttagttttaggactgattgcctattaaattactgacgattaagggaaatcaaaagtttaatagctgaatgaaaattgagtttgcactatctaatttggtttagataatactttttcagatttcaggggaaaataaaggctgttttaatgtatgaatgcacatgaatgtttatttgattctgcagtgttagtttatttttccattaatgggagaatttgaaggtgtgttaagccaacctaagcaaatatctatcatttagaccactgctttttcctagtctatctcccctcttgaaaataactatttaaaaataggatttkcagccgggcacggtggctcatgcctgtaatcccagccagcactttgggaggccgaggcaggcggatcatgaggtcaggagatggagaccatctggctaatacggtgaaaccctgtctctactaaaaataaaaaataaaaaaaattagctgggtgtgggggcaggcacctgtagtcccagctactcggggggctgaggcaggagaatggcatgaacctgggaggcagaggttgcagtgagccgagatcgcgccactgcactccagcctgggcaaccgagagagattccgtctcaaataataataataataataataaaagcaagattttcattgtctagtacttgttcattataattgttgcctgtttcacctgatccatatgctgtatacccatacatgtggacacacgtgctccggatatgagttgaaaattttgggcacccaatacggggcaggtgtcatgctcattgttaggatttaatggtcaatagggtgagacttgcagtgctggagagataaacaggtgctcatactatgaatggtgcatatttgtgaggaaaacatcagtatcaaggcagcaaatacagcagcaatatttgtgtgcctgcttggattttcagatagtggattctcactaatagaatttgatatttcacctttaaaatttctcatcatagaaataaatcagtaagctctgccttataaagggactcgagtccttccatgatcacccattctacagaatgcttgtttacatatgcacatctatttctggttatcattaattctccaatgatgctgcagattcagtctctcagacatggagtctacctttgtcttgttactgatgatgtgcttaacaggtaagctgatctttttggtcatagaattggccaatgtggataatcctgttaataccctacctcggccaagctcagaggatgatattagatagcatgaatctagtctgaaaagtttttctaacaccctgcagatgtgttcaagtcaaaattgaaggtaggggtttaaataatattaggaagagctaacatttgttgagaacatactatgtccccgatgccgttataaacattttatttctgttaactcaatgtttgacttccattttgcagatgatgaaagtgaggcatggactgattaaataacaagcctggggctcatggcagacccaggagtgcagtggcagagctcatgcttttagccactgtgcttcatcttcggtggcaggatactgagtcctgtacccagagactgtttatatacagagtagtgctaacgtgttgttctaatcagtacataggaggaaatggacacttcggttaaggaaagtaaaactgagattccttatatttgacaataaaatagaatctccatgtggcaggggataactgcccccaagatccattctctatcctgcgccaattgttgccctatattctggcctaattacctgttagtactccctcaggccaactatgggcccagaccctagtgtatagtaaccctcactaaattgagtgcagcatttaaggaagacttggcaaaggtgaatgtgttactcacagaaacaaacctagagggagatgagtcttgagtgtgacttgcaggtagagctatatataagaccctacttcacaaataatgcctagttctgaatctgtatccggtggaatgtttcagaacatgagatttggagccagacgcacttggccctgataacacagacaccttggtgaaccacgtgttgtcatgtttggggggttgaatcttggtttagctattgcctagctatgtgagcctgggccagtcaacaccttcttcgagagcgtttccacctctgtaagttggtgctcatctagcagatttgtttaaaggtcaattgcctgacatatattaattaccaggttggatgccaataatttcttgttggggacatcatattctattcattcaggaatggtgtggctattatctcaaactctgccaaacacacgtactggttctcctctccagtgtactattttatttaatatttgtggagtacttacctgagctggttcagttaggaaaacagacagtaaacacaagaactagataacttcagattataataagggctgttaaaataaacaggagacataaggaaaagttgggatagggtaggggaagaccaacgggcaactcactgtggaagtgatgattgtgttaaggtgtgagaaacgggaggtagagcagggtgggaggaagataccaggcagagaagacagcaagggcagaggacagctatgctaccctctagtcctagggtagcacagctgaaactccccaaacatgacaaccccatggttcagcaaggcgtgtgtgtcatgggggaagagtagattatttcctcataaatctttcattttatagttatcaaagtgccctccataaatgtattgcctgctcccttcttatcttgaagtatgrtacagatcactaagattcctgtttccctggacttggaaggaaggcacaatagggtgagcgaggtgccacacaagttattagaaactgctggggagagagggctcttgtttgccctagagaattcaagggaactcaattatgttattgtagagcttttctgaaggtgtaattgaaatattcaggtgtaacatcataggatatgcaggtaagatttgtctcattaaaataacacctttaaacttactaaaggttttaaatgtcttagtcaattaaaacaatgcattagtgttacactgcagacagggattatctccataatattgtgtggagtgctcatacagtgttagagaaatgaactaaagtgaaatgaaattaaagcagaatataaagaccatgagagtaataacagtggtaacttgaggcccaatatataattttttttttgagacagggtctcactctgttgcccagtctggagtgcagtggtgcgatcttggcttaccscaacctccacggctcaggtgatcctcccacctcagcctcctgagtagctgggaccacaggcatgcatcaccacactcgactaattttttttgtcctttttgtagaggtggggttttgccacattgcaccagctgttctcctggactcaagtgatccacctgccctagcctctcaaagtgctgggattacaggcgtgagccacctggcaccratatatataattttaagttaaaacttttttgtgtatttttacatttttgaggcatgtaaatatattacctgtgcatttttttatttgtacgccttatgtattttttcacttttgaaaaactaaacttgaatgcctatcttcttcaacccatgtttgtatttctttgacatacttgactcctactcgatgatgtgatactattttagaagtatggttgggcagaaagggggaggcatgaaagagatgcagaagtcatgtgtttaaaaatgtacctgggattcgttttaatcgagtatggtaagacctgcagacacagaaaggagcatcatcaagaagtttgtactcacagttccctagaaacaggaggctggcacaccacccagggccacacatagaagctccaggtggcttaggaagcgtggacagtggccttccctctggtttccatgagaagggcaaggcgggatgagcaggtttagaattggctgatakggataatttcagtgagctctggacataagggctgctctggttgtctggcatctggctctggaatgatcagggcaggcttgatgagtgagagtttcctaagggaggcagctgggaggcacagcacagactggattgtttggtttgcatgtgaaagacatattccctggcaagttgtttgctatttctaggaattagccctagaaggggcaatcccctcccagggtcagtgaagccccaggggccagagcgttagggtacagaaaataagaaaacatagttattacactataatatgttatgggaagtcttctgttatttataatcaaatggagacaagacacacatccatggttaacttgtaatggaaggtagcataaagctcaatgctgaagggcgaggtaattttcccagacttcagggaagggagcgtttgtcctctgggactctgaggagatgtcttagtggatggtagaacagtccagattttccagaaaggagtaggactagaagaaaggagggtgagttcaggacacagaaagacatgcgtgtctgaagcagaggtttgcactggagggggagcaaccattggaaagacatgcgtggaagcaaatgttgaaccctttaattacaggctggggagctcaagaaaggcattgtgaatttattaacaatgcaagttcagatcccataccgtggcttcacttcctaactctgttagttagaaagcaaccctctgaagtaatgtcaagtgcctcaaaaataaattctcaaatgctggctatgatttggatcacggggtgtttttaaacatgctgtgtggcatgtcagacagcagtcatgtgtcattgtggatagattcaggcaattaggaggtgtgatgtggtgaggatttccaataagccatgatggcactggcaatgaaaaaggagaaataaacgggagctatttggctacatagtttaattcagataaatcctcattgagcctcattataacctcatcatcatgtcattgggaaaatgaatttactgtcaagtattgaagcttagaatgctgccartgggcgtgtgttcgtttttctgtggagggtgtcccttattgtcatctaattcccacaggggactagaacccaatgaaagtgattcagaatctggggtagggcagacaggaatgtgaarcatgcctctgtcacttgctttttgrgtgatacagggcaagttaactttttaagctgctamtartaagctacaaatagtaactgctatgataatattcagaagaacagtggtagcgggtggatcctctacctagaacactgacgaattcactcctacttgtcctttggactcagatgtgactgtgtgtgcgtgtcgtatcacctgcttgttatggctgttgtacttggcactgcacgatgtcatggcctgtgtgccatgctctagactcacacacctggaggctggcattgtgtgggttctggtttctagtacaatygtgtgtaggtatagtgggtgtttcatggatgttgttttgctatgcattttaagaggcattgtcaaacctgagtggtggttttgtttattagcttgagaagagaccagttggggaagacttgaccaaacttttgggcattgagagctgtccagccgagagtgctgtcatggaggtgtccaagcgggggcagaatgtccaggactaggcgggtgggatcagtgtgctgcctgggyggaaacgcctctctgatattgggtctagaagagacacgagctgccacctggcttcactcctcacccctcactgtatagttcaaacagggacttacgcaaagttgtgtgatgagttggtgactgctggttgccctgtgcagcatcgagaccgagtccaaggctccttctgtggaaatgggtactggttgagaagaaatcaatgacatacgcaaacagagtagcctattagagagccgaatgaaaagggaagtaaccctactgtttgtgaggttggaaagggtggtcggcatgctgacaagtaatgacrccatgaagcagcgttcatacagaactttccagctgcaggagttgtgctgagatgggaatttgcgttctaggtgagacgcttggcactggtgctacccttgggcatttggaggatccaaatccacaagaactcagcctccatttgcacatggggccaggacaagacctcatgtgctcagtagaaagaaataactccctcttggaaggagtaagatgttggaaaaataattaaacactctgtatattttctcttgtggatctttcagagtttgattaggtgccataactctgatgctgaaaaggatagtcatacagtcaattgtgaagaaaattaaggtcctcgggttaaaaaaacaagccacaggataaagcctgaatccttaatggcaagtttggtgtggcatgtgactctgagcctgttgccggcatttggtaggtagaggcataaagatgtgtgtgcgcacacactgggtgcaagatagcagctcagagccaaacaaggtatgtagatctttaaaaaaaacttctccagtaggatttggagattgtcctttgctaatggttatccaaatgtttacaagcactgtgaagtaacattctatgtctgaactcctcgagctgcaagaggtgattctgtcatgcgcatgggtatgcaatgcactggagagcatgttggaaggaatccagtggtggattgcagtccacttccctctgcctcactccagtggaaagttgctcattggtatttttgtgctccactaccctgctacctcagtccagttttgcattgaataccgtcagtattcagtattgtctatataaatggtatgaggattagatattatattgatagaattatttgtggattggtaattggtataagattttgaagagatagaactgattggtatcctattattttaaaatcctttttcatctaacatctatttcgtatgtttttttcagaagttgtggttagaagattatttattgagaataatttttaaaaatctttcctttcctttttttttttttttttttttaaaaagtatacagtgcggccgggcgcggtggctcacgcctgtaatcccagcactttgggaggccgaggcgggtggatcatgaggtcaggagatcgagaccatcctggctaacaaggtgaaaccccgtctctactaaaaatacaaaaaattagccgggcgtggtggcgggcgcctgtagtcccagctactcgggaggctgaggcaggagaatggcgtgaacccgggaagcggagcttgcagtgagccgagattgcgccactgcagtccgcagtccggcctgggcgacagagcgagactccgtctcaaaaaaaaaaaaaaaaaaaaagtatmcagtgctcagacagagtcactttatagtgtgatgggaaaggtcacatgtaataatctatggtcctcttgctagtaagtgcatgcccctaaaccaggctattgttctcattacttctaaatctttgcttgggtcagtgggcttgaggccatcggacgctattaacttcggtttgtattctcagaattgtatttttttagtgagaatttacagttattgtttagttgttggggaaattactgctcttacccatcttcctctttcttatgtgagatatcttgatagcaatcactttaccaaaaatagtgtatgtgttggttttagaattattggattgaatgggtctgaaattgctttgactccagtctcaagtttgctgatgataaaacttctattagatttgttaagtaggatttgttttttcggcggggcgggggggggtggtggtcacaactcattggaaatgcctgttaatcagtctctctctctctctcaagagatctattgacatatacccttcattcttccagtttcttttctcaaaaccacataaacccccttgatttatttttccttttataagaccattattttctttcttgcttttcatataaccttaatgtctgatattagttttaaagtctgattagtaaaatcattttgtgttttacaactgttatacgtgttaaagtcaccttcacacgtataatttaacctcgtagacttcttaaaacayaacctgatataagtgccttcactttttatcacatcctcagccctttatattttttgttctcagtgtatctgacctagagactctatctctctagagatattatagttccaaatctgtatccagaaagacgtacacatccctgtttcgctccgcaggtctggacattaccaggagagcctgctcacttatttccctttcaaaactgttgccaactggctagcatgttgatggctctacataacttattattattatatacaatatatgctatatcatattctatgataatatcaaatatcattaacaaggtattattaatatccgacatattcttgccttcctttatattctcctatacaggcattctttcttgctctagaattataaattaactgcaacttcacaagacccgcgatagagaaaggaaaatgatggcctccactgcagagtgtagagctagaggtgtggaaaggtcaagcagcttctccaagctgacgctgggattacaaaccagctttctgtgttcccgaccaggctttggttattctgaggaaattggatctaacaagtgtttggttacagcttcctataaaggacagttacgtttagctttgttgaaaatccaattttatatttctcytagataataccgaatgatgagagagctcttccgctctccctgctgaaagttgttgattttctaattgagcagggctcatttgaggggagctgacagatttttagctcctgattctaggtcatttctatggatgctataatgggtacatgctttttttgtcatgcctcagacacaaaccattaatatttctgctctttcctatttatgcaaggtatagaatagtcccagtttgactcccttacaaaggtggattggggccaaatgtaccatctggctggcctccaatatggaaaccaggaggccacgtcttggacatttgcgtatttcagaaaaagtcatcaaggcagatattgcccaccagttttgttccagatgtacccakttggaaacccttgaaaccagaaacattcatgagatagagttctggccaatgagacgggagctgagggcatctgaggaagccccacttcccggatcgaggtgcccagttctctgtttctcctcgtgtggaacacggctgtggatctgaagaggagcagcatctgtgacactgtgacactataatcccaaagggctgggattataggtgtgagccaccatgcctggcctgaaggttattttatacaatattttaaataattttgtacatgaaacaaagtttgtgtacattgaaccatcagaaagcagaggtgtcatgtcagtgctcaaaaaggtttggattttagagcatttcaaatttcagattttcggattagggatatttaacctgtgtgtgtatatatacagtacagtacatatatatatatatatatatatcttattttacatataaaacttataaataagaaactaaatatgtgtgtgtatatctgtatatctgtgtatctctatataaattttggtaaggaataatactgtgtagagggagatattaccttaccaagagtcagaacatgtataaaactactgtaaatcagttggttgggaattgacatagaactaaatacatgccaatatattgaagagtgatatctcagtaaagtggggtgggtaattgtgctggtaccattctttgtgtgtgtgtgtgtgtgtgtgtgtgtgtgtgtgtgtgtgtgtgtattttgttgttgttgttttgagaaagagttttgttctgtcacccaggctggagtgtagtggtgcgatcttggctcactgcagtctccgcctcccaggttctagcaattctcctgctccagcctcctgggtagctgggattacaggcatgtgccaccatgcctggctaatttttgtatttttagtagagagagggtttcaccatgttggccaggctggtcacgaactcctgacctcaggtgatcctccctccttggcgtgccaaagtgctaggattacaggtgtcagccactgtgcctggctgtgctggtaccatttttaaataagtggctatgtgtcaggatgaagacagaactgaactctatcctttatcatatgtgaaaataaattctgattgcagaaattaaagactgacataaaaaagtcagtaaagacaatcttagccattacatatataatgaggttggggaagaacttcttaatactaaaccaaggtgctataaatattttggaacatttccaatgtccagtacctctttgtatgtcaaaggtgccattaaaaacttgatatacaaatgagtagtctagaaaactactaaatgtaaactacataatataaaatagagttaacagacaattccaagaggctttgcaaagggacgctggaaagatcaacaaaccagtgggaaaatgggcaaagtatatgaggagatgatatggctcacaaatgtatgaaaatatatttaacttgattagcagtcaaggaaatgcaaattaatgtgacagtgatgtcttacttgacataagacagtactgtaaaaaaaaactgttaatatctgttgctggcaggaatatgcatgcaaataatacaccaacacattgctggtaggaatgtgaagtttgaaaatccttttagcatgttgtctactatatattaaaatttatgctcctctaggaacagaaacaagacattaggtaggaacttaggaaatctgaatgcagtgcggactttagtttaatttttaacaaccacatgaccctcagactcattaattccacttcaggcaatcgatctcctagaattaaactcaccagtattcatggacatatgaacatgggtctttattgtgacgtgtctcataacatacaaagcctggaaataaagtaaatgctcatcatagaagaatggctgaataaattatggaaaattatatcaccattaaaaaggatgaattagaattatacaattgacttgcaaggattttgcaatattattgagaaagaaaaaaattcagaaaatggcataatgtctcatacttgtggaactttggcaaccctctgattatgtgtgaatacgtgtgttgagacatctatgtaagattgtataaacttggagaaaagatggaaacgtatataggttgttattaaaataaccatgtgtaaatcacttacatatttgtattagatgatgcatatatccacagaagcagattttctgggagctaatggtatttacgcttcagaatgtctgccccagggccccaggggggaccttaccaatgtagacatggccaattatttttgcataatttaatagacttgagccttgcttggggtaagaacacagtgtcttttcacccaaacttcccccttctcatccttcttctgttaggagacatgttttggggacctgggtaagggaaagttgagttagaaataacatttcgttgggtttagagttgtatttacatggtgtgcagtcacttttgtgaacaggtaaatttttagctctcccagcatagaaataaggaccagaaatattcttcctggccacctctgcatctgaggttatgatatggtgtagcatttctagaagtatcaaaatatcagtgtggtatattatgcttgaagtatgtgagtcatattggagagacagtgtttgaaatgtgtggagccagaagctagattttaagtttcacttacaaaggaaatttcatggcaattcctctaaatttgacaaccatcataaaaatttacatgacatatattgataagttgtggagctgaaagaagctttaccaaaagatcaattaaaaataattgatcaattattgctagaggaaaaatgaattatctgttctttctatacaaactatttacaaaattttctaagaaactacccacacaaataaaattaaaaatatggaggggaaagtattatggactattaatattaatattatagtatttaataaaaatagtatgttttctggataacgtgatgtatttttcagccttcatgaatgtgtaatatgttgtgtttttttcattataagtaaacttcacttctgtgcccaattttgttttcgtaatactgtatttttcttaaagcaagattcccaaattgtatacatgttgtatacaaattgcatccagtctccacaaaatttaatattctccttctgtgatttctgggtaaactaatgagtaaattaaatgaaaagatgactaaacattttagaattacttaggaatgaataccagtacattgtgtttttattttaaatggatataagtgaatatgcaagaaccaaatgcaataaggctattacagttcttccttaaacatcagttctctgaggattattattagataatttatgaagaacttgaacttcatctggcgcacgccccaaatgtttactttgcagaaaacactgctatgctggctggccagtagagggcactgtgctgttggtctgagttgtacaatgagcgttcaacctgcaaggcgtggacaggtggttaagataataaatattttatgtgaccagcctagagctcacagtacaagacaagaaatttctttctctctctgactccctgcctttgtctgttcccgtctgtctgtaacacacacacacacacacacacacacacacacacacacacacacacagagaatgttgaaataaatrgatggattacagattgtacactttgggtagacatgaatagagaaaatcttgttagagaagatgaccccttgggctattggctcagaaaaggagaaggatgtggtttgatgaaaagaagaaagaaagatgttctaggaatttggcagaggatgaaaggaagcaagagaacttaataagagcaaatacgttttagaataaagtgatttccatttaaaggggaagaactggactcttcgatttccctgtggggtgagttttagggtaaagactcctgtgctgaaagccagcctgctcatctcaaaggaatacatacaaatgttgcactctgagtgctgtactcatgtttgtttcttgttagactcttatggggcagatgacagtttccccttcttttatccatgatctaggtgtcaattgccgctggcaaaaggaagtgatagtggggagtgatatcagatatgagtagttactagctcttttgtggtggaagcagtatagaaacaaactgggtctttagtctgatttcatgttctaaaaaaaagctccttatgtatgaccagtcctaaacttagctaaaataatcagctgtcccttgacagttatatctggatactacttttttatattaaagtattattaaaacaacacatgtaggtagctaaaagttgaaagagtttagaagtgcttatcatgaaaatcaataatctcctgccctctctcccatcccagtcctgttccaccaaaggcaaccactttgaactctttgtgtttttaattctttggaggtttctaccatatttcaaaattaagtttagaaatgtggttttctctacattgtgaaatacagtttagaaatgatctctctgaactctcttatagatgcagatttcagttaattacctcaggtccaagtagtgaggcagtgtatcatgtttgcctcttttctagtataacttgcttttcctgccttgttcttctccttaaacaattttttttgcattttaatttttatcttttccatcagatcaatacacatttatattataacctctctatatattttaaaataaatatcccagaataatctcttggttttaccccttcccctccacacctcgccatcttcttgccagataaactggctgccctgtagatgtgttgctgtaaagtggtcatcccagaactttctcactgctttcttgagttgtattccctgatatttagacactgtcagggagtggggtggggggttgctttcttgattactgttttgtattgttgaagaacatcttgcagtaagaggcttcctagaaaagcttatgtgaaaagtagatgtgagtgtctgatagcttggctgggtatagaaatctaaagtgtcagtttagaggtctgtgttgctattaagaggctcaatttcatcttcattttttttcttcttataaataggctctttttaatatctttatggtttagaaatagcattctataatgaaaaatatttagtattctataatgaaaaattttggtatgtgtctcattgttgtgggtacttcgtgtaccctttcaatcagaaatctttgttcttagagttctagcaacttcttctgtataacttgttaatattatctttctctggtttctgtggaactcttttttttttttttattgatcattcttgggtgtttctcgcagagggggatttggcagggtcataggacaatagtggagggaaggtcagcagataaacaagtgaacaaaggtctctagttttcctaggcagaggaccctgcggccttccgcagtgtttgtgtccctgggtacttgagattagggagtggtgatgactcttaaggagcatgctgccttcaagcatctgtttaacaaagcacatcttgcaccgcccttaatccatttaaccctgagtggacacagcacatgtttcagagagcacagggttgggggtaaggtcacagaacaacaggatcccaaggcagaataatttttcttagtacagaacaaaaagtctcccatgtctacctctttctacacagacacggcaaccatccgatttctcaatcttttccccacctttcccccctttctattccacaaaaccgccattgtcatcatggcctgttctcaatgagctgttgggtacacctcccagacggggtggtggccgggcagaggggctcctcacttcccagtgggggcggccaggcagaggcacccctcatctcccggacggggcggctggctgggcggggggctgacctccccacctccctcccggacggggcggctggccgggcagaggggctcctcacttcccagtaggggcggctgggcagaggcgcccctcacctcccggacggggaggctggctgggcggggggctgaccccccacctccctcccggacggggcggctggccgggcggggggctgaccccccaacctccctcccggacggggcagctggccgggcggggggctgaccccccccacctccctcccggatggggcggctggccaggcagggggctgacccccccatctccctcccgtacggggcggctggccgggcagaggggctcctcacttcccagtaggggcggccaggcagaggcgcccctcacctcccggacggggtggctggccaggcggggggctgacccccccacctccctcccggatggggcggctggccgggtggggggctgacccccccacctccctcccggacggggtggctggccgggcggggggctgaccccccccacctccctcccggacggggcggctggcctggcgggggctgacccccacctccctcccggacggggtggctgccaggcggagacgctcctcacttcccagacggggtggctgccgggcggaggggctcctcacctctcagatggggcggctgccgggcggagaggctcctcacttctcagacggtgcggttgccaggtggagggtctcctcacttctcagacggggcggctggscagagacgctcctcacctcccagacggggtcgcggccgggtaggggtgctcctcacatcccagacggggcggtggggcagaggcgctccccacatctcagacgatgggcggccgggcagagacgcttctcacttcctagatgggatggcggccgggaagaggcgctcctcacttcctagatgtgatggcggccgggaagaggcgctcctcacttctcagactgggcagccaggcagaggggctcctcacgtcccagaagatgggcggccaggagagacgctcctcacttcccagacggggtggcggccgggcagaggctgcaatctcggcactttgggaggccaaggcaggcggctgggaggtggaggttgtagcgagccgagatcacgccactgcactccagcctgggcaccattgagcactgagtgaaccagactccgtctgcaatcccggcacctcgggaggccgaggctggcggatcactcgcggttaggagctggagaccagcccgggcaacacagcgaaaccccgtctccaccaaaaaaatacaaaaaccagtcaggcgtggcggcgcgcgcctgcaatcgcaggcacttggcaggctgaggcaggacaatcagtcaaggaggttgcagtgagccgagatgggagcagtaaagtccagctttggctcggcatcagagggagaccgtggaaagagagggagagggagaccatggggagtgggagagggggagggggagggggagggagagggagagggagagggagagggactcttaatagttggatattggtcttgtatttgtactattaagtctcttttattttgcatcttgtttttttggttttactttttggaaaatttgcttagctttatttttcacttccttttttgcaatattttagttaggctagcgtacttccaattgccaatagccattttattctgtttcctttttagaaataccatcttattcttgtttcatgtgaatgtgttatcatcttatgactctgaggatattagaattagcattactccaaactctaaaatattcttttaaagtttgctgtactgtttcctcaggtctcccctttcttctgtattcatttaaaatctcttttttgtggtgcaggctttctacacatatttggtaatttttcaaagaggaagtgtagcaggatgatggggtgctctgtgagtgcaggccagatagcaagactcacttttcggtgaaggacttttagacatgagtgtatgaggtttgtgtgggtgccctgggaatactcctggctgtgggtgtagcagcctggctgtgtaagattttggtgtaaccagaagaagggggcttgtgagagaggaaccatgtttcttttatgaagtcttttgcttcgaactctttatagtttatcttgtggggttcctccagattcctagccctgatttcctgtgtgagctcctctgtgtatggacttcaaatacctccctttgctttctatgcttgccacagacccttttccatcattgatgtctcatgagtctcctgagctctgcaggctgaaactgttcccctcctgtccacaggctcccctgtctccaatgcactgggcttgtgcctgcctctgccctgcctaatatatgattgtgatagtaaagttaatgtgtcaactcracagggctatggggtgcccaggcatccagttgaacattattctgagtgtctgcgaggggatttctggatgaggttagcatctgtatcagtagagtgaggaaagcaggtggactccctagtgtgggcggccccatcaaacagttgaagccctgaccagaacaaccctctgccaagtaagagggagctcctcctgcccgacaatcttcaaactggcacattagcttttcccgccttcagagctactgaaacaatggttattcctgagtttccaacccaccggcctttggactggaaccataccattggccctcttgcccattcccactgctggtgttggagtttgccagactccatagttgtgtgagccaattccttatcataaatctctatatgtcacctagtggctctgtttctttgacacaatgacactcttattacaactgcattattattttaaaaatggattgacatatcttctgagataccatttgtgaagctagagcccgttcttcctgcctcgcaggccagggcccttgcttaggcggcagcccctcttgtgggcttctctctccctgcagctcatactcagaaggcgtcttggaggcatgttcaacttgtctggcgaaagcagaaagaagtctattttagaaaaaagacaaccccacatcttagctaatgattccattcctagttgtgtgtgtgtgttttaaactgactgcatatttttacattcctttctagtatggtagtggtgtccctgtaggcagaagtggtaaatgtgtttccattttacaattgtcagtctgaagctaggcagcctttagatcgggtctttactgctgttagaatcctgcacataacagacctatttaactcatgtctctatgttggatttcagttagacacctgcagggatgggtccactttatgaaactgtgagctgtacactttggttttgtgcactttgctatatatgcacactttggttttgtgcactttgctatatacgcatgataaacaaagaaatgtcagttagaattaaacacttgaataaagtttgacaattatgtgagaaatccagaaagatagaataatatagcttgccccagatttttaactctacaacatgagggacggatagatatggctttctacccagacctaaattaaacatttgtgttttccatactagaaatctctgtgtaccaatcatctcagctcccgatgttctcccagcttgaccacttcggtttagctttccatccagatcttatttgatgttgtagttcctgaaccctgtctccttgggaagtgtcttttctgacaaggtatgtcctccccgagaaccagtgcmcccttgactgagggcaaaagcgtttgggacctgaaaaggatgggtttaggcccttgcctttggataactcgatctcagagtggctgctgctccttacttggtttgtagcatgccaacacttaggacagccttaaatctttccttgtagtagggattatttccctctgtttggaaagaatatactgaattctgaatgaaaggccaaatgtggtatacttaaatgcaatatgttttagtgttagagtttcacacgctgacctgttgcgtttcttttggggcagtggctgcatggggcctgaattgtaatgattcctgtacttgttgaggccagatatttttataacaaataattgttgtttcttttaattgaaaattgagaagaatctcattaaaaatgatccttctcttgcagtgcaaaattaaataaatctcataactcttttttttttgtttttataccatgaagttcacattttttctttctttcttcctttctttcttactttttttttttttttgagacggagtttcactctctcacccaggctggagtgcagtggagcaatctcagctcactgcaacctccgctttctgggttcaagcgattctcctgcctcagccttccaggtagctgggattacaggtgcctgccaccaagctcggctaatttttgtatttttaatagagacagggtttcaccatgtgggtcaggctggcctcgaactcctgacctcaagctatccacccacctcgccctcccaaagtgctgggattacaggcatgagccaccgtgcctggtcacatttttttttttttttttaatataaagcacctggtcatgctcactttggcagcacatagactacaattgcaatgatacagagaaggttaggatgatccctgcgcaaggatgacacacacattcatgaagtgttctatgtttttaaagttaaaaaaaaaagaaagaataaatcacttgggtaaaacctgcttttcaataatgtcacttttaatgatattagccataaatatctgatatcttgcatttggaattggttatctaagagttgttttcactagaagatcttcctggcagcatgctcagtggtcaaaatgttatcttcttctcagctcatgtttccatgcaggtgttgagataaagtgtttcatgtccatagttatttgttgaataatgcattgagtaatagaacagatttggaaatctgataggagcaggacagtcacactatttaataggaattataggtagactctaatttatgaacttaccttcaaaggtgtattgtaaattgattggtcagcagtcgacttccatttcactccttggatgtgttttgtgacagatagtctaaaagagcactaatacctctcctggtccaattactgcattctgggaacaggctatgagataaagcagtatctgacacccctttttcctgctgtagactaagaattaggaacatgttgaaaatataaatggcagtgttttaaaatgaacttagtgaccttttatttgtaactggtgagatttcagtagtttagcattaataaaatgaagtgaaaatttcttgtaaggtgctcatatgttaccattgacaggctctatttatcagtgggaattcttggatttaagattatttccagaatacaatttgggagggatggtggcaaagcctaaggaattgatgccagatgtggaaggccatgggctttgccatccattggaatgtcctctggggtggctcccaggtatgcagtgatgtccatcaagagaagtggcagagggccactgggaagggcttttgcatttggtggtgttgctcttgttctttcccttgattggttgaatgcactgctaaggaatcattgaattaaactgcttaatgtttagtgttatcatcttgtcctcaacttccaatcatctagaactccttgctgagtgaccatttgggaggaggaaggtgaatgatatcctatcgggagcctgctaggatggaaggcttccaggacatgggcatggaatgctggccctgttcacaaagtcagcttccggtggggacgcttaaagcctcctttattctttcagtaaatattgaacgcttactgtatgttgggaagatataagaaatttgttttkccatggaatgcagtagaataaggcaattgtttttgactgtctttacaccttaacatggatttactgtttccattttggtgttgcgtgttaaggtttagcttaatttctgtgtttctggaggcttgcttgaaggggaagttacactttgagcagctactgaactttgcgtcttttaaatcggtctctggagaacagctgtcaacttcaatttttctcgtagctggaaaatcagactctggtattgtctgtgggttcttgctttctgctgcatttctggaggtcagactcctgtggtgccttgtgatttgtgaggatcaggtagacccagacccatattttgccagaccctattttctaatggattgtttctgtatgtgcctaattatgagttatggagtgaagcgtgtccaacatacatgtaacaagatccaccccatgagttgggctcctcagaggagggtttgcagatagatattattgtcaggttttgtcctctcctgggaagcctccagatcttcccatctcccaaaaggaaaaaggccagtgtgtcaacatgagtgacaaggccaatgcgttggccctttgccacgttcatttcagttctcttcatacttctccacctccgtttgcccaaattgggctctttactctccctcctacaggtggagcaacgggagctctcccaccttggcgtttctgcactcgctgtcccctccctctgcaaagctcttcccctgtgcgtccatgagacttgctcctgctccttcacctccttcagggcctagttcacaggtcaccttctcagtgaaaccttccctcgccactctgttgaaaataatcctcctcccagccccagccagtgtacccttctgtatcctccttccctgatctgttttcccctgcagtattcatcacgatctatgctgttatgtgttctattttttttttaatctcgtttctcctctagagtgcaatttccttgagggtgtgcgtttttgaccacttggttccctttagtatctccgggggctggcacactgccctagtacataattagggctcaggaaatatctattgcacatgatggatggatggatggatttttgataaatcccggtcatcttcatgtcacccagtttcaggaaacactggcctcatgtttagagggagactgagtgaatcatagagaaatattcctgtttgcgcctggtcacttatctccagcccccaagctctaaggtcttgggtttccatgcagctaaagcccctccttgctgtgactagccaggaggacagtgatgctggcacatgcatttcgtcacacgagtgggaatgtctttaggggaggggtggcttatttacttgggtgaataaactatcctgttgggaagttctgtcattcacccatttacccctggagatgtttttcccctggcagagtgaatggtaaaacatctcccatcttattacatttttaaaaagttgctacataatagttgtattaacacatattttaaaggtacatgtaataatttgatacattcatatagtgtgtwaagatcaaatcaaggtaattgggatatccaatgccttaaatctcttctagatattttgacgtgtacaacagattattgtaaactatagtcaccctgctgatctttcaaataccagctcttattttctctacctaactgtgtatttgtacccattaatcaacctctcttcatctcttcctccgtgctacccctcctagcctctggtaaccaccagtctgccctctgtcttcatgagatccacttttctggctctcacatatgagtgagaacatgtgatatttgtctttttatgcctggcttatttcacttaatataatgacctccagttcaatttatgttgctgcaaatgacaggatctcattcattttttgtggctgaataagtactccattgtgtatatatgccacattttctttatccattcattcactgatggccacttaggttgattctatattttggctactgtaaatatgctgaatagtgctgcaataaatatgacagtgcagacagatatctctttgacatattgattttctttcttttggctctatagccagaagtgaaattgctggattatatggcattcctatttttagttttttttttttttgttttttttttttgagatggagtcttgctctgtctcccaggctggagtgcagtggcacgatcttggctcattgcaagctccgcttctcaggttccacaccattctcctgcctcaacctcccaagtagctgggactacaggtgcccgccaccacacctggctaattttttgtatatatatatattttttttagtagagacaaggtttcaccatgttagccaggatggtctcgatttcctgacctcgtggtctgcccgccttggcctcccaaagtgttgggattacaggcatgagccaccgtgccggccctatttttaattttttgaggaacctccatgctgttttctatactggctgtaccaatttactttcccaccatcagtgtacaagggttctgctttttgcatatccttgccagcattcaatcttccctgtcttttttataatagccatttacactgcagtgagatgatatctcattatggttttgatttgcatttttctgagaattagttaygttgagcattttcctgttggccatttgtatgtctcttctgtgaaatgtctattcagatcttttatgcatttttaaaacatattattttatctatttatttattttagctgttgagttgtttgagctccttattatattctggttatattctccttacatatcccttgtcagatggatagcttgtaagtattttctcccattctctgggttgtctctttgttgatgttttcttcattctgcaggaggtttttagcttgatgtaaccttatttgtctattyttgctttggttgcctatgcttttgaggtcttatacaagaaaatctttgtctagaccaatgtcctggagtatttccccaatgttttattttagtaattctcagtttcaggtcttagatttgagcctttaatctatttttatttgatttttgtataatgagagataggggtctagatttcttttttgatatgtaattaccagttttcccggcatcatttattgaagaaactgtcctttccccactgtatgttcttagcgcctttgttaaaatgaattgactataaatgcatggctttatatctgggttctctctatttctctttttttaagagatggggtctcacaatgttgctgatctcaaactccaggcttcaagtggtgctcccaccttggcctcccratggcttctctattctgttccattggtctatgtgtctgtttttatgccagtaccatgctgatttggttactacagctttgtagtatgttttgaagtcaggtagtgtaatgcctccagctttgttctttttgctctggattgctttggctattcaagatttgtggttccatataaacgttagaattgtgtttttctgtttctgtgaagaatatcattggtatttttatagggattatattgaatctgtcatttgctttgggtagtgttgtcacttgaataatattaattctaatccatgagcatggaatatctttccattctttggtgtcctcttcaatttatttcatcagtgtattaatagtttttcttatatagatctttcacttctctggtgaaattgattcctaggtattttacgttctttgtagctattgtaaatgagattgttttcttgatttcttttttcagattgtttgctgttggcatatagaaatgctactgatttttgtatgttgattttgtatcctgcaacttacaatcatgtcctttgtgaacaaggctaatttgactttttcctttccagttcggatgccctttatttatttctcttgcctaatttctctgtccaggacttccaatactatgtttaataacagtggtgaaagtgggcatccttatcatgttccagatcttagaggaaaggctttcaatttttcccagttgagtatgatgttgattgtgggtttctcatgtatggccattattattttgaagtatgttccttctatatctagtttgttgaggatctttatcataaagagatactgaattttgtcaaatacttttttcagcatctactaaaatgatcacatggtttttgttcttggttctgttaatgtcatatatcacatttatagatttgtatatgttgaaccatccttacatccctgagaagaattccacttgatcatggtgaatgatgtttttaatatgttggtgaattcattttgctagtatttggttaagaatttttgcatctactggacgggcatggtggctcatgcctgtaatcccagcactttgggaggccaagttgggtgaatcacttgagatcaggagttcaagaccagcttggccaacatggtgaaaccccatctctactaaaaatacaaagagatagccaggggtagtggcacatgcctgtaatcctagttactctggaggctgaggctaccttgaacccaggaggcacaggttgtggtgagctgagatcacactactgccgtccagcctgggcaacagggctagactctgtctcaaaaaaaaaaaaaaaagaattttttcatctatgttcatcagtgatattggcctataattttcttgcctggttttattatcagggtaatgctggcctcagaatgagtttggaagtattccgtgatcttcaattttttttcaaggctttaggataacttttttttttttttttttgagtcagagtttcactctcattgcccaggctggagtgcagtgccgcaatcttggctcactgcaaccttgacttctggggcttagatcctcccacctcagcgacgtcctgagtagctaagacttcaggcacacaccaccttgcctggctaggtattagttcttctttaaatgtttcatagaaatcagcagtgaaaccatctggtcctggactcttctttaatgggaggcttcttattatggctttgatttagttacttgttattgattggttgaggttttctgtctctttatggttcagtcttggtaggttttatgtgcctgagaatttattcatttcttcttggtttctgatttgttggtgcataattgttcatagtagtctctaatgattttttttgtgtgtgtatttctgtggtctcagtttttatgttgcatttccatttctggttttatttgagtcttcccttttcttcctagtctagctaagggtttgtcaattttgcttatcttttcaaaaattcaagtttttgtttcattgatcttttgtactttttttagtctcaattttatttctgctcttacctttattatttcttttcttctactaattttgggtttcatttgttcttgtttttctaatctcttaaggtactttattaagttgtttatttgaagtctttctccttttttgatgtaggtgtttattactgcaaacttcccctcttaccattgcttttgctgtatcccatagattttggtatgttatatttccatatccatttgtttcaagaaatttaaaattttccttcttaatttcttcattgacctatcagttgttgaggaacatgttatttaatttccatgggtttgtgtagtttccagggttcttattgttattgatttctagtttatttcattgtggtcagaaaaaaatagttgatatgatttctaactttttgaatgtgctgggacttgatttatatcctaagatatggtctattctaaagaatgttctgtataccaatgaaaagaaaatgcattctgcagcagttgggtgaaatattctgtaaatgtgagttagtcttgttttgtctagtatacaatttaactccagtgttcctttgctgattttctgtctagatgatctgtccattactgacagtgggaagctgaggtcccctactactattgtattgcagtctatctcttgctttagatatattaatgtttgctttatatttttgggtgctctggtgttgagtgcatagatatttataattgcctttatcattataaaaatgaccttctttgtctttgacttgtagtccgttttgtgtattataagaataggtaatcctactattttttggttttcacttgcatggaatatctttttccatctctttcattctgtgtgtgtctttataggtgatatcggtttcttgtaggcagcatatagctgagtcttgtttctttatccattcagctatatatatcttttaattagagaattaagttcatttacatgcagtgttatcattgataagtaaggacttactactgccatttttctgcttgttttctcattgtttgataacttccttccttccttccttccttccttccttccttccttctttccttccgtctttcagtccttcttttcttttttccatcttcctttgtggttaagtgattttctcaggtaataggttttaatttgttgctttttatttttggtgtatctattataggtttttgcactgtggtcatcacaaggcttgcagaaacatcttktagatataacaagttatttttaaagagatgacaacttaacttagatcacagaaaggaatagaaacaataaactaaaaaaacctctgtgttttaactctatctcccctacatattgatttttttgttacctcaatttggatatatttatactgcctattttttagcaggtttctgtatgtgttttcrtttttgatagatttgtcttttgggcttcatactagagttatgagtggattgcacaccacaattacagtattagagtattctgggtatgtctatatgcttaattttactagtgggttttataccttcaaatgttttctatttgcatgttagtgtttgtttttctttcaaattgaagaagctcctttagtatttcttgtaagatggatctggtgatggtaaattttctcagcttttgtttttctgggaaagcctttatttctccttcatagttgagggacagctttgctggatacagtattcttggatggaaattttttttcttttagcactttgaaaattttgttccactcccttctggcctgtttggtttccattgataagtctgttgccagatgaattggaggttctttatacgttattttcttcttttctgttgctacttttaggatcctctttgtccttggtctttgagaatgtgattattacatgccttggtgaagtcttatttgggtcagatctgtttgttgttctctgacattcctgtacctggatgtttatctctttctcaagttttggaaagttttctgttatttttttgagtaagctttttactccttgctcttgtttaactccctcttgaacaccagtgattcttagactttgtcttttgaggtaatttcctttatcttgttgacaatctttgttcctttttattcttttttcttctctgtgtrttttcaaattgcctgtctttgagctcatttattcttacttctgcttgattcattctcctactgacagcctctaatgagtttttcagttcctcaaatacatttctcagtttgaagatttctgtttgtttttattactatttcaatctcttcatgaaatttctctgatacatttttgagttgcttttctgtgttatcttgaaaatcactgagttcccttaaaactgctattttgaattcttcttcagagagctcacatatcaccatcttgttagggttagtcactggatccttgcttcgtttgttcagggaagtcatggttccctgtttgctgctgtcacttatgaatgtatgtgtatatgtttgcattggagaattagttagttatttcagttttctctgtctggattcttttgcttttcattggatatatttgcttaagagattcattgtaatttacctgttgaatttctttcttttcccattaggtcactgcctccttttcagcattagatggtgccttaagcccaggtttgtctccactctaataaacaattggagcactgtccatcccaaatggaaatggtgccaaaggggatagcctagcaatgtgggaaggtgaattaggggtttgtgctcaggggacctgtgggatgaacctcctacagcatggtgctgctaagcagacactgcaatttggtatctctttggccaacttatagagcaaagtttccagagttggggatagtagtcctgcctcctcactttgtctctggctgtccccagggatatttcttccttcaagcactccccatgcttcctgtgagttgaggtaggaacaggtatcctgccagggaactcaagatgatggggaagctgcccgtcaccttgattttcctttttccagtgttaaactgagagttgggggaaattttccacgtgcttggtgctggcagattggggagagggatgtcttggctgtggatgtccccttctcttaccatctacttggagcttttttacttctctgtggcactgagaactgtctcatcctcatattctagttttgggatatttgtggtgataaccttagtgctgtaaatttggtttttgttttctgtgtggggaatgaagccagcttgcttccacgccaccattttggaaccagaaacctcattgtattacaccttatagtgctctgctgaattaaattcaaataggaagtttgaacaaatttacctcctcaggaattatcctaaatccctgctactcaaagtgtggtcattgtaccagtagcattgaactcacctgggaacttgttagaaatgtggaatctcaggcccaccccagacrtactgaatcagaatctgcattttaataagctctccaggagactggtgtgttcgagaagtaccatcctgcaatattctggtagactcattttgataggtgctgcctttagctgtttgtagtgttatatctttaattctgtaacatgacagctaatggctatatattttggcaattattttaatgccacacaataaccttttcctggatgaatgttaatttctctgaattattgatcatgcttactctatctcaggatgcaagcatttgggctcgtttttctagttctagtagagtaaaagttagtatgcatttccctctccacttctaccctcttatatttcattttttgccacaagcaagattcctttcctcctcaactctccatcttcatggttctcagggatatgtaggtccttaagcacagtcagcattttgctcaagtggaaaatgttcatatatagctggggtaatgtgccaactgtgtgcatgtgtatctggtttatacagatggaatctcaggttcaaatgttataatcaagctatcttgcaagatagtttctacactcttattttacagtatgtgaactttctttttgttttttgctgacaaatgttgattgctttatttcagtggtcaggattgctgtagaggtatgcatgatatgccatttgattttgtcctctaagccatagttaagaagactttgtattgtgagcyakcacatacatgagttttgtgtattttccctactttttaatgaacttaatgtcagctgttgattctggccagatttcacagtgacatcctgttatgccacagggccacttaaacaaggaggagatccatgtcagcaaatttctagctaattcagggatagtctttcaagttacatattgtttaagttttaactctttaaaaagtggtcttcatataacatcacatacatttttagcaccttaggtagaagttgctaaaaatgattttgtctttaaggataactctgatcactgtattgtgaaatgcgaggccatygtaccatggggcatgattttctctgaggcagtggcagatgggactattggcagtgggactatttcttgttccatcaaatgacctctggctgctatatttttgagtagtccactttggttttactctgttgttccaggcttggttgctgtccagtctcacagtagtgtactttgcttctggtgtattctgtctcctgagcccttcgcccttctattggggtgcttctaatttgttgtaaattaaaaacctgctagataatcttttttttatttattatactttaagttctagggtacatgtgcacaacgtgcaggtttgttacatatgcatacatatgcaacttgtgtatgcatacatatgcaacatgtgtatgcacacatatgcaacatgtgtatgcacacatatgcaacatgtgtatgcatacatatgcatacacatgttggtgtgctgcacccattaactcatcatttatattaggtgtatctcctaatgctatccctccccacttcccccaccccacaataggccccagtgtgtgatgttcctcttcctgtgtccatgtgttctcattgttcaattccctcccatgagtgagaacatgtggtgtttggttttctgtccttgtgatagtttgctcagaatgatgaaaacctgctggataatcttgctagaatatattataattaagaataggctcagagtgatgtcttcagagggtgagctaggaatcatataggtacttttatggtgcaaacttgaataaaatgtgtgagcagccacagctggtttggttaattttgcctttgggttatttcactgttcactcactatctgctatgtgctaggaacatatggaattgaagtaaacattcttgtcgttcccataatctgttctggggatagataaaatactaagcaaagcattatgcctatatgatataggtgtaaacactgtactgtaggcttgcatgaggagtgtcgttataaatttgaccagacttactgaaagatgtaagattgggtggaaggaaggatactttggtcatggagagacaggtagggtgtaagggagaggatgtcctaggtggaagcaaaagtgtgagcaaacatgatcaaataaagggtgtgtggaaggaatggaatttatttgggtgtggttgaagcatgaaacatctgtggtggttacccagaggggaacatcgaattgttattcacacgcctgctgttcatagyatatagctcctagaaggtgggtagatgtctctgcttatgttgtgtgaaaattaaagaagcacatgtatatcttccaatgtagaaaacaaasaccacattggaagattttctcatcaggggcgccattttacaaactaaagctctttaggagaagatacacagcaatttccttgtcttgagttttgaaacatttttttttaaaccatttgtaaaactttctaaacttcttgtcctgttcttgtgttttagagtttacatctataactgatagtattatttttctttgcacttacagtacggccaagtacagcgtgttgacatttctacctcgattcttgtatgagcagattagaagagctgctaatgccttctttctcttcattgccttattacaggtaatggttttttaacagttccttggaattcacttaattacatgtaaaatgagattttgctaaaggttycttaactgctaaagtgttataatcttggaatatagtttgtttccctcctctagtcattgtttgatagagtgaacaagcctgactttgtatacagggagatttcttttggtatggccttgaggatgattgcagtgactgaaagaggcattgaaaagtggccttagggccatacttttaagcctttttctgttccaaacacataaccaatgttggataaaatttttaaaaatatgtaaaatacatagctagtttttaaagtaaggtaattatttttgagtaacagaaatggaacagaactgcaaaagtgtgaaacgtacgtgactgccgtaattttctgttcatggagaggatttttaatgtgccaacttcctacttgtggtctcttatcttccagcaaattccagatgtatctccaacaggaagatataccaccctggtgccattgatcattattttaacaattgcaggcatcaaagagattgtagaagattttgtaagtttttgcttttggataataaaatcattgtatgcagtagataataacttatgtgttgcctcgggtgatatatttaaggcaggaaattgggctwtagcttaaccagcctctttagacacctgatggtatttttagggggagktaatgtatactcagagtgtcctaaatacctgtacagtgacactaaacagttcaaactttgttttcaaatrttaggtctctggagccccattgatttttatcactgatgttccttatagcctgctttagagcttgctaatttgggcagcaaatgaaagattgctgtgttgtctaggatggcagcattgtctcgctctgcctgaggcaattttacaagaatcttctcccctcacaatcatcctagtgtacctccaagttcattggctacagcaactatattccttttccctgtctttcttgctctgtctccccctatatatttgtgtgtgtgtgtatatatatgttatatatatgttatatatatgatatatatgttatatgatatatatatgttatatatgttatatatgatatatgttatatatgatatatgttatatatgatatatatgttatatatgatatatatgatatatatgatatatatgatatatatgttatatatgatatatatatgttatatatgatatatatgttatatatgatatatatatgttatatatatgatatatatatgatkatatatatgattatatatatgattatatatatatgttatatatatatgtttgcatgtgctgtctctctgtctctggatcttcctctcctcccttacatacacacacaccttgctttcacaaacatatatgcatctttctgggaataggtatgtaaataaatataatacaggttaagcatccctaaatccaaaaaccccaaatctgaaatgcttcaaaatccaaaacttttgcatgccgacatgatgccacaagtggaaaactccacacctgacctcgtgtgatggctgcacaaaattattataaacactgtatgaagttaccttcaggttatgtgcataaagtgaatatgaagcataaataaatttcatgtttagacttgggtcccatcccagagacacctcattgggtatatgcaaatactccaggatctgaaacaatctgaaatatgaaacacttctagtcccgagcatgtcagataagggatcttcaacctgtacacatcgaagcaaagttactttatcaataaaatgaagttggctgtttgttgctgggtttatcacactgaataatcatttcagtctgatctaaagcaaggagtgaaaagttttgtacttccaagtgctagaaccaaaataaaataattgaaactagaggagaccacttctaaacttagggagtgctgatagatcacaaaattgtctaactgaattttacagcatgagcattattggcatttagtttccttgtcccctgtaatttcctgattgttttgtttgctatttcaattattcatgtggaacttttgaatgttaaactattttttttctttctgtaacagaagcgacacaaggcagacaatgcagttaacaaaaagaaaacaataggtaagatcccaggctgaaggactttttccactggaaaacttaagaataaggcctgcatttaaggaattttaaataagtagtgaatggtattgagataaattgggaagatgatctataaaataaagaaatagtaaaataacaaacaaactgaacataattttagtcctgataattaagtttgaacagcatttgtgtattttagaatgttagaaaaggttgtaattttcaggaactagacagtttttatgtccataaaaagtctaagcattcatgtccttcatttataatctctccttacttccctcttctactttttattgttttatttctacaacatcaattttttgtttgtttgtttcattttttgagacagggtctcactcctgttgcccaggctggactacagtggcatgatcatggctcactgtagctttgacctcccaggctcaggtgatcctcccacctcagcctcttgagtagctgggactacaggcaagcaccaccacccccgactaatttttgtatttttggtagagatgggtttcaccgtgttgcccaggctagcctcaaacttctgggctcaagcagtctgcctgccttggcttcccaaagtgttaggattacaggtatgagccactgcgcccagctgttcagttttttttaaattgtggaacagcaggctttttttttcttctgggctgaaaataagtagatttaacttacatacatacataaacatttatgtgtatgcatgaatgtatatatgttacagaggtacataccatacgttggtgttccattttgagggtgggggtgctgatgttatgccatcatggctaaagatagggtatgttagaattaataaatggaattctaaaagaaagcttttggattttaggaagctgattcaatttaacaccagtattaaccaatattttatttttctctttttcagtgttaagaaatggtatgtggcataccattatgtggaaagaggtaaaaactaattttaaagatgtaccagtactattggtttgaagacgcgtaatgaattgctggtcttgattgcagtataaagtttctgttagacacagtagagttttccatgaggtctgctgagacctgatgcgtgtttmctctgtcccttgcatcttctagtaagggcccaatgtgtcacttcaagctatgaacttcatcgctcctgagtgacgtttctgaaatctcaaagtattttctagtttctaaatccaatttgagaaatattttccctggtcctctgttgtcttaacctaagttaaagtttatttttgtttttagcatttgtgattctcactttaaacatttttgggtggaaaggtcattaactacagagtggtggaaagggggcaagaaaccaccccatttccgttctagcacagcagttagctgctcttaataatagcaaggaaagctttgcttccacgtccctggaagtatgaggtttagagggttgaagaatggtgtggttttttggttgtttatggtgatgagtagaaaatttagaagaaatctgccataccatctaggtattttatatctcataaaattagctttttaaatgagtgttttagctggaccttcttaatggacacaagatgtgttgggggatgactctcattagtccagcattcaaagccgattaacatgatttcaaaagaaaacagctttttagaagggtaacttgaagtggttcttcttgctaaataaacatttaataaacaatgtttttaaatgcctcttacagtcttttatatctgaaaaatgcccgtgatatggtaactgcagcatttgctttagttttcgttttactttactttgttttaggagaattcgccaccctttaaagaaatttctcctttatagtgttttacagtaacaccttaacctttgctgcaatcttgaagtygtatgctgcaaacattcatcaacctcacgtttggaaaggtcatggttcttggtcaggaggttgggaattcttgactcaaagtgggagagatgctcccaatgctgaaggaattcaagggttctcccagcactgggaaattgcccctctatttctctarggttcttcttgttactccctccccagaaaggtatcagtatcagctagagtgaagaatgatttggattcagagggcctgacattacttgaaacagcagaaaatggagtgatgrtctctaattgatggtcttctgtggtccaggagctgacagctttgcagactcctaaaactcatgactgtttccatcgttcatttgggagaaaaacaacaataacaaagaaacaccagttatgtactgtaccgcatgcagttttatttccatttaaaatgtatttacttggtttatttcagtggagctyctggcatgtgccagagattgtactaggcatgggaagaatgaagctcagcgcttcccttaaggagtttcaaacttcagtgggcatcccagtcaccgtccacagagctgctggaacccagatggctgggcccactcccaggctatctgattcactgggtctcaggtggggccctagaatttgcacatttaaacaaattactagttgaggctgatgccgatggtgtagggagcacactcaagaaccaccggtgtcctgggagagagaggcaactaacctaacgcagtgcagttgctgagctctgtgtaggagaaagcttccactttgggaagagctgggaggggccacctacctagacccagtggttcagatcaggaaagtctgccctccagagatgctctagtgcgctcttgaagggtgaatcaggggtaactagctgcggaactgtgagtagttcaatgtgaggatgagaatacaggagagggcagaggtgtcaggcaaggggaagctggctgtccttaaggtccccaaaatgataataatctaatctgaagtgctgaagctcagatctgctgtcccctgggctgtagctgagtcacgggtgagcgccaagaggcagctctcaggtggatctcagtggctttgattgacttcgagaggatctttcagctacttcctcaaaattaagagacttgaggaactctctgaggctagagtggattcagggatctggaaggtttctgttcccagtgtactaattctttgagggagtattgcacacacaaggaacaatcatgtaagaacattaaaaccatttccaggccgggcatgctcacacctgcaatcccagcactttgggaggctgaggcagctggatcactttagctcaggagctcaagatcagcctgggcaacatggtcaaaccccatctctacaaaaaaatacagaaatcagctgggcgtggtggtgcgtgtctgtaatcccagctactcaggaggatgaggtgggaggatcacttgagcatgggaggtggaggttgcagtgagccttgatcgcaccactgcactctagcctgggtgacagagcgagaccctgtctcaaaaacagaaaacaaacaaccaaaaaaaaattttttttcaagcaaaatccaagtaagtcatttcttatgtacacaaaacttcttagtacttggttactggaatatgaatgtttatttagagagtaaagatgagagaaagccataatttctcttatcctcccactttgaatttaaaaaaatccactgccttttttcatttgaaaacatgacaaattttcttgtctagtggttttttctttactaattacttcttctgatttttatatgtaattaaactattcatatgaaatcgttttaattttattttattctttttagacggagtctcgctctgttgctcaggctggagtgcagtggtgccgtcttggctcactgcaacctctgcctcctgggttcaagcgattctcctgcctcagcctcccaagtagctgggactacaggtgcccaccaccatgcccggttaattttttttttttttttagtgagatgggggtttcaccatgttagccaggctggtcttaaactcctgacctcaagtgatctgcctgcttcggcctcccaaagtgttgggattataggcgtgagccactgtgcctggccaaaatattttttacttttaaaaaacactttcaattgacataacatccattgcttttgtactggtggttgttaaaacagctttgtggcattttccccagacactttaataaacaacttaaagcaccaataggatacctttcagtaaatttgcctttttcccaacagaaaattaaacatgggcacctgctagcttgtaagatctggcagtttttcacaagtwtcgtatcacttgaaattcctggtttctaagagaatagtaacatggctagaataggaaatagaaagcataaatgcccactttgagctttgcaactattactgtactagtaatggtcttctggtatcgtcagagaattctaatgtccttgaccttcacactcatgatgtcctttcagttatgctcccactgatggagactgacatttatatggacctgttttatgccaggtgccgtgtatacttccttagtcactgcattcaccttacaaggccggtggcactgttttcctgtttcagacatgacacgctggggcgctgggaggtgaagcagcttgcggagatcacaaagctagcacacggctataaagctaggattggagttaggcttgcctgatttgaaagcccctgttctctctaccctagtgctttctgcgatgttactgaaaggattggtagacacttcgccatggtaccattttggagactacagcccttttccttggcttgagatcttctgtctagtggagtctgttccccaaggtggtctctgactttggccgtgatcctttttctgggaatttcttgaggctgtacaaatcttctccattttatgtggtatatttccagggggactttcaggtgcacttttcatgggtgaatttactgttgccttttaatcagagcattggccttccgtgcagcttgcccagttttgaatcctggttctaacactcagtggctgtattactgtgatcaagttaytttgttttctgcacctcaatttgtaaaacagagaaaaatttataaaacagagaaaaatttatgtgtgttaacttagttgatccttgtagtcactctatgaaatatgtgcctttatcctcattatatagatgaggaaactgaggcacacagagtttatataacttgttcatcattacacagctcatcaggggtgcagtggggattgagcccaggctttaggctggctctggtggtgtgtgcgtgaccgttctaccctactgtatacagctatggaaatgctgaagtatttgtaaatggatgcataattgtaagaaaacgagwtctttatagctgttctgacttagcccttttctccctttccctttccttttttattaaacatcattgcaaaaaaaggcaacattaccagtgtctgcmtggaagcactttccttttgttcttgtcaaggaaaataatttgggcttctctatcttaaacttcatggcttagttatrtaataattttttcttcaaatatttaagcacctttttcaccatgtgtgttttgtttcttttctttcgtgcccctctgtcctcatccctgtctctctaggtggcagtgggagacattgtgaaggtcgtcaatgggcagtatcttccagcagatgtggtcctgctgtcatccaggttagctgtgctagtaggcaccttttttgcaataaatgttaagaacaataaaatattaagcagcacctggggcagtcttgagcagcctgttcccttctaccatcctctctctgtcccattcttccatttcttgtcatttcccttctcctgccatgacccttggtttctttctcacattcattcctttgtgctttttctgaactcttttatgtgtgttgactccacttagtctcctggctatttggggtttttttcttatttataggggcactgagtcaagagcagtggagtggtccattcattaatgtcaggttgcagcatatctgagatttcagaatctgtttcctgatgggccctgccagcagtctgtcctgcagaacccagtgctgcacattgatagctgttcaagaaccrtgggtgttttctcagcgtaatcgtgaccagcagatggtgtttgctcttcatccatccatgttttgccccttttctgtccaagtatcattttcatattctctaggtagttttattctaggaaggaatcatcactcagtgcagttcttgacttttttggggcttggtgcatgaaagtacatagctaggaaagaaagccaaaattaggkcaagaattgacatctattcttgaattcaagattaaattgtgtgacgttaggactataacttcctatatttatacactgttgggaatcatagatcggcatgctgtttgcattttctttgattgcagacagcgtttcttgtattgaagttaatcactcattggattttaagcctaagcattaattttctgcttgagataatagatttaaaaataggactccaggcctgtggagggggaaaaagaaccaataacacagggcaggatttatgtttgtccatattgattgacaacaaagaaacccttagaaatattaaaatattgatcacttgatagttcgggctttaagtctttaagtcttggctgtgaccttagaaaatttagtgtgtgtgtgtgtgtgtgtgtgtgtgtgtgtgtgtgtgttttgttttgttttggagacaaggtcttactctgtcacccaggctggagtgcagtggctcaatcatagctcactgtaagttcaaactcctgggctcaagtgatcctcccatctcagcctcctgagtagctgggaccacaggtgcatgccaccatgcctggctaatttttaaaaatttttttgtagaggctcatttttaaaaattttttgtagatgttgcccaagcttgttctggaactcctggcctcaagcaatcctcccgccttggcatctcaaagtgctggggttacaagcgtgagccacagtgcccagccagttttttttttttaacttggtcttaataccagattgctttagctgacatcatgtttccagcatgctcattattagtgtctgagtgtgtgctgtgtgctgaacaacctgttgaggaggttgtcccacttaatcttcccaataaccctggatagccttcttttgtacatgacaagattgagatacggagagactaaacaatttgccaaggccatatagcccataaaggtagtgctaggggatttttaccttaactagtggttttttagttggaagagtcaaggggtggttaatcactaactgtgtgaacctagctaaactcaaagattagaaataggattataatatctgttatgcttatttttatttttcgagttttctatctttaatgctaggtgttttgattaaaaagttggactcgagatgtaaaaatggcagagaattaaagccttgccaagcctgtgcctcgatccttcaactcctctggctgttgttttcttcaaaaaatgtgtgtttctactggccatgccttgggcagcctttttggtcaggcccagccccagacttgaaggattgcctgaacccagtggttgggtctgactggggacatcacatgtttccctttctctttcatcttcagttcattcctgtcttcttgaggctcagcagtcattatgtggggcttacaaaggcagatcatctgggcaaatgactctctactggtactgagtcccaaagatgagtgtgtgtttcctttttcatccattactcctactatcgtggttatttataacaatttattttgaagggccaatcagcagacacagattccatartagagattttctaaactgtgaatttgtggaaaggaccttatgaaacttggctctttttttctctctccttagtgaacctcaggcaatgtgttatgttgaaacagctaatctggatggggagacgaaccttaaaatacgtcaggtaaagtcacctctgatgacttgtgttgttatggtagacacaactgcaaatgtggtccccacatatctttttctagagaaataaaatattcagccacaaagggttatgccttagccctaatggaatctatgggaagaatatgccatttatgatgagagagaatgtgwctcgaaaaagtaggctgcatcaaactctaggtcatgcagggtgccaggccttcatatagcgtcttattgagttctctgcctgtgatgctggagagaggggacatctcgatgaagctgagtggctgggaaggacacagcttagtggacaaatggagcagaaaagctccaggtaccccagtttacatcattgttgtaataaagattctaatcctagagggtgatataattagataaaaaacttccatgccttaaagaaaactattcttaccatatattttaattctaggatgaagaatagtcttttttggttctttttttttttttgagatggagccttgctctgttgcccaggctggagtgcagtgatgcgacctcggcttactacaacctctgcctcccgggttcaagcgattctcccaccttagcctcccgagtagctgggactacaggtgcatgctactacacctggcttaatttttatatttttttagtagagatggggtttcaccatgttggccaggctggtctcgaacccctgaactcaagtgatctgcttgctttggcctcccaaagtgctgggattacaggcatgagatactgcacccggccaagaatgaagaatggtctttaacatataaaaattttaagcactttgaagcttaaaaaacttttgctgcttaaagttgaattcagcaattctatccatatatctttcttttctactgtagatatttgctttagactttttttttccatttaaagaacagttacagcctgggcaacatagcaagaccctatctctacaaaaaacttaaaaaatagctgggcatgatggcacatacctgtagtcccagctacttaggaggctgaggtgggaggatcacttgagctcaggattttgagccttcagtgaaccatgattgcaccactgccctccagcctggaggacagagtgagaccctgtctcttaaagaaaaagtgaagagtgctagataatgtaaaatattggagggctactctattctatctttatgaccagtgttagagtacagctagtagattatgcttgctgtaaggtgctggggtatgttaattattacttatgcacggatgtttctagtacagtggtggaatcttaactttcagcttcattacattcttttgccacttttgcattagatcgttgtggcaaaagctactggaaaagtctgccttgaggggctgacagtttgacttgttagccccccaaattattgcactggagatgccttatttttccttttgattaaccatagggatgctgaatggtgtccctaagcacagaagattgtgtttgacttcctcttttggtttaatcttttagggtttgagtcacactgctgacatgcaaacacgtgaagttctgatgaagttatctggaactatagagtgtgaagggcccaaccgccacctctatgacttcactggaaacttgaacttagatgggaaaaggtattatatgccttttcttcattgtcttttaaactatgtgactaagaattactggagctttggaaaatatgtttgtttcctagttttgtaatattttaaaacagtgagatttcataccctttcaattaatttaaagccttccttagatttaagaaaaaaaccctgagcccaagggcctcagatgaggctcaaagcatgtggcatattctttctgtgcctactctctgccaggcaggagaaatggttttagctgcataaaattgtccagaaaagcagaggagagttatctgaggtgtatacaagctaatacacttgttacagaaatgtgtgtatgtgtattttttttttttttttgctaaccaccttctaaggagcgttcatttgtttttagaaagttgagtgaaatgaacacttattcttcctttagaatattcagtgccctcctgtctatattctgttatctttgttcttctggcatttgttatgttgttctggagttgtcttttgttctgatgttggagagcagtttctaccttctggccatgtttgtctagagcctcttgccaatgccccctccaaccctgtaacccagcctcttgcaatgtcctttatattttgacgacccaaggcttggaaggacctgatcataggaatcaacccaaattattataaatatgacaactaagtgtgactgcttcttggtttcatttagcatacatagctatactatgggctccccattctgagtttctaaattgtcactcaggtctttatttactcattaagtcatccttaaaaaaattgatatgataggttgctgctttttaaaattttactccttcctaatagtctgtaaaatacactagatttattttacaaataataataataatacttccaataataatacttaactacaaatgagtaagctttggttgttattttagcaacttcctttctgggtattgagtttcataacaggatcatgagagatataattacctgcaacattttatagaaaaagcattttttttctgtagtgatgaatgtaaaataaagctttctgtgggtccttttggggtagattaagccaatggtaacctttgttgtctgtgtttctcagtgaagtagttcaaattggaggaaagggaacatttgatttattgtgggttcatgtttaagggaaaaactcatgcttattttccagactatcattaaatatcattgttgttttttatttttagccttgttgcccttgggcctgaccagatcttattaagaggtacacagcttagaaatactcagtgggtctttggcatagttgtttatactggacacgacaccaaactcatgcaggtaaaacatttctatgctgatttcagtcttttttttctttctgcttttattgactagaaggtggaaaatgcagatgttgcatttaggaagttcaaatttgtctatgaacctaaatttggaaagaactgcctttattttagtttcttaggtagctttwtctagatttctgttctcttatctgatatttgttaccgtatgcctgaactacaaatggtctttgttttctggattaggggaacaatcaattctaacttattttatcttctggacttaagcgggaattagttctaacttttaaatttctctttctacttctcctctttatcccattaattaggattttatagcaaattgccttatttaactgaactttagagactttaaaatcagttatttttgaaccgtttagttttcatagaccgaagaaaaaaatgaagttaaaatgattttgctctttttccctgttaatgttttttaaaaaactgtttgtgaatttataggtcacattgctattatgatgtattttgccagacaccttttgaaattctacagaaatcagtgtccctgtatgtcatttcttacatttgtttggtatcacttggcatcttatttttgccaatggtggctattaatgagaattggcttttcagcttgtctgttcttttgtataacttctaaaatgcacatttggctgtatttcttgatttaaaaatatttagtgaccacgtaccaagtctagtgctagaccatatgggtgcaatagtgaaaggcccaggcttatcctcggggagccagttgggctaaggagtaatatagaatgacaaagtagagagagagatactggaatgtgtgtcattactaagtgctgtcagtgtgtataggagggtcattcaacctaggctggaagccagtggactacatgctaagaatgattcccgtggcagaagcacattttagatatcgagctagggaagggagactgttgtgttggtctcctctttgaggtcaaatgatagtcagatgaaagaggtaagtattagaggagatgaagcagtagacgttggtggccaccgcagctagtaaacacattggagacagggaggagagatgggattagaagggttgagagactccctgaagttgaagaggattgttggagttgctgagtgacaggctgatcagtgggtagaatcttgtctttgtatttctggggtagagagtttctagcatgggagacctgggagtgactcgtgtgagtaggaagacaaaggcagagctgttgaaggccattcaatgttgacaagtaaggaactgagagactaaggcatttgatgggccagtgctgtgattttgaagatgcrataatggtgaagctgggccagaaaggaatgccatgagccagttgtcaagtcttctgtgagtgacagggagcaactgagaggtgtggcctggctacgggggaggggcagaaggtagtgtagccaaatggcgtgaattttatgagtgagttttttttttttttttttttaacatggcatccaaggaataaaggtctagaagtattactaggtcttgaatatacatccagtaatgctaccttcagaggccaaaggatgcagatgtctactggcgcaccgtctgcttgggggtactcaagggaggcgtgtccttgacttgtgaggcaaggaggagagagctcttgagggagtgggagtacagagggaagttcaggagctggaagggtaggggcccaggtgcagtggcctgttgcagagcttgtgtgttgaagcaaggcgggagggctccatggcagctagaaaaatgaagagttggtgaatgctgagaggcagctcttgggtggatcaggattatttagtgtatctgaagtgtgcctgatccatcgcccctgctaggtccttatccattcacaagggctgactggaatgctttaagtttattgtttctgagcggcctgcatatgaagactttatcttgatgaatagtttagtgctgtagccatgcaagaactcaggaggctgagatgggtggctcattgggaccaggagtttgagaccagcctgggtgacatagtgagaccccatttcaaaaaaaaaaatagtttagtaccctgctacctagaaagtatcctttaactcccatagtgcagtgtcagtaacccttgctgcacgctttgggagctccactaaccacaaatcactacttctggcttttgtttgtttgtttgttttttgagacagggtctggctttgttgcccaggctggagtgtggtggcgcgatcttggctcactgcaacctcagcctcccaggctcaagccatcctcccacctcagcctactgagtagctgggactgtaggcacacaccaccatgcccggctaatttttgtattttttgtagagacgggatttcaccatgttgcccaggctggtcttgaacttctgaactcaagcgatccacccaccttggcttcccaaagtgttgggattacaggcatgagccacagttcccagcctacttctgttttttatgatgaagtggcagacagatcatgggtagctagctcacatttggtcaaggccccaaagctagttttaagattgtgcatattataaatttaagcactttccaatatttcttatacactgggtttttttttaacagattgtaatatggtttttctagagcatacattggtaatatagcttttgctctagaaaaccaatattacatgagttaattaaactatcttttaaaacgctccagtcttctcttcagtgagtaaggcatgcactgagtttgcattttgtgagtgtgagaggcacttttccttgtccctaggtgtgagaaacctctttgcaaggcttcttgcatgttgactgctcatgtatagaatgatggaaaaccccagaaacatctgtgctagacctgctgtgcctttagggctgaaacaacaggtaaaaataatgagctttcaaaaggaatataacacacatagctggaagccatcctgtttgtgaaataacattgtttgtctgtgcttgtgctacttgaccacagagaggaaactcaattgctgtcgggttcttctacctttttttttttttttgaagtctctcacctcaatgccttttgcccttcaagtttccttcagttcatgtttagtttacttacatgtagaaatatttatgtctataatttctattagttgatttaatgggaaaaagagcgattatcacactaattacagcgaacataattacaacaaatcatgcactattttgagtgatgcacatatatcaattcatttattcctcacaatggctaggtagtatgtgctcattttacagatgaggaggcttgcagcatagagtctcctagtaacccaagcttacaaaactagtaggattcaaaacacaggcagtctggccgggggcagtggctcacgcctgcaatcccagcactttgggaggctgaggcgggtggatcacttgaggtcaggagttcgagaccagcctggccaacatggtgaaaccccatctctactaaaaatacaaaaattagctgggcatggtggtgcatgcctgtaatcccagctactcaggaggctgaggcaggagaattgcctgaacccaggaggcagaggttgcagcgagccaagattgtgctgctgccctccagcctgggtgacagagccaggctccgtctcgaaataaataaataaataaataaaaataaaaartaaacaaataaaataaacaaaacacaagcagtcaaactccagagtcagtgtaacccaggagtccccaagccccaagccacagactggtaccagtctgtggctgtgaagaaccaggccctacagcaggaggagagtggcaagcaagctagtgaagcttcatctgtatttacagcagctccccatccctcacattactgcctgagctctgcctcctgtcaatcagcggtggcattagattctcataggagcgtgaactctgttgtgaactgcgcatacaagggatctaggttgctcattccttatgagaatctaatgcccagtgatctgtcactgtctcccatcacctgcagatgggactgtctagttgcaggaagacaagctcagggctcccactgattctacattatggtgagttgtataattatttcactacacactacaatgtaagagtaatrgaattaaagtacacaataaatgtaatgcacttgagtcaccccaaaaccatccccacccaagtctgtggaaaaattgtcttccacgaaaccagtacctggtgccaaaaaggttggggacagcttttctaactagaattcaatggcctgtttctcaggagggaataaaatatctaagatacaggtctgatttcagcttttcaaaatctgacattttgacctgtttctatttataagtccgttacactgaagtagctgggttcttcaagaattttatggaagaatttataatacttgtaggaatttaacattaaaagctcatcattgggccaggtgcggtggctcacacctgtaatcctagcacattgggaggcggaggtgggcagattgcctgacctcaggagttcaagaccaccctgggcaacatggtgagacccctgtctctactaaaaatacaaaaaattagctgggcgtggtggtatgcacctgtggttccagctactatggaggctgaggcagaagaatcgcttgaacctgggaggcagaggttgcagtgatccatgatcacgccactgcactccagcccaggtgacagagtaagactctgtctccaaaaaacaaacaaacaaacaaaacaaaagaaaacccatcattgatcattgcaagtaaaaatgttcagggggtgggagtcagtaggccaaggttggctttccacaaagtgcacatgttgaagcttgaagttttgggattgttcctcttctgttagatgaaagataaagttttctaatcctcctaattggccagaattcagccactgaaaaagataaaaagtcaataataaatggggtatagaaatgaggtttatgataatttttttcctgcctgtacatttagtgaatatttattaagaatgatgagatcttgcttagtttttaagagttaggatgaccagtcctggacctggcctgctggcccttacgttgaggccagacctggatgtgtcgtctcagttgaccttgatacagtatttgattgatgataagttggcctttactaatggatttccatttagactcctgaggatttttaagtccgtaaaggatgaataatttagacaaataaagtaaaagggaaaaaatagaaataaaggaaaaagctgctgtgttgtttagatatttaaaggacttagcttttcaaaatcaccagtacaatcccccaactcctctgcccccaaagaaaactgtggggagatagtatttttggtttgccaatagaattcaaataacaatttcagtgatgtggtataaatttttcttggagcttaggagtgaattgcctcatgttttcatctcagttttattttcacattgtgactttatttgtattcttatctttggagacattttcatcctagctcttttaatgatcagatcaatggagactagtgaaggagaatgctgacttaagtttggcacaaggtaccatttttatggttagtgccttacaaactctcagattatccaaacttggcaaattggtgttgtctcttaaaagtccgggcccggccgggcgcggtggctcatgcctgtaatcccaccactttgggaggccaagacgggcagatgacaaggtcaggagattgagaccatcctggctaacatggtgaaaccccatttctactaaaaatacaaaaaaattagtcgggcatggtggcrcacacttgtaatcccagctacttgggaggttgaggcaggagaatcacttgaaccggggaggcagaggttgcagtgagccgagatcgcaccactgcactccagcctgggcaacacggtgagactctgtctcaaaaaaaaaaaaaaaaagcctgggcccatgattcatggaaggagacctgcaggctgacactcctgtgtgagcctctccctgtccaattcctgacttctgatttaagtcaggaattatttcacccccaggaatggattataaataattcccctgtggctttcctctcttcagtgtctccttccccaacctgctgttattactgtactggtttcctctggctgctgtgacagatttccacagttttagtgacttaaaaaaacatgagttattgtgctgcagttctataggtgagaagtctactatgagtagtagactccctgtgctaaaacccgagatgttggctgctcttttctgcaggcttcagaggggactctctctgatcatttctctgtctccacctctccctttgagcacaattcagaaagcttctcccttttgatgacccttgtggttagattgggtccacttgggtaatccagaataatctctccctgtctcacagttgttaatttaatttaatcccatccgcaaagtcccttttgctgtataaaatagcacactcaggtcaggcatggtggctcatgcctgtaatcccagcacttggggaggccgaggagggtggatcacctgaggtcaggagttcgacaccagcctggccaatatggtgaaaccccatctctactaaaaatacaaaaaattagtcgggcgtgatggtgggcgcctgtagtcccagctacttgggaggcgaggcacaagaattgcttgaacccaggaggcggaggttgcagtgagctgaggtcacaccactggactccagcctgggtgagagagtgagactccatctcaaaaaataaaataaaataacatactcgcagtgccccacaagtaggatgtgggcattactggtggaggagggggtggtcattagtttgcccaccataagtaccttcagatattttttaataaaatgacttcaggtgcataactgtctttctcaaacagttgtgttgactttcccatggctgagaggatctagtcccaaatgttccacctgaactggagtgattcttgaatctagccttaatgaatctttctatactctcctgccaacactggcctcagctccacctgggctggtttccccccagyagtgagaaggcaggtgctaagcctgtgataaggttgccattctccttccgtttctcctttgctgtctacatcattcaggatgccactcagctttctcctgtccaggcccttcctgactcttcttggtcctgcttcttgttcccagttctccaagtgaactttttgtccatccacttattttgaaaccctctaatgttctgttttgcattattgatatgtatgtgtttgtgtatgtcttttttattcctcaaattctgagctccrggaggaaaaatatgtgctttagaaatatctctgtgtatttattgcagagctgtgctattatcgtgaaggtcttctctagatttttatggtatggaatgtctaagtttctcttgaattaccagtgttctgatttctttgaaactggactatatttagaacctgttgtgttctaagataaggaaagtgacaattatatgctaagatataatcataagaagtacagaatgaatcatgtaatgttggaatgtgttctttaaactggtagagtatgttgtctttcttcattacttaaaactagctattgattcaggagcatggtacacttttgaattgcattgattatttggcaaaaaaatagtcttttacttgttggttgttaaatatggttgttttacctcctttcccccaaccccttgccccaaatctgttctgtgacccttactgactttcaatgctgttgtgtagaattcaaccaaagcrcctctcaagagatcaaatgttgagaaggtgactaacgtgcagatcctggtgttgtttggcatcctcttggtcatggccttggtgagctcggcgggggccctgtactggaacaggtctcatggtgaaaagaactggtacatcaagaagatgggtaagtgtcrgggtgggttgcttgttccagtggaagaaaaccatttttgagatgttcttgcagccatggttgaagtgtggtgtccctgccgtccttctgttccctttggttactgtacataatgccagcctttcaaggagaattgagattaggatcatgtgatgaaatgaagatgggcacatttgggacttgtcttatactcaaatggttatttttaaactctgtgttaaagtattttcttagtggttgccctaggaattacaatgtatttcccaatttatccaaatctacttttgattaatactaacaattctagtcaaacacagaaatgtcactccagcgtacctccatttcctctcctgcttggtgctgtcattgttatattccatttatctgtgttgtcaactccaaaatagtgttataataatttgtgtctcttaaagaagctaaaggaaaaaagaaaaaaagtatattgatagtgttttttgttgttgttgttttgagacggagtcttgctctgtcgcccaggctggagtgcagtggtgtgatctcggctcactgcaccctccacctcctgggttcaagcaattctcctgcctcagcctcctgagtagctgggactacaggtatgtgctaacatgcctggctaatttttgtatatttagtagagacgggatttcaccatgttggacaggctagcctcgaactcctgacctcaggcaatctacccgcctcggcctcctgaagtgctgggattacaggcgtgagtcaccacgcctggccagggttgttttatattaacatatttacttaccatttccaggtctcgctcttcatttcttcctttggatttaacagctggtgtcatttctttgcttcatgtatcttcattctctcctcactcctttgcactgtcatatatattacatctgtatataagttcaacaatgcaattttatgatgcttttagcaattgcttttttaaaattgggaatatataattatactmtcttttataaatcctgtagaattatcattactagtgtcctttgtttttgtggattttaattactgtctggtatttctttcatcctggagaacttctttagtatttcttgtatttgtaattgtcaggtagatatttgtttataccttacagatatttgtaactattggaacttagagatcctatttagaaactccttaattctacaggagaacaagagagcaaagtaatatgtcaggaagaaaagcaaccagcaggaaaagtggaagggttggtagtgagtaggaagtgaagggattgtggaaaggtaaaattactggccagcatatgcctgctccccctgtaccttcccagctccttgtctttccatcacagccacgcttcaaaactctaaattggaatcagactaccaccatttgatgtaatttcctgggaaaaaacctagtaactatggtttggagccattacaaattatcagtctccctccaatcccagccttctgctatctttattctcattctagttcccttcacagctttaatatcagttaaacgctgttgcaaccttctccttaagcctcttgctaagttaagaagatctcactactttacccttcaagcagaagatcatggctgtcaaggaaagaactttccctttgatacccccagaccttgtccccctctccctcccccattctctgttcctcctggagctgatgctgcctctgctgtggactccatcccctagggtcctgttccatccttagggaacttgttccgtccagatatcccttctcttatctttagctgggctcaagccttctctctctttgtctgcttctcttgttcacacttttgtccatctttccagctctttggagtatccccaatatacacgtaccttagtgagcttgtaggtgttccttacaaccatttcaaaggcctgtcttcttttctacattctttcaagtttgcttcttttctctgttcttcaaaacttgaaagcagcatttcttcttctggatggccttcagtgaccatgccttcccattagaaagccttctgtgttggttcccgctacgtcctgtgagcctctctttagcggatgcatcctgctgtgcagtcgcattgtggggcctgtgtgcctcctacagaaagcascctttgaactcacsrttcctgacatgcaggaggtgctcaataactattttaacatgaatctctaaatgagccaatagactttrgttgtgaacacctttcagatactctggtttccttccacagacaccacctcagataattttggatacaacctactgacgttcatcatcttatacaacaatcttattcccatcagtctgttggtgactcttgaggttgtgaagtatactcaagcccttttcataaactgggtgagtattaaagcagagttgaatcactattttccaaygctatttcagagcctttggcatttaattgaghrctcaaaaaagaagaactatattcatttaccattaggtccaggggcttaaactggccatacaaagaactggccagggatcaccagtgagggtgtttttggggaatggaagggcagtggtacctattcaaggsgttgttgtgaggattggtcagagaatggggtggaatgctgagccagtgcctgtcatctggctgcacctgctattcacgcttttaacatctaattaaggctgaagaaaaggcctcttgggtgtgtttactatagtggtcactcgcatatcaaaattcattgtgatagtcaacttggatttgattgtaagggtggagataagatatttaaaggactgccatggctcttaagtagtggactttagcagccagtatttgtagaccaggcactttgatgtgcatttttatttgatcttcacagcaatcccgtcagcaaggtgagaatcatgagttagtctaggttgtgaaatgattattttgaaatcaaatcatatctatataaatataaatcatgtgtgtgtgtgtgtgwrtrtgtgtgtgtgtgtgtgtgtgtgtgtgtgtgtatttcttttttagatgaagtcttgtgctgtcacccaggttggagtaaagtggtgtgatctyagctcactgcaacttccatctcttgggttcaagcgattctcatgcgtcagcctccctgagtagctgggattacagacatgcaccaccatgcctggctaatttttgtattttgagtaaagacagggtttcaccatgttggccaggctggtctcgaactcctgacttcaagtgatctggccacttcggcctcccaaagtggtgggattacaggcatgagccactgcgcccagccaaaatcagcatttctattaaaataaaagggttttagattacccattcttagcttcttttctgtgttaatctgaatgaagaattaatggtatatattttctgaaatcctgtctcttgttctctctctctcaggacacagatatgtattatataggaaatgacactcctgccatggccaggacatcaaaccttaatgaagagcttgggcaggtgaaaaagcctctgggaactttgggaatggtgacacgagcatgagggaaaatgagtgttagcagaagaaccatggaaagattttgcaaaaatacttctccatgaacatggctagaacatctgaagagctatataatacttttgaatgtgccagtaaatataagcgttactcagttttgtcttgctttttgagacacagctatgtcgtatcacccagaagtaaccagaaaaaaaaaagaagtaatataaaaaatacagtgcaacatcatttgggaygcttaaaaaagtgttatcagaagcaaataacggggaaaacgatggctgagatacttagatattgagtaaccctacaaaacgtgtgggggccaatttaaaggacatgcatttctcgcatgttccgaattttgtctctggaatattctagggaacagtatcttttccacctttacccctgaactcctcttgcctttactaagttgggctttgcattatgtctgtgtctgacattgacattcctgtaaggaataacctctttttaaatgtttaatttaatttaatttattttttcaatatttattttagattcgggggtaaatgtgcaggtctgttttgtgggtatattatgtggtgctgaggtttggaatatgaatgatcccatcactcatgtacctgagcatagtacccaacagtttttcaacgcttttccccaaccccatctagtagtccccagtgtctcttgttcccatatttatgtccttgagtatgcaatgtttagctcccacttaataagtgagaatatgtggtatttggctttctgttcttgcattaattctcttaagataatggcctccagctccatdcatgttgctgcaaagaacatgatttcattttttttctggctatgtattccatggtgtatatgtaccacattttctttatccaatccactgttgatgggcatctaggttgagtccatgtctttgctattgtgaatagtgctgtgataaagatgctgcatgtctttttgttagaaccatttgtgttcttttggatatatacccagtaatgggattgctaggtcaaatggtagttctgtattaagttctttgagaaatcttcatactgctttccacagtggctgaactaatgtatactcccaccaatagtggataagtgttcccttttctgtgcagcattgccagcatctgttgttttttgactttttaatgataaccattctgactggtgtgagatggtatctcattgtggttttgatttgcactcctctgatgattagtgatgtggagcattgtttcatatgttttttggccacttgcatgtttctttggagaatgtctgttcatgtcttttgctcatttttttaatggggttgtttggtttttgcttgttcagttgtttaagttgcttatagattctggatattagacctttgtcggatgtataatttgcaaatattttctcccattctgtaggttgtctgtttactctgttggtagtttcttttgttgtccagaagctctttagtttaattaggtcctacttgttgatttttgaggactaacctcttttgaatgccttttgccattaaagattttgacttcatttcatacaccytattcaaacccaccaggaaccctaaggggagggtgctgtaccttcattttatagagaaggaaaggagtaacttatcgaaggacacctggttattcagtgtcagattggggacttcgggttgtctgtcgagatctggctgttccaagcttccctgcctggtgaaggaatactaccatgttgcatctcccctgctcctcattatccctctgtgaaaatgcaggcgacatggctcattgatctgagggttagaaaaactcccttatggaggtaggcttgctttcttcatttttctttcctcgaggatagagtgaattctgtgatggtttgtgtatcatttttgagtttattgccagaaaactgaggttcaaatttgtagactaaaatagacctttgtagacaaaaaaaagcaagtgattgtgtttctttgatataattttccaaacctacttaatttttgtctttatctttccttaaattgtgtatattcatataagtgctctaaattcttagtataacaggatggattgttattacagagaatgtccttggcacagagcacaaatcctcccattgcctttggggctctggtcacaaagggctgaatacagcacccagagcaggccttggaccttgggctgtcaatcctcatttttttttcttttttttggcttatgttctctcattctagaatggctttgtcatttcctttatctgttggtaaaatccttctcctgtaagaatcagtgagttcttggtgcatatcaggctaaatttgccttctctttgaactcttctccagttttccgggcttggttagtctgtcttctatgttcccataacagtcttccaaacataaatacagtaaaataaggggtatgagtgatgtagtgtccatttctctctggagactttgtgagggcgtgggtgtgccctatacaggtctttggttgcctttgttagtttagcacagtgtgcagtatataattgtttgcaggtgtcattgaactggacctgaataatttaaggattgaaagtgttcaagaagtacccatggatgcttcagtagttcatcctaattgaggatatggggaaagtttgcatgaggaagaaattttgagttggaactttaaggataagttaaaatttagtaggcaaagtgatagcaaatcttaataagcccttattataaaatgttcattaaaaatttttttttttttgagatgaagtttcactcttgtcacccaggctggattgcaatggtgcgatctcggctcactgcaacctctgcctcctgggttcaagcgattcttctgcctcaacctcctgagtagctgggattgcaggcacctgccaccatgcctggctaatttgttttgtatttttagttgatgttttgccatgttggccaggctggtctcaaactcctgacctcaggtgatccacccgccttggccttccaaagtgctgggattacaggtgtgagcctctgcacctggcctttagtttttttatatgatattttaattttcttaaaaatgcagaaagaatcctgcttacttaaaggcagattctactaaattttccatacccctagacttactgcatgtaaaaacttgtttaaagtataaattagccctaaggtacgaatagtatatgtagatgtagtatttgacttctttaggagctttaataacttgaagtccctttgattgttttcaaaaaacttcccagtgtatgtttatattgtatcattaagaaaaattactgagtaagcaattcatgtaatcagtccctcttctatacaacagtaaaacactgcttccctagaccagttctctgggatctctggaaggtatctagcactcagcaagtcctgacgcctttttggaagaccactgagaaactggagtttcctctggaggcaattctgttaattactctccctcactaatccatgacataatttctcaaatgttacgtgtagaatgatggtgcatatcattcagtagcacatcattcagtcagagctcttattgcaactccctctgcatatttcggtacactttgattatataattagttatggaagaaggtttgtaagtggtctaarcattaaaatattaatatattttttgttactaatttgcttgctttagggaaatctaccygtttcatmcaggttttgaaaaatatagaaggaaagacttcatttgttgatctttgcatctcaatacttcctgatgtatatttcttttattctttggtttaggtgaaatatctcttttctgacaagactggaacgcttacatgcaatatcatgaactttaagaagtgcagcattgccggagtaacctatgggtcagtgtgtttatcatttactgaaaatttacttgtattctttcaagaaaataagtttatttttagctacttagtcaaatatcttgactttctgatgttttgaaaggataaagtagttactatggaatgtgtttgtaactgaatggatcccaaattaaactctgaacagttaaaacatggtttatttctgactgggtgcagtggctcacacctgtaatcccagcactttgggaggccgaggcaggtggattgcctgaggttgggagttcgagatcagcctggctaacatgatgaaaccttgtcactactaaacatacaaaattagctgggcattgtggcatgtgcctgtaatcccagctactcaggaggctgaggcaggagaatcgcttgaacttgggaggcagaggttgcagtgagccggaattgctccactgcactctagcctgggtgacagagtgagactctgtctcaaaacaaaaacaaaaacagaaaaacagcaacaaaaaaagtggtttatttctgcaaatattaacttggtaagaagtccctgagaatctgtaagtttgtatatctaatctaagaattagatcagttttgatcagaatgtctgtcttttgatcacagttttgtgaccactctgttttccgtttctctggcagtcacttcccagaattggcaagagagccgtcttcagatgacttctggtaagtagattctagcacttcttgacactttagtggaaaagcttttggaataattatttattattattcatttacatttttagagacagcctcactctattgcacaggatggagtgcagtgatactgtcatagctcactgtagtcacgaactcctggattcaagtgatcctcctgcctcagccttctgagtaactaaaactacgggcatgcaccaccatgcctgactaattttgtaattttttgtagagatgaggtctcactatgttgcycaggctggtctcaaactcctggcctcaagctatcctcccgctgtgtcttcccaatgtgctgggattacaggtgtgagaaaccaggctcgccctggagtaattttattagcatttctcacctgcctatttttgtatgtaaataaaagttgcatatatgttgttttgaaagaaaaccagataaaatttaaggatgaacatggctttaaaagtccagggatactataggacttttaacaaaaaaattgactgcccttggttcagtgtttcccactcactccctattccctggaggcagccaacctcagtgcttttgctttttaaaaaattttatttttatatttcaaaataatgtttatattagtttttaaattaaaaacatttaggacaggtgtggtggctcacacttgtaatcccagcactttgggaggcctagacaggcagatcactggacgtcaggagttcgagaccagcctggccaacatggtgaaaccctgtctctactaaaaatacaaaaattagctggatgtggtggcgggtgcctgtaatctcagctactcgggaggctgaggcaggagaatcagttgaacccagggggcagaggttgcagtgagccgagatggcaccactgcattccagcctgagtgacagagtgagactcttgtctcaaaaaaaaaaaaaaaaaaaaaaaagacaaattaaaaacatttagacattgtttgactttttaccatggaaggtgagagtttatctcctactcttgctccaccccctttggaagcatttcagattttctgtacctccttaggcatatgccatttcaaccatgaagcttcgggcaggtttttacattttttcctttttttttttttgagacggagtctcgctctgttgcccaggctggagtgcagtggcatcatcttggctcactgcaagctccgcctcccgggttcataccattctcctgcctcagcctcccgagtagctgggactacaggcgcccaccaccacacccagctaattttttgtatttttagtagagcggggtttcaccgtgttagccaggatggtcttgatctcctgacctcgtgatctgcctgtctcggcctcccaaagtgaattttttccattattttggacattcactggaccaccagtgggccattctgtctctgagtttcctcttcttgattctcagaagtgtctttgtattatttctgtgataattttcctcctctccagcttccctgttccctctgcatctcttgatagtcagatattgaatctcttgggttgatcctccagttttgttatcgttctgtctcattttccatagattttttttgttttacttcctggtatttttttcaccttgatcttctatccttcgtcatgagttttctgtgtgatctcactttcagttttcgaaagcattcccctaacttcgcttttgcattccgtgttttctctgccctcctctcccaccctccctactgcccacccctggtgttttgatttattttctataggctttcttcaaaaacctggtgatcattggctgtgtgctcatatattttcatttctttttgtgtaaaatatgtgtaacataatatttatcatttgactcttttaaatgtacaattcagttgcactaaatagattcataatgttttgcagccatccgcaccattcatttctagaactttttcatctgaaaccctatctattaaacaaaaattcttcattgctgcctgcctccagaccctagtaaccaccattctgttttctgtctctatgattttgcctgttctaggtacctcatgcaagtgaaattgtgcagtatttgtgtttttgtgtttggcgtatttcccttagcatgtcttcagggttcatccatgttgtagaatgtgccagaatcttctccctttggaaggctgagtaatatgcgattgcatgtatatgccacattttgtttatcccaccatctgttcatgggcatttgtgttgcttccaccttttggctactgtgaataacgctgctgtgaacatcgacatacaggtatctgtttcagtctccgctttccattcttgggggtatattcctaaatatggaattactgggtcgtatggtaattctgtgtttgactttttgaggaaaaaccgtgctattttccatagcagagccaccatttgacattcctgccagcaatgcacaagggtttcactttctccacgtccttgccaacacttgtgatttttcaggttttgtttgttttataatagccatcctaatgggtatgaagtggtaccttatcatagttttgatttctgtttcccttataaatggtgatgctgtctgtctgcacgtgttttaaagcttatacacaagaaacctgactgctagggctgtgtgtggagtggggccactgtggttgatgacggattgcctgcctggagaatggtcagccaggacccactattgtattaagggatccctagatgtcagtgtctatgggtctttcttgtcagctgttcagctttcttttcataaaaagaactttctagtttcctgccaagggctataaatttggttcaactgttttggaagctgtgtggaggcagtgggccagtgattgtacctttcagcttatatagaatttcacttaaaaccctgttttgggaggatgccctaacctatccacatgtgtgcctgtgtgcccagtgtgcctgggctcaggactactctggtttaatttctgtaaaagataagcatttttttttctggctgtggaagtttcagttgtctggccgcatgggatgtgaggattcttgaaggctgaatgttcctcaagtggatgtggaagctgtgctgtcttcctccttccctgtacctcacaggtgccttgtgctgccatttgttccaccttcccagcacactgttgagggcatcagcttgcattttaggtgctcccccttgcaagctgttggttactgttttctgtgctgttacgtatttcaagttaagactaacatacactctgctgtcatgtcttctttcattgtctttgtcttgacaacgttgaagtttcaagaggaggccaggtgcggtggctcacgcctgtaatcccagcactttgggaggccgaggtgggtggatcacctgaggtcaggagtttgagaccagcctgaccgacatggcaaaaccctgtctctactaaaaatacaaaattagccaggtgtgatggtggccatctgtaatcccagctacttgggaggctgaggcaggagaattgcttgaacatgccaggcggaggttgcagtgagccgagatcacaccattgcactccagcctgggcaacaagggtgaaatttcatctcaaaaaaaaaaatttcaggagggagtggagataaatgaatatatagttgattcttcacattttcttcaatgtgatagctcacagccatcatattgtttcctttcttgtaattatttgttgtcttccctctcctacatatgmgctctggccacaaatgattgcatgtatacagtgcaatatttactcttgttttatttgctgtgagcagacactcttagaagttttctctggtggaagtgactcgggccaactgaaatgccagccatwgtcttgatccctggcttctgtttcttctccttgtaactattgttccttgtaactgttgttctttacaataactcgtaaagtatcttatttatagtaaactccaggattaattgttttgaggtttaaaataataatacagaattycaagtctttaaaagtttaatgtgaatccctayaggactttaggtatggttcttcttgaaggcagattctttccaggtttgggttagcttaacagaaacttttaaattgaataaattttctctgttctctcttacagtcggatgcctcctccctgtagtgattcctgtgactttgatgaccccaggctgttgaagaacattgaggatcgccatgtaagtgctctgttttacttcgaagacagcaaacagcttacggtgcaactttcttttatatatgcatgtagtattttgcaagttgcagttttagagcatgggaaaagtctcgacttgatgatgtgagtccttctgagaagtgatcttagacaaatgctttgtggtgaacgctatgcataaattagtgtatttaaatacttggtgattttgtaaagtagcacaccaagatcaagacgagttttaccacataattctgtaacagttccaatggctgttgctttgtaaaatttctgcagtactattttgtcacagttgtgaatctaagaggccaagtgtaattgcatatcctttgactaggatactttaggaaacaaaagtaagatatatataataacaggtggcatttattgcattctactgtgtgccaggcaactaacatatatttctttcaacactttagtcaacatttgaatcacatctgggaggtgacaaggaagttaaataaaagattaaattggcgagtagttacccagcgcataaatgtagaaatgagccttaaacctcagtctgttagatttttaactacgacatcacaccacttcaaatcagtattaactgcagaatcacatcaattcactgttattttatttgttatttatttatttttaatttttctataagggaaaaattgtattgaggaacaggtggtatttggttacatgagtaagttctttagtggtgatgtgtgagattttgtgagattgtggtgcacccgtcacctgagcagtatacactgcaccatatttgtagtattttatcccttgcctccctcccacccttcccccaaagtccccaaagtccgttgtatcattcttatgcctttgcgtcctcatagtttagctcccacatttcagtgagaacacatgatgtttggttttccattcctgagttacttcacttagaataatagtctccaatctcatccaggtcactgcaaatgctgttaattcattcatttttatggccacgtggtattccatcatctctctctttatatgtatgtatatgtgtatatattatatatgtatatattacagtttctttatccactcattgattgatgggcatttgggttggttccacaattcacagttgtgaattgtactgctataaacatgtgtgtgcaagtattttttcctctgggtagatacctagtagtgggattgctggatcaaatggtagttctacttttagttctgtaaagaatctctgcactgttttccatagtggctgttctagtttacactcccaccagcagtgcagaagtgtttcctgatcaccgcatccatgccaacatctactgtttttgattttttggttatggccattcttgcaggagtaaggtggtattgcgttgtggttttgattcacatttccttgatcatcagtgatgttgagcattttgtcatatgtttgttggccatttgtatatcttcttttaagaattgtctattcattttcttagcccactttttgatgagattgtttgtttttttcttactgatttgtttgagttygttgtagtttctggatattagtcctttgtcagatgcatagattgtgaagattttctcccactctgtgggttgtctgtttactctgctgactgttccttttgctgtgcaaaagctctttagtttaattaggtcccagctgtttatctttgtttttatcacatttttttttattgcatttgcttttgggttcttggtcatgaaatccttgcctaagccaatgtctagaagggtaattcactgttattttaaaggctactctgaaaaatgccaacttagaaaattattcaatgatcaaaacatttcacaactagttaagtcagtataaattagatgtaatatgattaatttttttttctgaaaaaatttctagatttaaaattaggtaaacatgagcaaaattaaaagtttatctttccaaatttccaaaattttaagagacagatatatttaaaactttttctaagttttcatgaggaaatcctacttttctctattgaagttagtgcccatttgttgctagctcttctgaaatgtgagtgtataaggctcgcacacccacaggctgtgatgctgctattccgactcagttcttggtgatgctgatgaagtggtccaagcccacagaggatgctgctggagtctatgttctgtttcagtcacagacagctacagaatcctttcttggattctgatcttagaggtagatccagctactaggctgaagattctccaagcagaaaagtggcgcctctgaagaatcgtctctgcaggaaggtggttttaatcaaagatgtcaaagaaacaagtgtactttgagcactcgagaggaaagaagtgttttcaaatagtattcaggttgagggtaaccacaaaggtgggcaactgaatatgtctgttcaagttaggatggtgaatggaaaaggagaaagtggcagggtgacataggagctccggagactgctcttggtccagtttcacgagcttgctttcctagatcaacgaggagaaagtagcaaaggaaataagatgagcagcgtgtatggaacatcacagaattccagtaatgggctaggaatagcagcaaactattggatccccatttacatcagagactcatttatttattcactcatttcacaatctatttaaggacatcatttatatgaaataccttgctcttggtactaggggaagagacgaataaaaaacactcaaaggattcctgttcactggggaagcagacatgtgaaattcttagaagccagtgtatgcttttgcaggacaggtaaggtgcaactccctgaggaggtgattttggtttgtgtagacagagaggaatcccattctctttggtgactgtcatggctaccataactgttgacatgkgagcagtgtatttgcactgwcataaaggtgggatgccatagaaacccagtggcctggggcaaatccttacttggagaagagcttctctggggaccccctacatgctactgggattctagtgtttgaaagatttcaaagcttggttcagttcatttctgactctcacaggtgttctttccaaagctggcccgggactggtgttttgggtccctgtgacgttttggggttttgactgttcatcccacactcttcttgagcctgtcctctgttgatgtttgaatggagatctgagcacagctaatacctctcccattgccttcccctacccactgctttttcctgactcctccttggtggccatggtgagtggaaagaactttaggaagaaatcccactgtttatataagttagtgatctttcttcttctttcctttcctcctcatcgtctgccctcctgagccaaatttctttttagtttagtgggaaagccattgagagtagggacaggtgcaacccctgtgaaaaggaagccctgctgtggggacattgtgatgaccatccaaacacagagacttcaagggcattttaatctggatactcatagtttcagtacaagcataatgaggaattgatcgattggtttgggaatttattttctaatttttagtaaaagcctcctagcctatgtgtaccatttttaagctttcttggatccttgaggccttctgaggtactcttcatctcagctactatgttaactaaactctttgacatttaacatctagctgcactacaataatgaagaccatagaataggctccaatatttttctttggggagatgtgggattgaattaaatgtacccattggaggtttttaagcagtttaaacacagggcctattagattacttgttcattttgccaaaatgtgtctgtggagagggaagaagtatttgaggatttgcggctgcacatgccccacattctcatctaaattgtcttgggactattgactaaaattaaaacatttggtccaagaaaacccttactttcctcccaagggaatacttccatttgctacagaattttctttttttcctatgtcatcatttcaaattttctggttcctttaggactgtgttaagctttgtgtgggctgatagccaagatggaatttggctcttagagaatcaacctatgagaaatttyggaggacaatttatgcaaccccctgcttacattgctaaccagtgtgtgggataaattttcaaaggttcaccaaggaagaagatataactttcttttgaatcattatgcctaagatttctgagcttgagtcttcaagaagaaatcacttatatatgtatatgatttggataatttgtagctgcaattttgcttgcaaaacaattttaaacatgtatcattttctgctattttaaattcaccgaataagtagaaaatattcatttctagatatatggcattttgtacatattataagctgttaactgaaggaaaaatatagtatcatcctgtttttatgaggtacatacaataggcaaattcatagatacagaaaacaaaatagaggttactgggggatagagagaagagagaatggagagttattgtttaatgggtatagagtttctgctggggaagatgaagttttgtgtatagatagtggtgatggctgtgtagcattgttgaatgtatttaaaatgccactgaattttatacttacaaatggttaaatgatagatattacgtgtatagtttaccacaatacaaatttttaacatctaagaagatacacacayacatatatacacacatgaatataagcatccataggcttcagattaattttgtctcttctccctaatttattatagaatgcaataggaagaaaaccaatgataggttaattttattttaggatttaaaaaaaatcttcatggattttgtctggcttaccatttgaggtagaaggctttatttgtgtgtgcaattctttataactcttagaaaatatctcactactaggtttacttatttgtaaaatctaagacactttttatgttgtttcattacgggacaaggttatgttcaggattggaaaattctcaggtacaggggaaggcaatcttgaattgaagctaaattctcacataaagtacttttggggaaaatttcttaccatttttgcaatgcaggccttgaggaatgtgtaaattccctaagctcatgactttactgaactataatttaaggtgccttttctcttcatgataagaagtagccatgtaaatagctgtgatttgctkccataaaattctgcttaagtcacattcacaagacagagaagaaactaaaaatattcttgtggaagccgtcattcatttatgactaaaaaaacagaaaactccatcaaaagaggaaacacatagctgcttccttcacatgaagatataaatctatctcaattttatagccagttgcctatttaaaagggatgcactagaacactgacattaaaataaccccaggacaaggaagcttgcttatcacccctgccttgaatgtaattctggaagtgctagctcctgcagacaggtgaacattgaaagtttatatattgggaggaaaagggaaaacttctcatttgtgggtgatataattgtctactttgaaaacctaggatagtcaactgcaattcagagaactagtaggagctcagtgacaattggatattaacttacaaaaatcaatgtttctacttacatcccaacaagaaactactgtaaaatgtaatggaaataagattccattcataatataaaaggcaatagataaaatgccttacacagtacttcatgtatagtggtcactgaaataatttttgagcaaataaaataattaatagacgtgccaggtcttatatttagaatatttagaagcttttaatacataggaagacacacttttcttagatgggaagacagcattattttcccactagttataaatgtgctctaatcccaataaaaaattatatatttttttcccagagagaataagagaattttattaaatacatatccagggcaattctggttttcgttgctgttcaatattaatgagcaagggatgcactgctttacaggtgttgagagattataaacttaaagaatagacactgtatagaacagatgtcggggtggggaatgggagcctggagatgggagcatcttctgtttatggggcctgaggtacagcagtgagggaggcagaacacacgcttccggaggatcttgcgagagtgaggcagcagcacgtgggtgaagcagaagcacagggaggcggaagcagaggggcaagtggaagcacgtggtgaagtgcaagcatgtggggaggcggaagcacgtgggcaaatggaagcatgtgggcaaggccgaggctcctggggaggcagggtgtgtggaggtacaggaaggctctttcgtcttttctctccccatctcttgagctaaagcgcaggagctgcattccaagagaaacctggggattagtgcgcgtcaggagaaccggcttggggactccagaccagagcggtagragggggatctgaggtccatattaaggacctctaccctgtcctacagggagcaataggatgactggatgttagttggggatctgcttgtgtgagccctggtgcctgttgaaggtgttgtatctgacactaatcccgcctcaygtttgcagcccacagccccttgcattcaggagttcctcacccttctggccgtgtgccacacggttgttcctgagaaggatggagataacatcatctaccaggcctcttccccaggtgagggctctggccggatgcgccctgctggccccttctcaggacacctgggtgttgcagttattcttggaggtgttgccatgtagtccgtcccacagactcggctgtctgctgttggcctcaccctgtggccaggctgtggctacaggtgcaaagccgtagagagcccgggatgggctctcctgactctcatgactcttttttaacagcaaagggaggaccccggttatgttgcatctcccagcagaggtgattgggcttgacagagctctgaagaaagaacagagctggcttcttcctcatcctccccacctcatagattttccgcctgctggggaagctgtgcatgggggtactctctacccacttcctgaggcttgggaatcccacagcacaactaaaatactgccttgctcagaggagatgtttggtgggagtcatgggactattaggttcattggagagaacttgatcccaagcgagaatagcaggaatagaaatcattcttgtcctggtgaattagcatatatccaagcctcccatctaacaggagtgctcatttcagaaccctggtggtaggaaaagcaagtgcttctctatcctgagtctttactattatgcagataacaccaggcctccttcagtagagcggattttgttaatttgaaaagtgacactaaacagaattctgtcactaccagtgatatgtcaatgtttcaccaactcccacttgacagatgaagctgctttggtgaaaggagctaaaaagctgggctttgtcttcacagccagaacaccattctcagtcatcatagaagcggtgagtaacatgcgtgtgcacatttcagatcacctgcttttgtgaagattgtgtgtgtgaaatggcatgtctattgtaaatatgatagctaaatttctctttcagtgaaaaattaagacctgtgacaaactggagttaatgtgattatattagcttgttcgagttgttttgcattgcagtattgttttccccttcaagatgcttttccacatgtctttcatacactgatgtgaaattatttgtagcaaagaacttcacgaatctactctttgttctataataattgggaaaataacttagcggcccacttgtctttgagggcaggttccacatctctttgtagcctcagagcctaagagttcttactcaatgaagcctcacagtccactgggcttcagtctcttcagctgggagaggagtcagcattaagatctctctctctctctctctctttttgagacagggtctcactctgttgtccaggctagagtgcagtggtgcaatctcggctcactgcaacctctgcttcccaggttcaagcaattctcctgcctcagcctccggagtagctgggactgactacaggcacgtgccaccacgcctgactaatttttgtatttttagtagagacgaggttttgccatgttggccaggctgatctcaaattcctgacctcaagtggtccacccgccttggcctcccaaagtgctgggacaggcgtgagccactgtgccgggctttgatctcttttatctatatgagggatcccccctgcaactggagtcaaggggtttacatgttttctgattttttctgagtttccttacctacaggccaaagggagaaatttagtgataggaaaataattatatcaaataggaggtcaaatacagacccttggaatgggcaacaggggaaaatgatggttatgactggtgaggcagtggtgtttttcatgatgaccagttagaagggctgttttattgttgtctgcattgatgataagggtctggggctagtccctgccatcccttgcctttccctactcctccatttggggaagacgcagggattatagtttttggctttatggatgcatccttaaatccatagacctttaatgcatttgaaattcacttccaaatggtataataacttcgtatggttcctgacttgggagtactgtagtaagttttttcttttagttatatgcaaaacctataaaatatcttatcttatacaaagtacccatttattggcatcttcagtttcttatggagtacagagatgagatcatgtgatcatgtttacttttactatgcttattttagtcaacaaagggaatttagcttaaggaaatgtaccatcattaaaagtggaatgaagtactgattgaatatagaatttcccgtacagaagcttttttaaaaatgaggtctttttccccccttcagttggaggagaattttaatctgaactataggattttcagttgtgtgggtgccaccgcatgtctctgcattgcaaaaatggaggttgggggttggggagcttggatcataggtgagagagacagaagagaacaggcgcttccacttcactcacaatgccaaataaatgtggaacctagagagcctattggtgttgtcctcctggtgttatatgctgcattgacacctctttgttacctcattaaagttttaaggtcatatttctgggggtcacaaaagactgcctgattagttaggactcgtagataacagtaataaaaagaatcctactcaaccattcatcaaaccaccaattctcaaattatagkttttgcatataagtaaaagaaaaaacttactgcagtactaccaagtcaggaacaaattctcaaattcctacatatttacatgaaatgtcctcgccaatagtcagaacagccacatccatgggctgcatgtggacgtggttgatataactgtgagagagggggtggctcctgggagtggcagccctggtgctgggtggtggtagtagcactgggtgtcttctgaatggggatatgatggaaagttaggacaggctgtggagaaagggaactcggaactcgtggatccagagaagtgaataaagattgatgaaggctggatgaagtggatcattagttgttttgtaggatgcaaagagaaggagtggagagttgtgggtgtgaatgaagataatgattccgtcatatacttggtaatttgaatgtgttacttcattgattacttctctgagccctaagagatgagtgcttttgccatgcataagaaagtcacacacttagaggcagaaactggattcaaactcacatgtattgggtgccaaaggccatgttctttccactgtgaagtgttggggaaatgaaaagattagattaaaaatctgaaaatagcatgcgcaccatctggaatttttagatggaaaaaattgtgaatattgacattctaacttgaaagaacccaaagaaaaagagcgtttgattgattgctctgagaccaggtacagattcaccatctcttatctgcaaattcgaaacccaaatgcctttgaattccaaaagatttttcctaaatttggtgaagagttatttggcagcaaaacctaatcagaactgacatgaagctgtttatgatctttatgaatctcatttcctgatatgcatacattttgctgtagaaagcggatgtgttgtgtaccagcatgttaccccagaccctgctggggacattatgatagatggtctagaatatgtctatataatttgtaaaatcctgaattcagaagcataactgggccaaaggtttctgacggacctgtgcagctggtgtcctctatctccatctcttggaagtgcctgcrctccccaactgttagcactgaagaaacgtgagaagcttccaccagaagagggagctctgaccccaccagacttgtgagaaaacagtacatgttgcaaagggctagaaggtgggaagagagagagagagcatatatatgtctgtttatgcttgggagacaattgctttgagattttaatactttgcacctcggttaagagcctatttttcttcctttagatgggacaggaacaaacattyggaatccttaatgtcctggaattttctaggtatgtttctctttcatacgtttgaaataaaataattatatttatttaccagcttcatcagagtgtttacatgattgtatggtatgattcaatatattacttaagtattaaatataataaatgtatctccataaactcttttcttcttggaatttgtgactttcattaaagaaagtgaagtaggttatttttctttgttttattcaagagaaatgctctacttccatgtcctcctttttctttagatttccagagcctgatgttcttgcatcagcagctgcagacatgtctgaatagtttggagcatgtgatgggggcattattttcattggcgtttcccaagtcccatgaggtcattcctcttgctccatttgagcactcctctggagatctgagaaactgacaaatgatgacagatgagatcagttcatcccattagaggctgggtccacgtagggaagttttcctggacttattcggaagcattcttccccagtacaattttaaaaagttagacccaggaatatttgttggacttttttgttcacatagaacattcatagttggttataaggaaacatatcttaattttttgtttctttgcctctttttaacatggaattgtcagtactaaagcaaagttctgttgctatctcaaaggcatcttttcctattattaaaattaggtggatttttgaataacctttgttaaacagtgttataaagctctgtctgctttataaactatttttaataaggattagttttttatctttgtgtaggaaatactttccagccctagtctttagttttaggtttgcaggcatcgacttggaaccatggggaggggaggagggatggctgattacggtggtggctcatgtaggaagtggtgacagtgtccctgcgtgtggaggtgagcgacgtgctaggcatctctccaaactgtgtgcttcatcttttattggaaactgtgcagtgccctgtgattacattaactgggaccagcagttattggacaggcaaggaggaggagaaaagggagttagataaaaacaggtgaatattggtagagacacaaggatgtattaaaatgtatatatgggagaataagaaagaacagaaagataatttgtggttacagtggtgagtctatttctttttcatggactcatctctttcccagtgccacttaatcttgataatactcccgcgaagtacttgctttacacattgagaaactgaaacacgggtttcaagaactgctaggagtgcccacctctaagatagttgagagagaatgcaaatccaggtcagctagagcactataggttaggatgtgggaatttacccagagctgaagagagactctccccgactcttagagacttatagtccattgggaaccaccacactgaaaggccacagagatgggtggtctagggccctctgtagttggagtgtgcttcaggaggatgaaatgttggcaaaggaggatcagaatgtgtagaagaggagaatggtgagtcccgtgtgtgctcgaagcctggtggtggttcatgggagggttggtgggagatgaggtgaggctgcacaggtggacggagagcagtaagaagaattcataggcggtggagactcactgagggctcggtgagtgaggatgggccatgaggaaagacgtgtgaggaagtgtagatgctgcggtgaggggagagagagttccttggtgctaaattgggagtgttctgcgggtttgtgatttctttctactccaattaaaagatgacacagggaggagcttctgagttaagtggatctatactgagtctcccactttcctacctactgggcaagttacttgatagcttagaggtggaaaataaagaatatttttagagagtagagtcagaagtcaatcagatgtggactgtcagtgctggaattctccttttctgtttttcctactgcaaatagcggtcctagtctattttcatggcagggaaagaaataggcttatgttcattagatgtaaataaaaagagtaggagatacacagttaggtcctactttgaagaaaaaggcagggaaagatagaccttgttcatttttaggaaccccagacccccttttgttttgattggtgttcagctgtgggatatgcatcctgtaaacagaccaatgatgactttttttttttcactctcccagtgacagaaaaagaatgtctgtaattgttcgaactccttcaggacgacttcggctttactgtaaaggggctgtaagtacyggagaagcgttgtgcrtagcggagttcttggcagctttgttaatctgccgcttttcctaactgctttcctcatcattccctgattgtttgtccagagttgaaagactgtttcaggtaggctgtgaagttgacttagtagtaaaagcccactgaagataatggtggttcagggcagtgtggcaaagatggtcagtgaaaagcttactgaaatcgttggtttcagaaacagtgactccacgtgtcatgcaaaatccttgaatgggaattcttattccagttttaccagcattgtgttttgactttgggaagacaaagtaatttgtgttgacctatgataatcttgagtattctgatatatattggttctctagcacctcttcttctcaattgttatgtttttttytcatacattatagagagacgtgttttaggtacaaaggcaatgtccatgtgtagctgcattattactgccccttttagtcagtttcctaggtcaggctttttgtcctgtataccttctagtaaccaaatctaaatggtttatctcaaaggaaagatgttattgcttatgagtcttacttatagaactagatcctgttaaattktagtcttatgtatcgagggaaagaattattaaacttattttatttgactatgtcaagaatacagagctctcctaggattaattagtggttgacagtattactaatctttaccagttgtggcaagaagggtggttttatttgagtacacgatgagtagagctttttacaaatgaaggaatgcatgggaattctaaaggcattatatttggactcgctaaagaattctgtgtttatggtaaaatgacttcaattaagctcatctaggttttgttctcatatgatatatttttgaaactttttgtttattcatttgccattgtgttctaagtaccacatcgagtacaacaggtgtcagtgtgaggtggtagagagaggagggctgtcagtatagaagaggtacatacgaaaatgttgcaaaggtgtrttgtatttttataggatttaattctctccaaaaccaaactcagtttaaaaaaatttttgtaatagcctaaaactatgcaatttgtaacacatttgatggattatctgtgggatctggtcccccaacccttcttgtcagtcatggaaatagtcataggcagatgggctgtgcacctgtgtgtttcttggcagaactgagttcagcgcccaatgggttgtgccctctgtgcttaggagctcctcccgtattgggaggcaggattgtacttgagtaatttgggatgtgcattttaccctttctccttctgcgcaaacgcctgataaactttgggatatgagttttgcaaattttggtgaatataggcccccatgtattccaatgattctcctgtatttctggttctccccagcatatttttgtttggcttttaagataacagattttggttttgttggacacattcatacccaatttgttttccaaagctcatgcctgagcccagccaaatgctaaattcctacttacccactcgggtattctcatgcatgttagataaacagaaacaaagccatgcttagtatgctggctggaaggtttactgaaggctttgccagtcacaatgtttccctattttataggataatgtgatttttgagagactttcaaaagactcaaaatatatggaggaaacattatgccatctggaatactttgccacggaaggtaagtggaatttggaaatgctgtttttggccattggagctgtactttcaagcatgttgtcttgatttccaggggcacattcttccagtgcctgccccatcccctcctgtgyccatggcagtgacaagatgcatagccaaatccaaactcatttacctgtagatgcctctgtcactcatcagcagtggtgcagagggagagacaggccaacgcacaacgtgtagaatcacctttagttactagtccctttctcagaaaactcatatggttattttcctgtccctctcttggtgtccttatgtcactggcttatccatgacttaaggaaataataattcatggaacccatagtgagcaggaaaggagttctctggaaggctataaacaacactgatgtcaggtgttcctgmtagcgaatgtcatgatagctggagccacactcaagtgctaactgctgctttctggcctctggctctgcgtgcatgcacatatgagcacatgctcacacacacgcatgggtgtggctgcctgaaagcctggatctttcatgggatagcaygtggggcctttccttgctgtcttgaaacacacttcccacctcctctgcttgctgaaacctgtttactgcacatggatcatgcacagctcccgaacctctctgccatggagaattcactcttctgacttctcgcgcactctcagccttacggaagaggtagtttatgttagaatacaggagagctgtttttaaaggtcccttggtagatgtgggagtgttgaattagagtgacctaaagcacagaktctcttcaatttttttgggcatgctgatggaaaagggagcacaggctgtcccctaggaggtcacgcgttctgcctgcctccattcaccagtggctgtcttgcaggcttgcggactctctgtgtggcttatgctgatctctctgagaatgagtatgaggagtggctgaaagtctatcaggaagccagcaccatattgaaggacagagctcaacggttggaagagtgttacgagatcattgagaaggtaaccgcacacaatacagtcttttcagctccatgaaggacttaaccacctatttcacaaagtatttgaacaggaatccttttactatgtagggatgttctcttttcttgtgtcttaatgaaccgttagctctgaatcattttcttygctttaagaagcacttaattttcatggtctttctgaaagctctagccacyctcagctaaacattaatgatagcttaagaaakatcaggtcaaaaacagcatcagcgactttctgggtttgcttaagattaggcttaatgagattaactcacgctgttgagttacaggagcaatcagaatgctgtggaggctggttagatgttgtacatgctaagctttctcgcactaacttattctaatgatatttaaactttgccgttgctactccacattgcctacttygattttgttgttgttgttattcttttcagtttatcctaaggctttagctcactttcaatttattggtttccttcaagtgtgggagctgggtttcagctttttctgtctcatgttggcagccatagggccatccaatttccagtttctataacttttttttttaaatatagagacagggtttccctctgttacccaggacccaggctagaatgtaatggtgcagccataggtcactgcagcctcaaactcctgggttcaagctaacctcctacttcagccttctgaatagctgggactacagtctcatgctaccatgactggctaagtttcatattttttgtagagattgggtcttgctatgtttcccaggctggtctcaaactcctgggctcaagcagtcctcatgccttggcttcccaaatcccaaagtactgggattacaggtgtgagccaccatgtctggcccagtttccataactttgaaaccatcacttatttactgttttcattcctttgttggtttaaaaaaattctcctctgcttttttttactcagtttttttgtttaagttttatattcagttatttatattcagtcattttaatgtactgaattaaaatgaactgaataaatctgaattcaggtgtttatttgccctgttttactggaaatagccaaaattatttttagaattagaaaaaggtgattaaataggtgatgtgcctgtggtggatgctcaagagttggatcttcccacagtctgtgaccaagtagaggtgctatgtcctggagagacttgggatgtgagtacatggagcaggccgtttgtacagtctctggaatttgcccgaccagcaggcacagtgcgggcagctggagggaaccaaacatccacacccatcctcagcatgagctgatctgccctgggcctttaagaggaccaaaaggggcaacattttatagctaccctcaatcttaagatacttggattttttttctctcactgttaaatccttagcaccacaggtctcttactcctattttgccaggtaagtgtattatctagaattagttctcctcctttgttaaatgtgacataatatgctactcattagtggactgagaggaagggctcaggtactgtcagtgtcctcgggataacctgcccatctgctctgctgccagatggcttctattctaacaagcccctgtatcaagaaatcagtgatgagtactgggctgcctgtgtgtgtagagtgagtccaccattgcaaggcatttggaaatgccatccatccagatgccatctgtagacacaagtataaaatagaggaaatagaacaactgtctcagaaccgtttgattgcctttctttgtcagaatttgttagtgctgttcttaagtatgtgccaatctttaactgaggatattttttcaatstagaatttgctgctacttggagccacagccatagaagatcgccttcaagcaggagttccagaaaccatcgcaacactgttgaaggcagaaattaaaatatgggtgttgacaggagacaaacaagaaactgcgattaatataggtaattatttttacaaataatttcctgatgctgggttttgtatttgtttttcaagtatcttttaaatgtgtctaaatgtttctcaaattcattgacagatgatgttttataggaatcttcattcacaaggctaaggaaaattgacctaaatcaaatgaagatgcctycatgcctgttacaaacattaaaactatcatagttcctggaaaagaattagacacacttacatagggcatagaattcaagatttgacagctttgattttcttattgctttcttcacaaaattttagtctgagactaagagagcatgtttttactaggtttaaatwtgcgttattattttatgtaattataaccattttaatggttttgcccattaatgggcttttctaagagccttgcatctttcccttcccagcttgttgacaacttccttgactgcagagcatcacagagatgaaaattgaagaaaaggaatttaagtcaggataactctgccgttgttaaaggagcacgttttaagtttgaaaaggagttgaagctactcattttttaaaaatctaatcttgattatttgaaacatttaaacactatctggtactttgatcagcattatggtgtaacaagacctggtgcatatgtggtaaaatgaacactgcataacttagaatagcttgctagaagtagactctatttctatatctgtttctatgtcagtgctctgtgttttaggaagaaacctgctagagcctttgtatttaagtgactatagtcctcttcagagtagtcttcttggaatattctcaacataatccaatggtgtccctttcctgaaaaccttatctttgaatcagctttgtctctcatgtaacctcagttgtaaataatacctgccttcttggataaatttgatttaaaaaaatagacaaaagccatgtaatcatttcttgtcagggatatagctaattaaatggaagttgggctcccaaacaacggaagttaagctcacaagagagtaacataggattcataaacagtccctgaagaatcagccatagactttgtccctggatttgtgctggttgtcattcagatgcatggttttggagaacagtatgatggtattttagtgcagaatcatcactgctactagaaaatacaaacccaagcttacagccctttgatgatgtgtcagtarcatttttacaaatgaagaataacacatttgctttttgtatgctatatttctgtataagtatatacattgaccctttatgtgttatttttcatataagtttggcctaaaacacctgctatggatctgtggcccctgttgtttgcatgctaagttgactgttaccctgaaatacttacctaaaatttaggtgatatgctttccaccctattagagcaatgtgaaaaaagtggataacccctcaagttaaaattgagctgtaaagtggtaacctttcttagttttccagatcttgagcgttcccgctggcctaataacctatgcgtgtcactggccctagactgaactaccttcagtgtgttcttggatgtgccctggctggaaaagcaccacagctccctctcactgcctctcatccacaccgcccggcccctgggagcacacgcagccctttttcgtgtgtgttcattttattatacctgagcctatctagctaagtttgggataaacacaagagaaagcaaagtgctgaaaatcaacccagaaaacacaaatggattattactcaaaaacgaaagttttacttgtatgtgatgaggctgctctgagccttatgagataattgatacctgtccaaacaattttttaaaaataacgattgtattattttgtactttttttctaagtgggtgtagtaacgtgtagtgctcatgccagaaccgctcacatcatttgctatctcttaattgatctttcttagcaagtactctccaagaccgctagaagatgatgctttataagctgaggactttttgtcaaagtcttatgtttatcctggaggctttctctattcacattttatctagtgtatcagtcagattcaaacacatcttgggtgttactaagtaagcttctaacagctagacaattgatttctttgagagagctatgtctgaattgtttcttcacttcacctttggaactgaagcttgtagccttgggtgacgccragaatttaaatgtcgtcttgtgatttaaagtatctgtcaagcctacaaatgatgcagaaggctcaggaaagcatataygtccggacattttattagacttttcagtgtgrgaccacaggcggcagctgtcagcagcatgaggtcatgctctagatacagagtgggtttctaagcctgttttctagtcatatagccctcatacccctggtagtatgaaccattatggacctgtctcccataatactttacattttcatgcatcctgtgtggattttaaggtatccagaagatatttgtgaagatcaagtatctagcagttctccttctagatgaaaaaagggaagcagagcaagtaaatggagtgtctggcaagtgccaggcactatactaggagtgttttctgaaaactcttyttttaatatttacatatgaacattcttatagctcgaggaggaaattctacatttcccagggctataccctacttaatgaccaaactggtactaggtctcagggctcttgacttctggtgtggggcttatttagagggattcacatagcttttgcaaaaaatgctttctgaaatttgatttagaagaccacggagaatggtactacatttcatccattccaaggtgcacattgtttttacattttaatgtctctgaaatggggatgtcgtatagttgttgactcttagcttttaattgtcagcattatcttagtggtatgtaccataagagttcatctttagatttggtgacattaattatctttggtgtttggaggtgttggctctttttagagtttggttttttaaaatatatatatctatctcgtagtttgagaatttatttttaaagtttaactttgtattcataacttagaaaaaaaacacacagtcaaatcaagttccaagacatgtgtgtctcctgtgagccagtgaattgtatgtagatagacaatcatcttgtgtataggttttagtagtttgaaattggcatgttgccagaatcctgcaacactgtgcttgaatttatgctaactagctgtgttttgaggagttggcgattttctcttttagcttaaaaatttggcatcagctggtctaaagtgaaatttcagatgtagcccttgtgaatttcgtagtggtcatttccttattaccactgaataaaacgtctattaaatagttatgcaatagatgtggagttttcgcagtctgtaattttttttaatggatgtaggatgagtgagaacaaaatcctagtgtgtattccattttaaagtarttaagttggcattagctttcctcttaaaccatttctgaattgaaattyaaagtctttcccccaccctccctgcattttgttacccatcatttgatacttttaaaaccatttcttatggtcttagaggtttattttttaaattttaatacattttattgtgtataaggtaaacaatatgatgttatgagatacatatagattatctttgaagtttaattttaggaagtgactcaatatgtcacttgcccctcctgtaattgcctgtacattttcttgttcattaaaaggaaggcgagttgccattctcaggtgaagctgggctgtgagggtgacaacactggtgatgttctcaatcttactgctgtttttcacagaagattcagtcctgtatttcttgattacctgcagctaacattgccaggtgctccactataagcttgggcaacttacattccacacttggggcatgagttaattatgagacaaatcagagaatgaaacagatgaggaagtaccaattgtgcagtgtagatgttaattatgactggcttttgtaatagttactagcaaatgttatctattatgtgccmgatactgcactaagtcctttacagatgttttatatttaattcccttggagaatttaaaagkcattatccccttttaaagataaaactgaggcacagagagatgaagtaacttagtctaggtcatacagatgtgagaaagctgaaaatctgagcacttaaccacaacacacagtgttcatttctcagaaggaacaatatgagttgtaaaggaccagggaagtcttcctggatgagaggagtttaaaacttgagccttcagagtttgtttaaaacaaaaatgacygagaatagaatgggtcaggatgtcccaacgtggggagaagccgtgaggtgaggttgagggagcatgttcttctgtgtggcgagggttcctgagaagggcctgaagggtctcaagggagaggtgcccaggcgtgtgctccagggacaaggcctcagctccctggttctctggatgatgaggggctctggacgggctgtctttgatcccacctgggatagcttaaaagaccgtcttttgtcatgcattcttgttgtctgccagtgtttttcatacaggcaaacactgactgaccagattctctgtaaagctattgagaaccagtaacatgctcactgcgggttggtaccatgttgaatcctgtgatgggtagcttggtggatgtgatctcaggatatatggtgtggaaggatacattgttcctgactttttcaaaaatgtctccagagaaatctggatttgatatcaaaaccagtgttctccttttttaaggaggaaacaggttgagagagctgasagatttggtttagtaatattttctagtgtgaagcattatcttgtattaaaatcaagtcctgccgtaagtaccatagactatataatattttggtttctttgaatgttgattatactcaggtagtagaaagactaaacccttttgtagtatactgttaatttcaactatagtaaaaaatgaaatcccagaggttctcctctcagtcattttatggccgtcttgttagattgcgagattaaagaagtagacctcaatttacaagtttggattgacattctatacctggctcttctccaagagttgatctcattttatccaaaaacattagaaatcaagcacaccaaatgtggattgacacaataaataatttgctacattagttaagccacaattaactgggttaaacttccctggtctgtctagtgcgagtgctccaactgataattctctaaacaaaatctcacttccgtatccaaactaaaaacagcaacaacaaaacccttaacctgtttcttctcagaagcctttagttttgtatatttaaattcatgaaagtgtcagtagtttttttttctctctccccctgccatggctagaaaaaaaaagactgagtttttccataatatctttgtgtagcttcagttgtcaaatggcattttgcttaaattgaaaaatataaaataaagcagcaagcgagggcttaaaaattacagccagcttctgcagctgttgttgaagtaaaaaactaccagtaaatccttttgcattagttacactaaatttgtaacagtctatattgcatgaagttgctgaaagtctctggggatgaagaaagaataaatctaacatagagggaaatgattaaagttgcaatatccctctttgcaagtgaaaagaaaatgtagatctcccttctggacctaatctaaggacttataggaaggaagaatgcatttgtaaaattttaatgggaaacaaagagtttgattattctagtcctaccaggcagagcttttaatggcattttgagagggtctcagttttatccatcactgttgttaaaatacagacttgaactagtttgtaaatgtatagaaaattgcttcttgttcccccctcctttttttttgttttagagatgtaacaggtatttgcccatgtggtattgtgatttaaaattattcagtttgttttggctttaaaaacaatatgtgtttgttttaacaagagaaataatctgattcccttgagataactgttgttaacagccttgcctatgtctttttcatattgccttaaaaaattaacatttggatgaaaagccataattttgcgctttaaaatttgatcttggaggtgctttacaaaatgttctacatggcggtccttaggaaggatgtactttctgaaatacacaaacgaaatttttttactgtttccttcaaccccttcattcccccaaaaacccacaacatggtttttcttggtcttaatttttgtctatcttgaatttcattttgtacctgttaggaggatttctcagggatgaaaagggaacctgctagtaggtctgagcacataaatgcagcagttctgctccttgtcccttaggtaaatgccgtcttctttgctagccaygtgtagcatctgtgagaaggatgtcttcttccctgtcctgtgaggagaatccttactcctccccctggctgtaggaacagtactggccaagccctcccttgagattgtcacctgcttagttgaaggctgttgattgatttcccttttctataatccttaatccattatcttaaggtgctgagacaaaactagttgtgggggccaatattctgtggagaaggatttttttcttgccttttctcaatgagagagattgagttgggcgttggtggaaagcacaagtcgtcgctaaccccccaaggcactgagaggatggcaaggtgatctgagagacaggccagtgccctggcggacacctctggtcttggagttgcgagagccctctcctcgccaccgagggtgtggattggaggggaggcatcctgagaggcgctcggcttggtccatgactgctcacccagggcaaagtatgagtaggaaagagcccagggcttcctagaaaatagttctcctgctgggagggaaagagaaaatactatctcgcttaacccatagagataactttactgaaaaatgagaaggaaattgttaagaactaggagtactttcgttccaaataagcctttaaaaaaaaaagcctttttaaaataacaaccaaagaaagatttttttgaaatgtggattactttaaatttttcacaggaaaagtgactccctcagtgtattcctttgaaacctgttgtgagaatcagctgctgtcttaaaggaagggagggagctagctatcccagtgggtgtgtgtgtgctgatttaggggcaccattggggtccactgccttcctgaagtgttcactgttactttagacgatccaaggcttatcttaatgttatacaaggataacagagataaagaaaaatccactaaaaattgggaagtatttattttagcctttagttataaagacattcccaactagttctattcaatctgtacaagaatcaaaatcaacttacttttcctactcctcactgttaccctattcctctgtgtgagccaataggcttaaagtggcagatataaccaaggaggttgaatttaaggagctcacagaaggaaagagaaattcacatgttgtctcttcctccacttcagggtattcctgccgattggtatcgcagaatatggcccttatcctattgaaggaggactctttggatgtaagtagtttttcaaagttgtatttgctttgctataacagtattaaactctttctttctactatcattgataatcarggatcatgttttgctaaaaaacagttatgaaaaaactgtgtttattttctgtttatatttatatttaagaatggatgtcagaaagccttatctttaaacatcaaaacagtaagcttagaatattgcctcatgataatacttttattcatctagaattgtgcatttaaaatgggatagttttaatctgatttagctttaatcattaagtatgaaatattagtggaacctattatgacctacattaaatggtgatggttaatttcactataagttactaaggagacatgtatgattttctttctagcacaaactttagaataaaactaatattcaagtgttaagcattgtttaaatttatatagtgaggccaggtgcagtggctcatgcctgtaatcccagcattttgggaggcggaggcagaaggatcgctttaaccaaggagttccagaccagcctaagcaacacagcaggacctcatctctacaaaaaatggaaaaattggccagccgtggtggcatatgcctgtagtcccagctgcttgggaggctgaggctggagaattgattgagcctgggatgtggatgctacagtgagccgtgatcgtgccactgctttccaasctgggtgacagagtgagactctgtcttgaaataataataatacattcgtatagtaataggatacatgtatacttaattctctgatgtcccaatgctgccgcatgaacccaccccatcatggcataaagccactgaacagaccagcagtgggagctgatttgagggtcaccagcaacctgtgaagtggtttgatatgaaaatatgagctgaacaatgagattccacttgtcagaacttttaacaagggctttgttactggcaggcacccatagcaccctttcaggcagtatatttaatatttatatttagccaatgccaggggcagatggcacggttaattactcttttaaagggaggcaataaagtacagagctttctatacttgcaaattgagagggccataactcctatcgtgaacaccaggatactctctaccccttcatgagaccaagggcaggaggcagggggagagtccgtagttctgtatgtttccaaggcaccactggcaagagaccaccctctggcgtgagtgcttcagaattcatctcggtacacctcctatccttgttcatgttactgcctgcaggcagcccagagtcccaggtcatacctcatctcctggagtctaattctcacatgctctgaggaaatctctcctctacccaagtgtttcagtcttccccctctcacacgtctttatttttctccatggaacctctcatcattggaaatactatgtgtgtgtgtgtgtgtgtgtgtgtgtaaattgttgtgaaatacatcatttaagtgtacagttcagtggcattaagtatattcatattgttgtgtaaccatcaccactatccatccacagaactcttttcatcttcccaaaccaaaattctgtgcccctttgaacaactactctccattcccacacctacctcatcccctggcagtcattctgctttgtgtctctatgaatttcacagctgtaagtacctcgtgtaagttcaatcatatagtatttgtgatttttatgactagctcatttcatgtaacataatgtcttcaaggttcatccatatcggaccatgtgtcagaatttcgctcctttttaaggctgattaatattccattgcatgcctatactacattttgttgattcattaatccatcagtggacagttgagtagcttataacttttttttttttttttttttgagacgaagtctcactctsttgccaggttggagtgctgtgccaaacgaggctcaccgcaacctccaattccttggttcaagtgattcacctgcctcagcctcctgagtagctgggattacaggcatgcgccaccatgcctggctaatttttgtatttttagtagagatggagtttcaccatgttggccaggatggtctcaatccaacttttgactattgtgaatagtgctgctataaatgtggatatacaaatatctttttgagatcctgcttctaatttttggggacatatacccagaagtggagttgctgaatcatatggtaattttacatttcactttttgaggaacagccatactgtttttttacagcagctgcatcgttttatatggtttgtgatttttccatattcttgccaacactggtttttttttttttaatagtagccactctaatgggtttgagagtggtatctcattggagttttgatttgtatttccctaattattagtgacaatggacatctttacatgtgccttttggtcatttgtatatcttctatggagaaatgtctattcaatcctttgcccattttttaatcaggtttttttttcagtgttatgacataatttgtattttttctacctccctttagtcccttagactgtaaggtccatggttaaaaacctgtttaaaaaaactgggcatctccaccttcaagaccttgctttgcacatattatgcactcagtaaatgtttgaatgaatgaacaagcttaagataattttctagtcatcaataagaatttctatttaaaagtcatgctgatgagatagtggctacagtagccatgaggggctgagtacaagttgatgttactaagaagtagaaaatgagtaagccaaaacascgcatcggtggacaggagagcagagtgctcctgcagaaaggctcctagaacccttggatgtgtgcacataccttatgaacacacccacagtgtctgtacttgaggcttcctttttttctgatgattttctggttcaaaggtatctctaaccttgaaaaaagcctcctttttctggaggtaactcagaaatgagcctctgttttccccttatatcagatgttttctggagtccaagagatgaactttaactctacatacacattgagacttctggtttacctagaccaaagagtggtttgtgacgccaaactgagaagggttttatgggtgttttcctgacttgccttggtttaaccttctaagaatgattctttcttaactaattttgaacttcatcttttagtataatgactgtaatttattcagtatctactgagcagaggtgcactttctatgtactgtttttgttcattattcaaaaggacactccatatttctgactagtgtctactgaggaagattctactccttccttgccttctcctccctctcatgctttagttgggttaaaaccattcctattcttattaaaatcgtatttggtggtggggagggggataaaagcagcgtcctagcgcaataaagtagatatacagtagagctttggtggagctcccaggttgagwwtttaagtctcagggctccaataacaatgcagatgggacagggacacagaaaatggcccaacaattagaagcatttggcctggcttctctttatttcatctctcatataagtgtgaggggatccacacctggcccctatcagtttcatcagaccagtaagtatggccaggttcggactccaaatgctgtaaacaattaggatttatctctgtgttttgagtttgtcatatgctgccaaaataacttctaagctccataatatagatgagatcagtggtctttgaacaaggtggagtgatggtgtgcaccccagggggacactagatgatatattaaaatgctggaaaaaaagttgtggtttcctattttttcagttaraaaagtactgagagattagctttattgataatacgtaaggattgccactggcatcctcaattttttttcctggcacactgaccagaaattggtctgagaggaatgggtaggaggagggaggcatggcgtttcaagtgagaaaggttgttactgagactctcactctttgatttgcttttagccaattgtgaaatattgccattcatgtgtattggttaaatggacttgtggactagagttagttttcattaaaatgactctcacagatgctgacttaatagaattcctgttaaaaaaataagtgaattgaggataacaacattgtaagcagaagctgcaataatttgccttgctcaatgtgtgtgctagttccagctcttctcagctacttgatagttaaaacagtgatctgatctgacagacacagcaaatttcaaaattattcacaagattattataattaaccataaactttgtcctaaatgtatatggtatcttgaaatattagctgtggtaacatgaaattgtaggaattaatgagattttaaaaactaagaatcttgagtaagagaataaaaatctacaactttaccagcaatttattttttaaagaatgtagtaatctaatcatttactctaaaatttcacaaaatctactgcaaattcgtgaatgataaatgtctttgatatttgttagtaaaggacaaaaagtgctgagttacttggagagcatttggttttcctgctgcaataatatagagaacgcagtgtagcaataattaagttgaatatgggtggaagacctatacaaaaccttgccaggatttatatgtgtgtgtgtgtatttaaaaaattttttatttctataggttattagtgaacaggtggtatttggttacatgagtcagttctttagcggtggttcgtgagattttggtgcacccatcacccgagcagtatacactgaacccgatttgtagccttttatcccttcccaccctttcccccaagtccccaaagtccatcgtgtcattcttatgcctttgcatcctcatagcttagctctcacttatgagtgagcacatacgatgtttggttttccattcctgagttacttcacttggaataatagtctccaatctcatccaggtcactgtgggaatgtaaactagtacaaccactatggaaaacagtgtggagtgtccttaaagaactaaaagtagaactaccatttgatccaggaatcccagtactgggtatctacccagaggaaaagaagtcattgtacaaaaaagatacttgcacacacatgtttatagcagcacaattcacagttgcaaaaacctggaaccaacccaaatgcccatcaaacaacgagtagataaagaaactgtggtgtgtgtgtgtgwatatatatatatatatatatgtatgtatgcgtatatgtatatgtatatatatatataatggaatactactcagccataaaaaggaatgaattaatggcatttgccaaggtttctaagaaacaagtaattaaacaaattgtgaaacataagagatttactacatatttggataaaagtgtagtttctaacgtgtttcaacgtatggaataaaccaaaggttattgttattgagaggccatcaaaagaaagatgtactggcaaagatgtgtttgctcagagcaaagcattaattctttaacacaaaaggttttatgaaataagtatgtacagtcactgatggaatggctactgtggaatgaaaatggaatcagataaaattcattaatgatgcctgcggcagagactacattttccagcctctctgtggatgggtgtggccataagattaaattctcactggtggaatgtgagcagaagtgaggtgcgaccttgtgcattacccattgagaaggaaatctcttgccctggttcctcagcccttcccattttgctggctggaaatggtatraggctggagctactttgggggctatttattggcaacatcagagttgctcccctcgattgggcccctggatgactttgggaaacagaatctgcagattccctctggaatgtttttttgagaaaaggttatatattttgaactgttgcataggtggtagtctctttgtttatcctcaccctactaatcgtacagaacctgatattaaaagtagggtcaatacatggtgctccagcatgacacagtgcagggctgtcctcagagagagaggaggagggtctgatgctgctggccaaggagagctaacaggatttgaaggtcaagggatttggattcattcaaaccaatacatgtgtcctcattcaggttcttaaggtcccactctttcccatcagcgccctaactttcatgaaagagacctggttagtctaggactacaacattcattgaattctacaacccacagaattaactttttaggctgcatatgtcgggctgctatgagagaagaggttctcttagtctgtcatagagactctcttgtcttctgactttgtcttgacctctgattttgcaattttcattctttaagcttcccagtgcagtgagaaagtggctgacctatccttaatcttgtattatttctgctctaatggtatatttcagtagctgcttgatctgccacagacttggctttaataggcagttgttacaaattgatcacaggtaatgattttaaatcagctctattgagatacagtttacatacctacaattaaatgtaccaattttaagtgtacatggtgatatattttgacaaatgtatataagcatgtaatcaccaccccatttaaaatattgaacatttacatgatctcaaaaagttccagccctccatatccccaggcaagcacgcggaccttctttctaacacaatggattaattgtgcttgcttagaatttcatatgaagactgtctttttgtctggcttctttcattcaacacaattattttgatattcatccatgttgctgtgtgtatcatctgttcattccttttttcgctgggtatttcattttatggatattccacaatttgtttattcgttcacctgttacaggacattttcattattttcagtttgaggttattatgaataaagctgctgtaagggttttgttctgtgcaagttttggtgaacatctgtttttgtttttcctgggtaaatagctaggagtaaaattcttagattagagggaagatatatgtttagctttataagaaattgccaaacaatttccattttacactcctgctagtattacctgcgagttttcatttttgcgtatcttcaccrgtgtttggtactgtcagtcgttttaattttagccattctagtgggtgtgtattattgataatatctcattgtgactttaagttatatttccctgatgactaatcatgttgattttcttgtgcttattggtcatttaaaaatcttcctttgttgaagtctctgtcaaacttttgcccatttaaaaaaacatgttatatgctttttaaaattactgaattctaagagttttctgaatatataatttggatataaaccctgtttcatagatgtctgttgcaaattttttttttaccaatctttgtcttgcctatccattttcttaccagtgttagggaaaatagaccctaggctggcctccaataattcctgcctcctggtgtctacacctttgcctaattccctccccttgagtgtgtgtggaacctgtgacttgattttaaccagtagaatatggcaaaggtaatggaatgtcactcccttgcatgatataagagtccatcttagcagattggagtgagagacttttctccattgatggctttaataagtaactggctatgttgtgagaaggcctatggagagggccatgtggcaagaaattgcagacagcctctagtagctgagagtggccaagcctacagccagcaagaaaatggagacctcagtccgacaatcaccaagagatgaatcctgccaacaacctgaggaaggctggaaacaggtacttctccagtcaggccttgaggtgagactccagcttagccaacaccttgattacagcctcatgaggtcctaagcagcagatttagctaagctgtgcatggatttcttatgagaaattgagatgataaatatgtgtggtattctacgttgctaaatttctgttaatatgtttcataactatagaaaagcagtataaacaccttttgaagagccagaagttttttgtttttttttttaattttgttgaagtcaaaatttctttctcattttcttcttcttttgctgtgattagagctttggtgctctctaagagatatgtacttactctaggactgggaagagtgcctcttgtgtttacttccaggagttttgtagttttagcttgtaagtttaagtctgtgatccattattgtgcatggtatgaggtaaggattgaggtccagtttatatcccgtatagttatctagtgtttacagcatcatttgtgaaaaatactactacttcatcattgaaatacctgtgcttttgttggaaacctattgagcatatatgtgactcttcctcgaccctctaatttattgcatttgtgtatgtatccctctttgtgcccaattccacattgtcttcaatatgataactttataacaagtcttgagatcctccaactttattttttttaaagactgttttggtcgtttcaggacctttgcatttctgtatacattttagaatcaggctgtagattcctccagaaagcctattgggatttttatggagattttccgaaaatttatgtgtggatttaatgcaatttgacactttaatgggattgatatttgcattctatgaacgtgggatatctctcatttacttaggtctttaaaattactctcagcagtattttgtagttttcagtgtacaggacttgtgcacgtcaaatttgctttttctgattataatggctccttttgattcttccatttctcttcattgtatttatgcattccttttaatcctttaatattgttatgatagctcatttaaattcctcctctgctaattccacttctttgtcatttatgggtctgtttctatttgcttacttcttttgtttgttataggtcacatttttctgttattttgcatgtctagtaattttttttattgtatgatggttattttgtgattgagtgtctagattctgttgttttcttttaaagaatattgtgttttggcaggcagttacttgtgagtttatagtttactctagaactactgcagctttcctaccaagttataacctgttggtgctgctgcctaagaccccaagtgttccctatggtttttccactgtcartgctggaacttaagtatcttccaatcatgcatgagccctgggaatttttttttttatcttacagcactgatagttgttcttttttcatatatatgagaaaaaatatatgtatctattttagggttttctttccccaaatttcatgtcatgtccctgtacatgtgcataaattagcatttgcttaaagagccaaggggacccttacagatgcttgagctctttctctgtgcagttccttctctcccatatgctgctttgcagctcctagccacccagcattctctaacattctttgtctcctcatagcagtgagaacatcatcctctgggttcctcttccctgaatcacaatttgggaagtacctctggttagaaagcttcagctgtcatcggctcacctcatgaacttctcttcttctgaggattgtcttcctgtgttgcctgttatccagtgtctgaaaacagtgtgtttcatacactttcccagttttctggctgtttataaatcttgtatactagttactttaccacgcctagaggcaaaatgtaagtaatcactctgcctctgtctttgataaatattaatttccagtttaaagacctgtatcacttgggtttttcttttgtaataatttattgcccctagtgtgtggccagttatctctgattttgagaattccagggaaacttagctggatcaggagaaaagaagaccagaatagtgcatctgtttcacctctgggttccagggacgaggcaggatgatgactgcaatggcaaggaaagccattgaatgatcacttcagtagctattttggtcctacttgccatggacagctaatatcttttttccactgatgattaggtcatcagtgccttcaaacccaagcaaaagaaataattaatgccagtttttcacctttggaatatttcttagaaccacttctgataccaactataggaacagtcagagttccatgcaggaaatggtgaccgtcaagttctgctcaggagataaaaaccacatctggtctctgaacagagtggtttcaatgttaagaattgttaattaagttatggagtttgctaactaggtaactaagagtacagtaagaaaactctagggcagggattggcaaagtacaaccctcaggagaaatctgacccaacatctcttcctgcaaataaagtttcattgaacacagacatccccaaggctaggttaaagaagtgattgtcaagggaattgcgagcagacaagaagcaaacaagaaggagcacatttctttctttgtctccagctttggagtctctcattctctctctgcccctctcctgctggcagggcctagagccaccwgtgagtgaggagtgtggttggtagttcctactccagtagcataggctgaacacagaagggagcctggacagtgagagatgttaacagctggcacagaaatgaatttcaagtgtaaagatttaaaataggaaattaggtgcttgtgaaattattgggaaagtggaaggagcggaaggagcagaagccagcgagycctagagaggcttcaggtccatgccctgcagctttgttcccggagtcagagcactattgctgctacccaggagacctcagggagccactgccaacgtcctggcatccttacacccatgaagccaggtcgagatggtagaatgtggtctcttcatgctctctctcctctctgtcttcccaatcttaagcaaatgcatcttgttgatagaattcatgcagcatcttggtaagaaaggagtctaagaaatatggctttaagccttccagtctctgaaatacagggaagaacatggaagaagacagaaataaataccgaagccagcagataatatctagcaccagctcacctgtaggcaggaagtaggcatcaggaggacacgggatactacaagatcgcacggatgtggtctattccataaaagtcagacctttaacattcagtcgattcttcatggtactttgcagtgacaggtagagtgaccatgaacatctcgtggaccacacagaagttgactattttgtttctgttgttattctcatgacaaagaacagttgtccaggttaaagatgatgaaggatggcataagggtcaagacaacatctggggcgctaacagggtgaaactcctgctttctgtacttagaaaagtctttgccctatggtaaattctcatagtaagtcgtagttaactattttcaacttttcttttagaaaagtccagttttccaatttgatcttttctctgatgacaggtggttcgtggtaagcgatctacacatgtataatatgcataggcataatgtcatcatttgttgctttaagatgaatacgatgttttcatgtgggatatgatgaaggcttttttgggtttagagagaccactttgaaaagatatgtttagaaataattaaattgtttgttttgttttgttttgttgtttgtgttgttttttgagacggagtctcgttctgtcacccatgctggcgccatctcagctcactacaacctctgcctcctgggttcacgtgattctcctgcctcagcctctcaagtaggtgggactacaggcgcgctacaggcatgcaccaccaggcccggctaatttttgtttttagtagagacagggtttcaccatgttggccagttgctgtcgaactgaactcaagtgatccacccaccttggcctcccaaagtgctaggattacaggcgtgagccactgcgcccggccagaaatgcttgtattgttaacgtgattttttattacacaaaatgtgggtcacatattttaaacagaatactaagcagcctctccagtaacaaaagctcatggtccgttgagtgctttttcatgagtgcctagcactttatataaattatctctcttaaccctcttagcaactctgtaaggtcatgaaatattcttttttcaaggttattgctaaaatttttgatagaaactttctatttttttttcctaccatctgctaaaaaattcctgatactcttgcctacttggtaagattactttgtaattaaacttgcttatcaacattttttgtgtgtgtgaaggtagtaagattgtggtatactagaaatgttgcttgaacaatttttttctaatttgtttttaggcatgtccaattaataattcttttaatcctttgaaggcacttgcattttaaggtcagagagacaattataaaacattttttcttagggttctgtagtaagtgttattgaggaatgtcagcaggatgaggaaacagggctggcggggaggggagaagctgctgtgttgtgtaggtggtaaaggaaatgctctctaatgagatgactttggagccgacttgctgggagggaaccatggggctgtctggacaggagatggcacctcccactttgcctggagcagtctcaatttgcacctgttttcctggcatagatttaagactcccctttttactcccaaagtgccttggtttggagggtaaaattgtatgatcaccctgtatctggaggaattgtgcttcaggcagatggtccagcaaatgcagaggcaaaggccgatgctccccactgcatttgagcagtgtgtggctggaggggagagtgaagagggagccagagagacagcatgaactcatcctgtagcagtgtagagcattgttaggagattctgagtgaaatgggtgtcattggaatctgagaagagtgacatgatctgatttaccttttaaaaggatatctgggccaggcacagtggcttatgcctgtaatcccagcactttgggaggcagaggcgggcagatcatgaggtcaggagttcaagaccagcctggccaatatggtgaaatcctgtctcaactaaaaatacaaaaaaattagccaggcatgggggggtgtgcctgtagtcccaactacttgggaggctgaggcaaaagaattgcttgaacatgggaggtgaaggttgccgtgagccgagatcgtgccactgcactccagcctgggcaacagagtgagactccatctctaaataaataaataagtaaaagggtatctgttcttctttgtgtctctgtgtatttgactcctctaggtccctcatgtaatagtcttattgctctttgacttggtaatgaatactctaccattaaaaggagtcttggctaggcacggtggctcacgcctgtaatcccagcagtttgggaggccagagtggttgggtcgcttgagcccaggagttcaagagcagcttgggcaacatggtgaaaccctgtatctacaaaaaatacaaaaaaaawttagccagtgtggtggtgcttgcctgtagtctcagctacttgggaggctgaggtgggaggatggctttagcccaggtggcagaggctgcagtgagtcgagcctgggtgacagaatgagactctgtctcaaaaaaaaaaaaaaaaaattttaaaaagagtatctggctgctggagtgagcagagactaaagctgaagggaggcaaaggcatggaggcaggagcccacctagtagctggggatgctgatccaggcagaagatgatgggggtgttggagtggaggttgtggtattggtgatgggaggtggtgagattctgggcatatagtattttgatagtaaagctgacagggtttgctgatgtattggatgtgggatagaagaaggwtaagacccgaggggtttggatctgagcaattggaaggatcaggttgccatttctgagaagaggaagaccataggaggagcaggtaaggtgggggaataaggaatcttttttgggcattttaaggttgagataactcttagatatccttagggcagttgaatatgtgtgtttgggaaatcaggggaaaggtctattatggagaaaaatactgagtaatagtctgtgtagtgttttcaattctgtgaggctgaatcaggtcaccaggattgataagagatagcaaatctcaagaattcagctcttgtgggtggtggggtggggggtacttcattgtttaaaagtttgagagaggagaggcagcaaaggagatcaagaaaatatggccattgaggtaagtagagaagcaagagagtttgagaaaatatggacattgaggtaagtagagaagcaagagggtttggcattttggaaaccaactggaacaaagtctttcaagaagaagggaaggaactgctgtattaaatgctgctaatgggttcagtgaaatgaggtctgagaaataattattggatttagcagcgtggaggtcatgggtgacttgtcaggagctgtctggggcattatggagatgaatgcttgattggagtgagtgcaaggaattgggtggagaacaactggagaaaacaaaagaagtttacagtgagttttgctgaaacttcttgtaggtcttaggttagcatggtaatggatttccctatcatggtgagcaaattaatgggtaactttatttttccaaaatgtgtagtaaactatgatttttaaagtaattcaaccaataaaatgaatattctttcttttaacatttcctctgtttaattgaaagtggtagatatttgttattaatggtcttgaaataattatttgaatcagtcagaactttaaacttaatgtaccaagctctttataatctaagaatcttatttttgtttatgcttttcacaaaacaaaggtgggtagtattagtattcctgtattctactgtagctacataacaaatcattcccatccaatgggtttgtttttgatagatagtccatgtttgtgaaatctagcttttggaaggggtggaactcaaaagtccttgtccgtcttttgtgctaatggtactcttgaaagccccaactcacagagagagacaggcatgcatcatctgtcagggagcctgacaactcttgacttaccactgttggctttctaagtgaagaaaatcagtaattacatggtgcatcataaaggtatatcatgaaaaatgttgaatgtcaacagcgatgatggttcttaagctgagataacaacctactttgttgtgacaatggagtctcagggtattgtaagagaaaaattattatatgaaaggctaacatctgtcaagttccttcstcagtgaactttattctgtggtcaaatttctaagcatagttcttcctatataaggtaacttatgtagacctggacatgttttatttggaatgacttccatgatgtgtctaagacagaacctttgatgtagttcacttgattaatgggattatagccatcaagctttgttctgaggataattnnnnnnnnnnnnnnnnnnnnnnnnnnnnnnnngcaatctaatagttttaaacctcatttgcccacatttaaaattacccaattcatttaatgttgaaaaatatatattaatgaggaaaaagaaaaatgaaaaatgttctctgggtagacttccattacccagagaactggaataagtagaagtatatagtttatataaatttttggctcttttaattcactaataatacaataaccttgtgtgtatgtagtgtatatacatatatgcctgtgtgtatattggtagccattttttaaaaaatgcaactactcacaatagatattcatgttaacctagttttttctctcgtagctgagattgtatctctagatcaactaatatgtagctgcagctcggttttagagaactatgtagataacattttgtatatttctgtgatttatttaaaccttctcttacttttggacattgaggttgtttctaacctttaatgtctaggaaaagatctcattttgttttctactgtttattttgttagaataaattcctagaaggctcctaggtcaagagaaatatgccttcttgagtggaggtaatctatattcacacacacttaacacacrtatgtacatataaatccatatactccttcttgccctccaagtaaattctgccagtttaattgtaatttatttactagggaatgaaaagagcttaccacagttctgcacgggtaatataaatgttggaaatgtgggtattttctcagtgttgtttgtggaattaaaatcctctgaaatgaggttgcatttaatatgttctaaatttgaggctatcatagcaaaaatgatatcttaatagatggctgcatagctcataacctgaaacactgatgaactttccatttacatagctgtctcctgcctttcctatttgatgtgccataggaggtgaaccatgaaaggtagtagctgttgctgacactgcttctgtttgaatgattattttcttttaaattttccaatcttaattgtacgatttaagaacatgttgaagaagaatgattcattggcaggtaaaaactaaagcctactctataagttggaacatggttattatttcttagagattagctctctactctgctttcaatagggaagttcttgacttattaaattgccagtctccttcatccagctgaatggtctagttcttctacttaaatttaaattataagcctactggaaagtatttttgtccaactgagcatattcatttcgttattcaggtacttttgccccttattaccaggaaattaaatgtaaaaatagtgtgaaacaaaatgattggtatacttaaacacccccagacacccatccacccacacattttctatagagggttaatgagaagtgaaaatgtttttctgtgctatccattgtaatagttgctagtcacatgtggttattaatcacttgaaacataactagtttggttgaggaactatcaattttaagtaatttaaattttaatagccacatgtgactagtggctactgtacaaggcagcagagtgtagataattttcaagggtccccgacccccagggcacgaaacagtactggtccatggcctgttaggaactgggccacacagcaggaggtgagtggcaggcgagctcccatttaccacgtgagctccacctcctgtcagatcagcagtggcattagattctcacaggaatgggaaccctattgtaaactgggcatgtgagggatctaggttacatgctccttatgaaaatttaactaatgcccgatgatctgaggtggaacagtttcatcttgaaaccatcccccacaacctgtgttaaaattatcttccacaaaacgggtccctggtgccaaaacagttggggactgctgccctaggacaagggctggccagctctggcgagtgcgacaaatccagctcaccacttgtttttataaataaagttttattgaaacacagccatgcacactgatgtactgtcaatgatcacttcaatgctacaaaggcagagttgagtacagatgcccctcgactcatattgggtttacttctggataaacccattgtaagttataagttgaaaataacgtttagtactctgataaaccgattgttaagtcaaaaaatcgtaagttaaaccatcaaagtcagtgaccatctgtagttgcaacacaaaccgcatggcccacaaattgtaacatatttactatctggttctttaccaaaagtttagtgaccccctgccctgtgtaatcagatggaaactgactcaattccagttccattgccagctgtagctatatttctgaaacagtgtttttaaaaatgttaacaagcatttttgggagaattggatctatggctaatttgagaagatgcagagttgtaaataatgaagtagattcatctactacactttttacacaatctttaatccccttatttcactataaatcatgcagaggtttattatatagaatattttgttaaccaaatttatttgaccagtgattttcttttttggtaactcttgttataagggacacagacttagaaatgctgctttttaaaaatagtgagttttcctcttaatagatgatagtaaaataagaagcatgtgaaagagaatcctcagagtaggacaaaggagaaacggattgaattagtctattttgtgttgctataaagggaatacctgtgcttgggtaatttataagccaaagaggcttatttggcttatggttctgggactatacaagaagcatggcaccagcatcaacttggcttttggtgaaggcttttgtgctgtgtaaaaacctgtagataaggtcaaagagggaacaggtatgccaagagggcctgaaccccacaatggggagcaaatctccacatgagatttggggtgacaaagcatatccaaaccatagcgtgcatatttaatttctgggtttcattaaagcaacagatatttgagtacttttaataggtctggcagtttgcccaggttgtagacataggattacatgacagtatgttctctactctcaagtttctgtttgtgctgttataaatttgagcagtcatcattaaatctcagctatacatttaagttctgttgtgacagttgccacaaaggaaacgtctaaggtgctaagtatatatggttaggaaaaatcttgcaaactttttctgtaaaggactagatagtaaatattttaggctttgtgtgccatatgctgtaggtgtcacctattcaattctcctgttgtaattagaaagcagctgcagatgacacataaacacacatcacacagacaaatatgtcagtgtgattatgccatacatacatctatatctatctgcatttgcatacttctcaagcacttttcaaaaatgaccatacaaatcataaagtgttaacagaattttggagaactgattttcatgcagctcatgttctgtgagtgctatgcccttgcccaagaccttcaaaaaggtcatcatacaaatcttatattcttggaaaattaaaaacctatacttrcaaatccagtgtcaaagaggaaatcacattggaaattagaaaatacttagaattgaatgattaaaaaatacttttgcatcaaattcatgggatatgaatatcccaaagagggaaatttttgtagccttaccgattagattacaaaataaaaaagacttaaaatgaacaagctatacatacaatttaaaatgttaataaaagagcaagagaagatcaacaaaaccaatagtaagattcttcaaaaaaactaatgagataggcaacaagcaagttgatgaaggaaaaaaagcaaaaagataaaaataaacaattttaggaatgagaaaagagaagtcacaggtagagcagtgagtagaataacataagagtacaatgaagaactaatttgaagcctagatggaatggccaattacctaggaaaaatccattgcattcaaaatcaggcttgaataaatagaaaatgtgaatagatttgcaactattaaaggagtggcctcattacgtacaatttctcttaaagagagaacaccaaatacccatgtgatgcctagagtgtagttttgacaagcattaaaagaataaaggattccaaatatatatatatatttgggattcaaatatatatatatatatttggattcaaatatatatatatatatttggattcaaatatatatatatatttgggttcaaatatatatatatttgaataatgtcttattttcctctgggtagatacccagtagtgggattactggatcaaatggtagatctccttttagttctttaaggaatctccacactgtgttccatagtggttgtactagtttacattctcaccagcagtgtaaaagtgttctcttcactgcatccacaccaacacctattttttttttttttattatggccattcttgcaggagtaaggtggtatcccattgtggttttgatttgcatttctctgatcattagtgatgttgagcattttttcatgtttgttggccatttgtatttcttcttttgagaattgtctatccatgtccttagcccactttttgataggattgtttttttattgctgatttgtttgagttccttgcagattctggatattagtcctttattggatgtatagattgcaaagattttctcccattctgtgggttgtgtgtttactctrctaattgtttcttctgctgtgcagaagcttttttgtgtaattaaatcccatctatttatctttgtttttgttgcatttgcttttgggttcttggttacaaagtctttgcctaaggcaatgtctacaggggtttttccaatgttatcttctggaatttttatggtttcaggtcttacatttaagtctttgatccatcttgagttgatttttgtataaggtgacagataaggatctggtttcattcttctacatgtggcttgtcaattatcccagcatcatttgttgcaaagggtgtccatttcccactttatgtttttctttgctttgtcgaggatcagttggctgtaagtatttggctttatttctgggttctgtattctgtttcattggtctatgtgcctatttttatatcagtaccatgctgttttgttgacgatagccttatagtatagtttgaagtcaggtaatgtgatgcctccagatttgttctttttgcttagtcttgctttggctatgtgggctctccttttggttcccatgtgaattttaggacttttttttctagtcctgtaaggaatgatggtgcatttttatgggaattgcattgaatttgtagattgctttggcagggtggtcatttccattcgtgggatgtatttccatttgtttgtgttgtttacgatttctttcagcagtgttttgtatttgggatgtatttccatttgtttgtgttgtttataatttcttttagcagtgtttatatttttccttgtagaggtctctcacttccttggttaggtatattccttttttttttttttttttgcagctattgtagaaggggttgagttcttgatttgattctcaccttagtcgctgttggtgtatagaagaactactgatttctgtacattaattttgtatcctgaaactttgctgaaatcatttgtcagttctaggggctttttggatgagtyttaagggttttctaggtatatgatcatatcatcagcaaacagtgacagtttgacttcctctttactgatttggatgccctttatttctttctcttttctgattgctctggctaggacttccagtactatgttgaatagaagtggtgaaagtgggcattcttgtcttgttccagttctcagggggaatgctttcaacttttctccatttggtataatatttttgactgtgggtttgtcatagatgactttacattgaggtatgtcccttgtatgccgattttgctgagggttttaatcataaagggatggtggattttgtcaaagactttttctgcatctatttagatgatcatgtgatttttgtttttaattctgtttatgtggtgtatcacatttattaacttccatatgtaaaatcatccctgcgttcctggtatgaaacccacttgatcaaggtgtgttaactttttgataygctgttggatttggttagctagcattttgttaaggatgtttgcatctatgttcatcagggatattgttctgtagttttctctttttgttatgtcctttcctcattttggtattagggtgacactggctttatagaatgatttagggaggrttctctatcttgtggaattgtgtcaataggattggtaccaatgctttgaatgtctaatagaattcagctgtgaatatatctggtcctgggcttattttttgttggcaatttttaaaattaccattttaatgtcactgcttgttattggtcttttcacggtttctatttattcctggtttaatctaggagggttgtatttttccagtaatttatctatctcctctaagttttccagtttatacatgtaaaggtgttcatagtagccttgaatgatcttttgtatttctgtggtatcagttgtaataactcccgtttcatttctaattgaacttagttggaaattctctcttcttttcttggttagtcttgagaatggtctatcaattttatttatcttttcaaagaaccagcttttcatttcatttatcttttgtatttttttgtttcaattttatttagttatgctctgatcttggttatttctttttttctgctgggtttgggtttggtttgttcttgtttctctggttccttgggttgtgagcttagatggtctatttgtgctctttcagacgttttgatgtaggcatttaatgctatgaactttcctcttagcactgcctttgtcgtatcccagaggttttgataggttgtaccactgttattattcagttcaaataatttttaaatttttctcttgatttcattgttgacccaatgatcattcagtagcaggttatttaatttccttatatttgtttggttttgagggttccttttgaagttgacttcccattttattccagtgtggcctgagagagtacttgatatagtttcagttttcttaaatttactgatacttgttttgtggcctatcatatggtctagcttggagaatgttccaagtgctgatgaatagaatttatatcctgcagttgttgggtagaatgttttgtaaataagtgttaagtccatttgttctggggtatagtttaagtacattgtttctttgttgaatttctgtcttgatgatctgtctaatgctgtcagtggagtattgaagtcgccactattattgtgttgccatctatctcatttcttaggtctagtagtaattgttttataaatttgggagctccagtgttaggtgcatatatatttaggattgtgatattttcctgttggacaatcccttttatcattatataatgttcctctttgtctttttacactgcrattgctttaaagtttgtttggtctgatgtaagaatagctacttctgcatgcttttggtgtctgtttttttctacccctttaccttaagttcatgtgagtccttgcatgttaggggagtctcttaaagacagcagatacttggttggtgaattcttatccattctgccattctgtatattttaggtggagcatatatgccatttacattcaacgttagcattragatgtaaggtactattctattcatcatgctatttgttacctgaataccttattttattgtgttactgtttgataggtcctatgagattcaggctttaaggaggttctattttgttgtattttgaggatttgttttaagatttagagcttcttttagaagttcttggctgggcatggtggctcactcctgtaatcccagcactttggaagaccaaggcaggcggggtcaagagatcaagaccatcctggccaacatggtgaaacctcgtctctactaaaaatacaaaaattagcttggtgtggtggtgtgcacctgtagtcccagctacttgggaggctgaggcaggagaattgcttgaagctgggaggtggaggttgccatgagccaagattgtgccactgcactccagcctggagacagagcaagactccatctcaaaaaaacaaaacaaaaaaacaaacaaacacaaaaaaagaagttcttgtagtgctggattggtagtggcaaattctctcagcatttttttgtctgaaaaagactatctttccttcatttatgaagcttagtttctctggatacaaaattattgactgataattgtcttgtttaaggagctaaagataggaccccaatctcttttagagattgaagttcttttgtctacttgttcaattctgttgctgagagattccagtgtgttttgtatttctttaagtgtgtctttcatttccagaggttgtgattgtagagtttctgctgagaaatctgctgttaatctgatagggtttccttcataggttacctgatgcttttgcctcacagctcttaagattcttttctttgtcttgactttagataacctgatgactgtgtacctaggcgatgatctttttgcagtgaatttcccaggtattctttgagcttcctgtagtctagatctctagcaaagcyggagaagttttcctcaattattccctcaaatacgttttctaaagtttcagatttttcttcttctttgggtacaccgattattcttaggtttggtcgtttaacataatacaaaacttcttggaggctttgttcatttttttgtattgttggattgtgttaatttgaaagctttgtcttcaagctctgaagttcttttgtctacttgttcaattttgttgctgagatgttccagtatattttgtatttctttaagtgtgtccttcatttttagaggttgtgattttttttatttatgttgtctatttctctggggatttttctgtccatatcctgtaacattttcaaaatttctttaagttggtattcacctttctctggtgcctccttgagtagctaaataagcaaccttctgaaggttgagagatttttttcttggtttggatccattgctatgagctagtgtgatcttttggaggtgttaaaggacatcgttttgtcatattacctgaactatttttctggttccttctcatgtgggcacattatgtcagagggaagatctggggctcaagggctactgttcagattcttttgtcccatggggtgttctcttgatgtggtgctctccgccttttcctaggcatggggcttcctgagacctgaactgcagttattgttatttctcttctggatctagccacccagcagagctgcctggctccaggctgccactggggaatgtctacaaagagtcctgtgatgtggacygtctacaggtctctcagccrtggataccagcacctgctttgttggaggtagcaagggagtgaagtggactctgtgagggtacttggttgtatttttgtttagtgcacttgttggcctccagccaggaggtggcactttcaagagaccatcggctttggtagtatagggggatacaagcttgccctagggtcacctggataagtatgggggtttctcaggcagtgggcagggccatagagctccgaagagattatgtcctttgtcttcggctaccagggtgggtagagaaagaccatcaggtgagggcaaggttaggtgtgtctgagctcagactgtccttgggcagggcttgcttcggctgctgtggtggatggagatgtggtttccaggccagtggagttatcttcccagggggattatggctgcctctgctatgtcatgcaggtcaccagggaagttggggaatgctggcagttacaggcttcacctagctcagctaccatgaagcccgaaaggctggtctcattcctaccgtatgtcccccaaatggcactaagtttatttccaggcagtgggtgagcagggctgagaacttgccccaggctaccagcctctcgctgagagggttttcaggtttcacacttccccatctgccatggcttctgtgctcctgtctgcactcctgattcaacccttcttccgggttctgtccaggaaacttcgggttcacttgaaattattacaaattcagctggaggtcttttccctgtggtctttccctgattccactggtagccctccccaaggattcctgagacaaaaccagaaatgtgtactctggggactgagagatcccacaggactcttcccaattcttcttgtacctgtgtttttcgctcagctctctaaatttgcctcagctccaggtaaggtcaaatcctcttctcataatctggaccttcaggttcccctgtggttcaggggcagacagttcccctttcacattttcacactttgggcactcacagttttttagctgtctcctgaagctcgcagcagtaatccactctcttccaagggtctgtggattctctcgactctcctggtatgttcctgtggtagttcttggagcaaaagttcacaatatgagtctccacatgctgctttgtttgtccaagtgggaactgcaagttagtcctgcctcctgtctgtgattttctcctataccccagttatyttattagatgcagaccaaaaaacccccaaataattaacattcatttatcattgaccacccccaacaacacactttcaatgctggaattgaactttctgaaactgataaggtacatctaccaaacccatgccacccaacaatcttccagtccttcttcctagatgcataaatacgaatcttttccttatttctatcctttagtgaccacttaattttcttttctttctttctttcttttttttttttttttttttttgagacagagtgttgctgttgtcacccagtctggagtgcagtggcaccatctcrgctcactgcaacctccgcctcctgggttcaagtgattctcctgcctcagcctcccaagtaactgggattacaggcacccgccaccatgcacagataattttgttatttttagtagaaatggggtttcaccatgttggccaggctagtctcgaactcctgacctcaggcaatccacccgcctcagcctcccaaagtgctgggattataggcgtgaaccatgaccacttaattttcaagagtagtatgtggtactgcttagctcatcagattctccaagtccctaataatttcctatttgggagctggagaggagatgatacttctaggatgcttcaatttcagcaacattcattttctttttctgagtcatgagcaccagggttcaccctaaaatattagccagatctcataggctgaattaggtcacagggtacaaagtgttgtgcagactggtgcatgtggctcccattgaatataataacagccctttgacacgtgtggcagctgctgccagagcctccagccaggatctgggctagagggtggtacatgtataatttaagtaataacataaagattaaatatgtaattggaaatgatttcatagaataaaactgaagcctggtttatcttgaaaagaaattattgcagacatgtaaatagcttactgtaaagtttaattacagttttagtagcagacaagactcaattgataaatctccacaaggagagtcaagtaggactgaaaatctcactgcacttgcatgaaaacaacaaaagctaamatgccaaaccgaatgcaagctttgttcatttcctcaaagttaattgttttgactataatcatacagttattatttaatggccatacacaatttatttatcattttctaagagattaatttgaaggtctttttcttgttatttatgtggaatttacaggaaagtcagatattagattgtagttttagggggtgattatttttataactcaattgatttaaatgttaggttttgtcatttcgttgaatccatcagttatcatcagtattcattatttcagttccctctgagaaatgagaggatagttttgtgagtagaaaatgatttgaagagtttggcagaataaaactgaaaactgattcatctgacaaaactcttttaagttcggtasagaaacaaggactagatagttgtctcactaactccattcttggtgttcccttgactttgctgtttaytgtgtttttttgttagaatttcttgaatttattaatttttgttacagttccatcatgaaacttactgaattatgtagatttaaattgttttccatggtatttctttattaatgtagaatttgaaaaattcacgcagttctggggagactattttaacttataccctctcctccttcctttttcatctgagcttcctctcatcratcttaatatttacacctaaaatcttatgagttgagacaatatagaaattaattattgatctgtaaattatgtgaaagttcccaacatagaagcattttatatatattaaatcagtgttagaattcgtggctagktacccgtagtgtaaaattgtatttaggagctgaaagaccgtgagtgtgaatggatgtttaggtggcaattggaaagatttcccagtattctgaagaacataagctatttgacctatttgacataagtcttatgcttccttttacttagatttctggtttgctttcttttggtacatgttatacctgatactgttctacagcggtcttcagtaattttttaaatcttgaaatagaatggaaagattgagagtgacctgctgaggtaactggaccagaacaggttaggagygcgtgtttataaacacgagggagggtctgagtaggaggacctgaggaatatgtagggcagtgtggaaagggaagacatggaaatgacattgatacagctggttgttcatgccgggtgttgtcactgccccgagactgcctcattgccatgaggaaagatttgtcattttcgggaagaaggtgtggagcggctgggaggcagcacacaatagccctcctgtgggtaggatgttggctagccttgggtttacctcagtgaagacccatgtttaggatgcttgaaaacatctcattagcaactttgtctgttttaagctctggagcagtgaagaattctattaatggcagtaaactttttttttttttaagaaggaaacccaattatgtccctccattaaagttctgatagttagactttttttttttttttttcccagcaagatctctatgtagggtagggagatttcatgctactgggagcaagatgatgcttagtagtagttgatgccttaagactttgcagggtcacatagaatagcatagtcctgggctacatccaacatgcatttcaatcagttcttgggtggtggaaaagggcttgctcaatccgcttcttagcattgaaatgaaagaactcccagttctcagactggcaatgatgtgattaaaaacttgaacttgggtttctgttttccagtcgtggtaggctaggttaccctgaccacttctcctgctgaaactaagtaagattgttgaataaaatagttaaaaatacatttttttctagcgttgaagaaaggagagtaagggattctcaggtaaactgaaggagagcaggaactcagagaggcgagaacggccttggatgcagaagcaccttttgtggaggcttttcagggagcagaggacagggtctacagtttagggagcttcctcccattaagctgggggccttgcaggggcacacctgcagggtaaggtgacagaagacagccaggtttcctgaggatttgaattctgggttctccttactcatatggactcaggaccctcagactctacatttctcaaaagccaatgcagctcctcttcataggagggcacttttattctgtatgctgttaattcactttcaaaaaatcataaagcacaagaaagaagacatctccagctattagcacgaaaagacactataaataaactacaaaaattgaagatactcgaataaccagatatagaatataaaacaaccatgctatgttaaaaaaacagacagtaaccctagggatatctgtggagaccagcaaactataaaatgtagcacagcagatgtgagaaatgagtacatagaacttctggaaatgaaaaatatcacaacaaattaaaaattctaaggaaaggttgaatagtatattagttaatactctaagaagaattagggaagtagtaggtaaataagaaattatctagaacagaggtcaacaaacgtttttctgtaaaggatctgctagtgaatatttttggttttgtggaccacatatggtctctattgcatagcctttcctattttaattttgtttttacagacctttaaaaatgtgaaaaccgttcttagattacaggctatgggatatatttggcccacgggccgtagtttactgaccccaatctatatatacaaagaagagaggagtcacgagaaaacccagaagggcagttgaggcatacagagtagaatgaggaagtttaccgagcttgatcagcctaaaggcaagagaaaaaatagggcagagtaaatatttgaggaaataatagctagggattttctgaaggtggtaaaaagatactaatctgtagattcagaaagtccagtaagtcctaacaaggatcagtaaatacattctctccacgattcatcatagtgaaacttcaggacagcagacactaagagaaggtggggagtaggggatgggtacagcattgcttcctcagagagagaggtgacctctcaccagcaacagagggaccagaacacagcagaatgccattttcaatgctgaaagaaaatacctgccaacccagagctttataggcagaaaaatctttgaagaatggggttaaaatcaaaacactcacaaaagttaagagctgagagtttgctaccagccaacccatactaaaggaaattttaaaggttgcatgttgtacggaaaaaaatattcttgggtggaagatctaagctgttcaaagtataaaaagcaaagaaagtgggaaatcagtgataaaacttagattagtattgaatatatggaacatcatcttgaggggttttaaaaatattgacttgaaatataatacaattgcctgtgtaaattgagaagagtgtgaaatagatatgtttaaaaatcctcatattaccttggaaaataattttcaagcacagttttacagttgatagaaatatgaaattaagacaaaattctttactacattttaagtcgaataattgaacaaaatgttagaaataggcacaatgtagcttgctgcttgattcttgtaatcaagggggaagtggagatcaatgaactaatggtgacatttcactgctttttagtaaaattgtatgaagccatagagaaagggaaggagagacttaaataataagaaaaacctcaacagatctgtgatgcttatgatgggaagttcttttgagagaagtggagtagtgggtgattgggcctaggagtggggagtggaaggattattgatgttgccgttgggcctccatggtatcactcccatgctgttggatttattggtctaagtgtnnnnnnnnnnnnnnnnnnnntcttatcctaggtacctttgtgtctggctcttcaccagtgcaggaagaaggtaccttgaaatgtgttaaaaaatgtttacttagtaactaggaaagatgctcctaatgtaacttgctttgtgaacaaatacgtatgaaatctacataagtgtgttaagtgtcagatttcatcatctctgggctgagtgttggtggaaacattagaggataaattagctatgagatatgttctgtttctgatttaatcttttcatttttctctttttgtttttctcaaccttttctgctacttagtgctttcttgcctctgtctcagatttttatgagccaaatattcttatattctataatctgtgttcttcccaaccagaggtgttatctgcagagactttttttatcagactgaaatccgtcctgcctttttagaatgagctcatttttcttcactccagctaatgctgacatttaccaaatccagtcctgattaagtaagcttccatcaccaagaaaactggaaaaaaggtaggattcataagacagtggattcccatccagtgcttgtagctctgttatcctctttagaagtatctgagggttaacaaaattggaaattgtagaggaaacaaatttgcactgaatttagacctaatttacctgaaaatgggattcctttaaaatccacagtgagcccacagttttgtcctgtgactgagattcagtcacaccttgaccatgtatttatttcataaattaagccttcaggccaggcatggtggctcacacctgtagtcccagcactttgggaagctgaggtgggtggatcacctgaggtcaggagtttgagaccagcctggacaacatggtgaaacyccatctctactaaaaacagacagtactaaaaaacatctctgctaaaaacataaaacactacctgggcatggtggtgcgcacctgtaatcccagctacttgggaggctgaggcaggagaattgcttgaacccgggaggtggaggttgcagtgagccgagatggcaccattgcactccagcttaggcaacagagcaagactctgtctcaaaaaaaaaaaaaaaaattaagccttcaagaaatgtatatgccaagttggagatgtgtcaatagagctaagcagatttttggtaactgccaaattagtttcttatggagaggggaagcaaagaaatggaaatagtaacaataagataagcaacagtgagaggaatgatgaggagcagaaggaaggagaaggctaccacatgaaagtgggaaagttgagatctgaaattattatattttgaaacctagaaaagtaatgaatctcattctgtcctctctcctctgccctcccatactttgggaaatggtgaaataatctgaaacagaaatgtttatacagggtgagcatccccagtccaaaaatccaaaatccgaaatgccccaaaacctgaaactttttaagtgctgacaggaggccacaaatagaaaattccatatctgacctcatgtgacaggtcacagtcaaaatgcaggcacacaacacatagtttcttcagcatctccaggggaataaaagaccctcttagctccctttagctgatacttgggtcccatccccaagatatctcataatgtatatgcaaatattccaaaattcagaaaaatcccaaatctgcaaccctctggtcccaagcatttcagataagggatactcaacatgtagtacttattgtagggttatttcagatgtgctgtcatattagttaaagtgaaaaattgatttgcaaagttctgatcattttagaattggtgtttaagtccagtagaaatcttcatagttaaatatatttaatattttgttataaattaagtaatgagcaactgaattttaaagaatatattcttagaggcaccctcacttcaaaagaaattgaatttcaacaaaatgccaggactggccacgcacagtagctcatgcctgtaatctcagcactttgggaggccaaggcgggaggatcgcttgaggccaggaattcaagaccacctgggcaacatagggagactttgtcattactaaaagtaaaataaaaattttaaaaaactagctgggtatggtgatgtgagcctgtagtgccagctacttgggagactgaggtggaaggatcacttgagcccaggagtttgaggttgtagtgagctatgatcatgccactgcattccagcctgggcaacagagtgagacttagtctccacaatagcaacaacaaaaagccaggactatgatttttttttttcaaaagttcttctcagtgtcagctcagaagtgataaaaggttttccacctttttttgtgtgttttttattaagaagaaaagatttgaaaggtaaatagaaaaatcttgtaaattcaccaaatcaccaaatacgtgttttgaaacatagtagtttttctaatttatcagtctcattttctaattctatccttatgaccaatatctctgcctttgctctggatttatcaccttcatggacttttggacatgggagaattttatcctgatggaagtaaaactgcacggacttctcttgtgttatagaaatatgtgtgtgtgtgtatacgtgtatatatacacatgcatatagagatatatatgcatatctagatgagcataaatgcataaattatgcatagattataaatgcataaattatgcatagatatatgcrtatacctatatatgcatatatctataatgcatgtatgtatgtgtgtgcatatatatacatgcataaatataaatatacatatatctatattgtgtgtgtgtgtgtgagaatggagtgccatccttccccttcctgggctgtaagcttgtttgttagttaagacttcatggtagaaactggtgtattcatctttaaaatattttgcacattggtggtgcttaaacggcttactgaattggactctccaagaagggtatttcttaatagaaaactgtcttgctttatttgttttcgtttacacttaactagttgacataaccctcaggacaaggactgtgggcatttctttccttgctggtcttacaagctactgatatatggcatttatgactttggcagagatggtgggttaaatcaaggggccaggattccttcatcacctaaggacttgtggtttataaatacagaagaggaaaaggagacaaatgaaattacagaaatggcctcagcttgattgagttataaccttcactgtctgatttttataactctaggcaagtactctaccttttttatttcacttcaatgtaatttatattttgctaagttgttaggtggcccagttaaccttaacaagatacttaatgttaactagttttctgaatattttcaatggtgcctctattagagagtattgtatgtaggtgaacaatgtatttcccaagcacaaattacagtatttcctcaaattatatgttctaaaggcaattgaggtatgtatgtaattatgtgttaatcaagttagtgatttgctattaattgggtaagtacaagttgtgtgagttacacttgcacaggggtggtcttgtctctgagctgctttcagaaaaatagttcaaccaagtaaattgattagtannnnnnnnnnnnnnnnnnnntcctcttaagtttttcatttctatttcaactcctgtgagtttaacaagattatcattttaaaagaaattccttccatctgcagatgtgtgttgcttctgatatatttgaatcagctgaaatctaaaagttttttacataggaattatctctaaagatataaaatggtcttatttttccttaatggtgttaggaaaacctaatagcaacaatggattgtgcatgatcaattttatstagtcacattttgggggatctttaagcaagaataggcaacaagaaaatgtgcatttagtgttggaagggatgagagattagttgtggatctgaggattattcttgcctcaacaagtggagaattggagatactcttcatgaggagtgacactcaagtttgagccccgtaatcaagagacaggagaaatgttaataagagaaaaccttttattttgtcagatccctttttgaggaagaacaaatgcagtttttgaaagcattaagcatttagaaaagggtgcagaaatgtagtaggacaaaatgtgccttaaaacatacagcctctttatgtccaaagcttccacacaacrtgaagtaattgtctgaaattacaagtgctactatagtgattgaactctagctgctaattgagccttcaggtttaaaaatacacaggcctcagcaattcaaagattattaaattacaccttcttgtgggaaccaacatcaatgtgtttgagcagtgagtagtgaaggtctttggggaggcaggggcagagggtgtctcattacagcgtttgccactgcagatctcttgagggttgttgctttttctcaagacgaaagattttgttaacacttcattccacagaatgttgaaaaaagtggagctctcttgcatcacatgactgttactgcaagttttgtgttgatctctgaataactagaaatttcaaaaatttacttatgaaccaaaaggcataattggtgtataactcaattatttttatttaatcctcacaacagcctatgatgtgaatggctgtgttcccattttacggatgaatatgttaggctcagaagtgacctgtcaaaggtcacacaactaagtagaattgctgagactgcatctactggctctgaagtttgtttgtttgtttttttaaactatgtcttagccatctgatgtttcaaaggttatacagtcaaaattgaatcaatgtgattgtaatgtgcctttccaaaaaagaagatgaatactggatactcactgaacacaagtggtttattctttcgttcagcaaatttattgtgcaacttttgggtgctaaccacaattttaggcagctgggaatacacgattagaaaggatctagaagattccttcctgtcttggtcaattttctgttgctataacaaaatgccacagattggggtaacttacaaagaaaagtttatttagctaatggttctggaggctgggaagtccaagagcatggtgctgacatctaatgagggccttcttgctgcatcataacacaggagagggcaccatattgcaagagcacaagagcatgtgtgtcagctcaggtttctgtacatcttcttttaaagtcaccagtaccattgtaggggtcccaccctgatggccttgtctaatcctaattacctcctgaagcctccatgtccaatcagcatatgaatttgggggttaagttttaaatgaatgaaatttggggaacatatttacatgatagaagttccttaaatagaactcagagctcaactgtgggaaggtagacgaatgaataagatagcataagtacattgaaagataagtaagaggatgatgtgttaaggagtggtttggggagtaaagaagtcacccttagtgtattagtctgttttcacaccgcggataaagacatacctgagactcggtaatttataaagaaaaagaggtttaatggactcacagtcccatrtggctggggaggcttcacagtcaaggcagagggtgaaggaagaacaaaggcgaacaaaggcatgtcttacatggcagcaggcaaagagagaatgagagccaagcaaaaggggtttccccttagaaaaccagcagatctcgtgttacttattcactaccacaaaagcagtatgggggaaactgcccctatggtttaattatctcccaccagtccctcccacaacacgtgggaattatgggagccacagttcaagatgagagctcggtgggaatacagctgaaccatatcacttagatagggtggtaaacagagtcctcagtgaggagctatttctggcctgagactccaggagaatgagatgggaccaggggtggatatgccagacagaggaaatagcaaatgcaaatccgccaaggtggtacagtggcagaatacataggaggtggtgtggcagagcctcaggagcaaaatgagcccagtgaggtcaagaagcagacaaggaaagaccatgccatgcagggccctgtagaacatggaaggaagcaggattattctagatgcaatgtgaccccattgacagggctgtggattgaattatgttcccccaaaatttatatgttgaagcgctgacccccagtgtggctgtatttggagtaaggaagcaattatggttaaatgaaatcataagggtagagccctaatctgataagattagtgtccttagaagagaaacacctgatctctctctccaccatctcaacgccatgtgagaacacggtgagaaggtggctgtctgtgagccaggaggagagcttttatcagtaacataattggctgacaccttgatctttgacttctagcctccataactttgagaaataaatgcctgttgtttaagccacccagtctgtggcattttgttatggcagcctgagcagaccgagatggaactgmaagtattgtcattaactgagatggagctatctggaggaaatgcatcatttggtgaggccactctggctggatattagtcctcagtgttctgaaacacattcttccctgttggattctgtcataaatgtagttgatgatgccagctctcaccatcaaggctcataagtgctatgagccagatgcaagggttttacttaacaatgaaaattttacctgtcaggtraactgagtctatggcttgggctgacataaagaagccatgatcacattgagaagccatgttatccatattgcatggtgaactgggactccagatagaagggcacttcattctcccactttactgtttaatggtgtcagatgtgtggctatggttccacaaagcctgactggacactcctaggccaccctccctcttgctgacttagaaacccatgctgtctgcctctaaccatctttatagtctttcattttagacctttttctgacccacattaattccttcagtcaagttacagttgaggtccattgggtctgggagccattcattctctttaagataacatcacacagctttgctttaccctttatgttaattaatcctgctgtatgtcctgattgtggaatgtctctccaagcccacagccattactctgagcttctctttctgtagtccacacctgtaaatgcacttacgttttcatacttccttgccttttattcattctcatcgctttgcctgagtattctttcctctcttcctaactcaggacarcactgcctgtattagtcttctaggctgctatgacaaaataccacaaactgggtggtttaaatagcagaaacttgtcatctcacagtctggaggctaaaagtccaaaatcaaggtttctgcaggatcagtctcctctgatggttgaggggagtctgctccaggcttctcctccagcttctgagtgctcaggcgtcaccttccctctgtatatgactgtgtacacattgtcactttataggacaccagtcatgatagattagggcccaccctgaagatttcatcttaacttgattacctgtgcaaagactctgtcttcaggtaaggtcacaggctgagagtactgggggttaggactccaacatacgttttattgtgggacattatttaacccataacattgccccttctttcctccatgagrgggaacatcacatcaccagcatcctaagcccttgtttgataacttggtgatcatcactcttccaggggagcataattggtcacctatgagactaataggtctgttggccactgtccttgtaactcttctgtcatgtttattctctgacttgcctgtcacccttactagaccatagtctccttgaggacaggatcaaaccagcattgtaccctgctcctgggcacatagaaagtgttcgtagacagaacacatgggcagtctcaagtaaacatattggctgttgattgttgtaacctcttcagtctaagaataatttggctcaataaaaaaatttttagaagaagcaatagaatagcaaatcatatcattgaaaagcatagaggtttaaaatatttttaaaattaagactagttaacacactataatgaaggcacagttacattaagtctattttcttggtatgaaagatgaaaaaattaatgattttccttttaatcagccgtttaatcttgtagatagtcttcataaatttcttccaatcaccattagtaatactctttcctttttgaaataatagctcgaaatataaatatctttattttatttgctatttaaagagctgccaagtatttgygttaggtgagatggtgcatatgatctgtagcagtttgctgtagctttcgggaggctatttgaaggaatagcttaagctatgaggcaaggcccatcagaatgtcatctttcattctttctctttgctctgtggtcaccygcccccttccaccctctgcctttttactgtgttagatcagcgtcgcttctgttttccagcataaaacccctgacctcaagtgaagaaatactggtttaacatatacggtgtaaattgttctgctttctataaacttttatactaatatttttattattttgatatttgagagggaaagagtaatataatattgcagttcatatggcagccacagtttaattttatggcaaagtcaacgactttagagttgctgaagtatttatagtactgaaagctttgtgttggcaatttctttcaaaggaagcaattcttattattatatcatggacatgcacaccactctcatgctgtttaagacacctttttgtcccccccccaccaccaaacagggaactgggagggaaaaccaggcctcaaattttgtgtgcttgcttctcatgttttatttctaagtgaattagaccatatggtcacataaacccaaagctaggtggtacagggatttaagtttgtggccttgaagtgattctagttttgctttcaattagtggaaaataatgcattcatagaacaatttataactcacacagacccattcgtgaaaagcccactccagatattgttgcgtgtgtccaggagaagtggcagcgttgatctccatagagatgactaatcagttgagactgagccctttcccttttccatgcgacagcatttatttgttgtgacactaatttcaccatgtcagttttccctgccagtgtgccccagccctaatcctcatttcacatgcatcactgttctcccctcattgaaacttggcttgaggctaacaatattaagtggcggaactgtggtttgctaaacacaactagctgatgctcatgtactcctatgaatagaaagatcttccgaatatttccttgagggaatgggctctacaggaaatcttgagacagcccttatgttgatacatgtaaaatatgcttcttaataatacatgttggtgataatcagataaatggagtgttgactgcgaacctgagcaatgtgcctggctaatgaataggatgtttattttctgttactactctggacataccaaaggcaactgcatcatctattaaaaaaaaaatccttagggtccgctttctcatccttcattttaatttacaagagcagtaactacttctgggactgactggagtattttctggggattaagtctggttcaaaggcctttggctgtgctggaggccataggtttcagtgtgaaataactgcctgggtgtctgtattgtcatagcttaattacagtatttgcatcttgagttgttgactgtgggttttctaagactttgagagtgctaagtgtgatttgcttttcagtttctgacccagcaagcaaatcccaggcaatgttaagtaagaaaaaacatacctgtggtttttgcagggagaaaaactcatcttcaaaattgacagcatcactgtccaacaggactttctgcagtgatggtgaggctcatctgtgctctgttcagcacctccgctcacgtgtggctagtgcaaccgaggaattgaattttaaattttatttcattttaatttatatgtaattaggcacatgcagccagtagctaccatattggatggtgtagatggagaatatctttgaagaccaaatacagttcttcctgatgatttatagtaaatttaatgtacttaggtctactccaggtatttttggtcttaagttgatttgaggattttttgaagtcatgtaaactttatgaaacatcattttgtcaagtgctggataatgattatatttactctaaaagaagatgcttgctgcttatgtgtgaagagagtaatttggtgacctcctacttcattcacaagctggaggggacaaatactatacctatactaggcactgtactttctcagtgggttgctcatatacctttagtgacccatggaatatcattacaatgttttgcaggggtattttcaaaatgccaccaccaccaacatataggcatgatgycctccacttcttgcagctttacatagactgagatacaggaaaagctaaagtgttttgcgtactctcactcagtacaatacttctaacaccagaaatgtggggagttttcccaacatagcaaaccaagcagttttctagcagcaaacaccaactgggtgtcctacaatttaactcagttggagttggaycccacagattaagggctyagccccacaaggctctccccgaccttagaatccaatcgcaagccccaccccctgacaccccctcatggttcgattaatttactagagtagctcacaaaactcagggaaacactttacttacattttcatatttatcataaaggatgttatggatgaacagccagatagagagatgcataggtcaagtatgggaagaggctcagagcctccctgccctcctcaggaacctgcatgtgttcagcaacctgaaagctcctgaaccctgatttttggggcttttatggaggcttcaccacgtaggcatgactgattaactcactggccattggtgattcactcagccttcagcccctcccctccctggaggttgaggggtggggctggaagtcccaactctctaatcctgcmtcggtctttcctgtttcaccctgaagctacctagggaaaccaagggggtagggtgacctaggggtcactggtarccatctcattaacatgcgaaagacatcactcttgagattccaaaggtgtttggggctctgtgccaggtaacagggatgaagagcaaatacatatttcacaatatcacacacattacagacccccctgacttttgctctaatgtttctatcctttgcctcatgctacctttcacctgattggcttccgctggccttgcgttaaatccctgcaggtgtagctcactgggtaggatgggccttaggtaaagacagaatcctgagctgctctgtgggccagtcccctgggagtacctttaatttggtagagattcagaggaagattgacagtctgcgtcttctgtgatgagggtgccttttactcctccagcttagccgggaagctgccctcttscgtgggagaagttgtgctctgctcacccctctgagcttttcctcactttcccagcgaggagactctagaagttactctcagagtcacagtctgtttgccaccaatagtttggctatgcttttatgcctaagtgacaaactgtaagtttttacttttaagtaaaactcctgagtcacggaagcatgtttagtatctaagaatgtttgattctcmaagtattgaaaaagaagattctgctcacttgttcagcctctacttgatccctgttagcamagaaagatgcagtcagatttctcttgagcttggtgatatcctttataataacctttagagatccgttctattaatgaggcatgatattgttactccaattgtgcacacaagctgggggacctccctttcagaatggcatgtaaagaaattccttccctcctggaggcttcattatataccctacatgcagtgctcggcagtctgcttttaaggtgagtcattgtatagtatgatttctcagacttcaagggcagataatacacatcacgagcctcagaacagcttacttttcagccttaccttcctttacagagagagagataaagagagcaagagagtgcatgggaatacgagcgagatcacctctttgtctttttagaaatcctgtacgtgggcattaaaattaatttagagwttcttattatgtcctttcaataatagcaacaaaataattataatgacaacaatgaagtagccaccttgtgtcattttgtctttggctaagtcttgaattcctgtaatttaggtgtgagataagttggatgtaaataacattatttaaatcaagattatagggaggctggacgtggtcgctcacgcttgtaatcctagcactttgagagtctgaggtgggtggatcactcgagcccaggagttcaagaccagcctgggcaacatggtgaaaccttgtctctgcaaacattgtaaaaattagccaggcatagtggaatgtgcctgtagtttcagatactctggaggctaaggtgggagaatggcttgagcctggaaggttgaggctgcagcgaggcaagatcgtgacactgtactccagcctgagcaacagagtgagaccctgtctcaaaaaaaaaaaaaagatcatacggaaatccgactgcttcacaaacattcttttgttgttgatggaaaaaccaattgactattaagagtgatagagacaaacaaactttaatgctgtatctaaatatctgaaaacttcatcaggaaatgtatgaatttaaagcggataaactcagtcaagcttgacacagacactagcagtctctacttccggttaacagctgtttcaggagacagcatctcaaaatgagttgtcagaaaatctgcctgattttctcgagggaccgaagctacaattgggaattgagctcctgatggagtaggcatcaaataaattggacccatgaatatcaataatttcttaaaagtaaatactcagtaattctaaatactagcctttaaaatggtgacattatgctgtaactgcagtaagtcctgttagggcgctgttattagtcccataaagtgctcattcagaaataaaattctaacatgtcaaaaatcgaacccaaaactaagctataaaaaatttttaagtttaatgagtaacagtttgtcttaagccttttaaattatgacttacatgatctcttaaggcccccttggaagtttgaactgatgaagttttcttttraatggatcttcaccaaagagtggaattgaaaataagtccatgtatcttagtttgkctctgccrttgtctcatgcagttgtgttttgtttattttagtttttgaaattaaaaatgactgaaagacctgtaccaagcatttctttcacttgccttctctaaatctgttcaagtttattcagaattataattttaactctttgatatctgatcaagcagaggcctcccacattagggagttaacgactgtgaaggcttaaacttatggacacttaccatagtgtttagcaattgtttagaaaccgtaagaacaattactagatcattagcaagcacttttttttggwtgggggagaagctgcaaaatatctcctgaaattgctcttagggatgttccctctaattttaaaaagtaaaggggaaaaatgaatttgcattcactggtgtgtgctgtttcagtgtcagcaccatgagttaggattgtattgtgtgtcagaactttgctctgtgctggggatgtaagaccaaagtcaccatgctcatggcttcagtctcatgaagcatgacccgtgtaacattttaaaagagacaattcataaacacacttagagagcattgtagaaataaaggagaatgtgagaaggagtgtgctaagattggggaaggttaaacttgaacagtgacttggggagaaagcacttagggaaaatgaggtatgtgaagccattccttaacagaaatcgccatagtttggggagtgttctactaaatatttgtactgcaggctgtgtaaatgaatgtcccatgtgaagaggtaattgtggctgagatcgaggatgtgacgtctcgagactccccttttggagattctcaaatcacagaaccatattaacatctctgagacatcctcctgccaggaaacctgtttaaatccgtttattgcaggattttccaaactcaattgagcatggagtccttgtaatactccatggaatgatttctgttaaatggtttcagggaatgctgtctgttggaggcatcagacagactggaaagcctggctgaggtcaggcataggaggccctataggccatgctcaagttttgaagatttcctctgtgcaaaaattttagtgtcctcacatcccctatcagaaatggaactgctataattatactgagcctctctgctttggaaagacataaaaggaaaagctggacctttgtcctcaaggggctcagagattaatgagaagacagaaatacaaactattgtgatacataacaaaattattttaaatggagcttttgcaaaatgctttctacaaagacagcgcaccccctcctgttctgcggggattcactaaagcttcaagtccagatttgcatgcctggaggatggacgaggaaagatggatgagtatggggggaagaggtgggggacgtagtggtgccaggatcaaggactgatggaagtccacagtgaaggccgtgggagttggtgagaaagaggtagaaggtgaaactggcaggatttggggagtggattttgaggacaggaaggaatatctcagaattatgaaagcttttgtctcaaacaacttagtgtcaaatacattccctgtagcagggcctttttttctaaccccctgctgtgtttctgtctagactcttgctcagcacagtagacattaagaaatatgagttgacagattgttatattttataatgtacaaaatcctatgctactaagttttaacaactacttttagttaagtgttttatatgcatggggtatcctcgggatagaatcctaatcctgtgatgaagattgtcattgattccatcaaatcacatataggtttgtaaattcttgctttaggaattgctgtctttaatctgccctacgttcttagtattcccggaaatatcatcttattattattattttctaaatctaatatcaatggacacaaaacagatatgacaatccatgaagcataaacaaacatgaacctgacatccaactaggagattccttttggttccacctgctcttcccctaccacaatctcgccttcactcctgttctgaattttgtgtttattattccctagtttttagaagcagtttctccccatatgtgcatgtttttctaaacaacttttggtttagttttgcttgtttttgaacttgaagaatattgtggctgggtgtggtacctcatgcctgtgatcccaatactttgggagaccaaggcaggatgattgctggagcccaggagtttgagaccagcctgggcaacatagtgagtcatcatctctatgaaaaataaatgtagccagacacagtggtgcatacctgtagtctcagctactcaagaggttgaggctggaggattgcttaagattgggaggttgacactgcaatgagttgagattgccccactattgcactctggcctgggtgacagagcaagaccctgtctcaaaaaaaaaaaaaaaaaaaaaaaaagattaaaaacaaatggctgcacttgaaagcacagattgagtctatagcttccagcatgagcgatgcagaagatgggtgatatctgcatttccaactgaggtactgggttcatctcactggggctagttggacagtaggtgcaggacagtgggtgcagcccaacgagcatgagctgaagcagggcgaggcatcacctcacccaggaagcacaaggggtcagggaattccctttcctagccaagggaagctgtaacagatggcacctggaaaattgggtcactcccattctaatactgcacttttccaatggtcttagcaaatggcacacwaggagattatatcccatgcctggctcagagggtcccacgcccacagagcctcactcattgctagcacagcagtctgagatcgaattgcaagatggcagcaagcttggggtggggcgcctgccattgacgaggcttgagtaggtaaacaaagcggccaggaagctcaaactgtgtggagcctgttgcagctcaaggaggcctggctgcctctgtagactccaactctgggggcagggcatrgccaaacaaaaggcagcagaaacctctgcagacttaaatgtccctgtctgacagctttgaagaaagtagtggttctccaggcatggagtttgagatctgagaatggacagactacctcttcaagtgggtccctgacccccgagtagcctaactgggaggcatccccaagtaggggcagactgacacctcacacggccggctacccctctgagacgaagcttccagaggaatgatcagacagcaacatttgctgttcagcaatattcactgttctacagcctctgctgccaatacccaggcaaacagggtctggagtggacctccagcaaactccaasagacctgcagctgagggtcctgactgttagaaggaaaactaacaaacagaaaggacatccacaccaaaaccccatctgtatgtcaccatcatcaaagaccaaagatagataaaaccacaaagatggggaaaaaacagagcagaaaagctgaaaattctaaaaataagagcgcctctccccctccaaaggaacgcagctcctcgccagcaacggaacaaagctggatggagaatgactttgatgagttgagagaagaaggcttcagacgatcaaacttctccaagctgaaggaggaagtttgaacccatcgcacagaagctaaaaaccttgaaaaaagattagatgaatagctaagtagaataaccagtgtagagaagtccttaaatgacctaatagagctgaaaactatggcacgagaactatgtgacgaatgcacaagcttcagtagccgattcgatcaactggaagaaagggtatcagtgattgaagatcaaatgaatgaaatgaagcgagaagagaagtttagagaaagatgagtaaaaagaaactatcagagcccccaagaaatatgggactatgtgaaaagaccaaatctacattgattggtgtacctgaaagtgatggggagaatggaaccaagttggaaaacactctgcaggatgttatcctggagaacttccccaacctagcaaggcaggccaacattcaaattcaggaaatacagagaatgccacaaagatactcctccagaagagcaaccccaagacacataattgtcagattcaccaaagttgaaatgaaggaaaaaacgttaagggcagccagagagaacggtcgggttacccacaaagagaaacccatcagactaacagcggatctcttggcagaaactctacaagccagaagagagtgggggccaatattcaacattcttaaagaaaagaattttcaacccagaatttcatatccagccaaaccaaccttcataagtgaaggagaaataaaatcctttacacacaagcaaatgctgagagattttgtcaccaccaagcctgccctacaagagctcctgaaggaagcactaaacatggaaaggaacaaccagtaccagccactgcaaaaacatgccaaattgtaaagaccatcgatgctaggaagaaattgcatcaactggcaagcaaaataaccagctaacattataatgacaggatcaaattcacacataacaatattaaccttaaatgtaaatgggctgaatgctccaattaaaaggcacagactggcaaattggattaagagtcaagacccatcagtgtgctgtattcaggagacccatatcacatgcagagacacacctaggctcaaaataaagggatggaggaagatctactaagcaaatggaaaacaagaaaaggcaggggttgcratcctagtctctgataaaacagactttaaatcaatgaagatcaaaagagacaaagaaggccattgcataatggtaaagggatcaattcaacaagaagagctaactatcctaaatatatatgcacccaatacaggagcacccagattcataaagcaagtccttagagaactacaaagagactcagactcccacacaattatagtgggagactttaataccccactgtcaacattagacagatcaatgagacagaaagttaacaaggatatccgggaattgaactcagctgtgcaccaagtggacttaatagacatctrcagaactctccaccccaaatcaacagaatatacattactctcagcaccacattacacttattccaaaattgaccacatagttggaagtaaagcactcctcagcaaatgtaaaagaacagaaattataacaaactgtctctcagaccacagtgcaatcaaactggaactcaggattaagaaactcattcaaaactgctaaactacatggaaactgaacaacctgcttctgaatgactactgggtacataacaaaatgaaggcagaaataaagatgttctttgaaaccaatgagaacaaagacaaaacataccagaatctctgagacacatttaaagcagtgtgtagagggaaatttatagcactaaatgcccacaagagaaagcaggaaagatctaaaattgacaccctaacatcacaattaaaagaactagagaaacaagagcaaacacattcaaaagctagcagaaggcaagaaataactaagatcagagcagaactgaaggaaatagagacacaaaaaacccctcaaaaaatcaatgaatccaggagctggttttttgaaaagatcaacaaaattgatagactgctagcaagactaataaagaagaaaagagagaagaataaaatagacacaataaaaaatgataaaggggatatcaccaccaatcccacagaaatacaaactaccatcagagaatactataaacacctctatgcaaataaactagaaagtctagaagaaatggataaattcctcgacacatacaccctcccaagactaaaccaggaagaagttgaatccctgaatagatcaataacaggctctgaaattgaggcaataattaatagcctactaaccaaaaaaagtccaggagcagatggattcacagctgaattctaccagaggtacaaggaggagctggtaccattccttctgaaatgattccaatcaatagaaaaagagggaatcctccctaattcattttatgaggccagcatcatcctgataccaaagcctggcagagacacaacaaaaaaagagaattttagaccaatatccctgatgaacatcaatgcaaaaatcctcaataaaatactggcaaaccaaatttagcagcacctgaaaaagcttatccaccatgatcaagtgggcttcatccctgggatgcaaggctggttcaacatacgcaaatcaataaatgtaatccagcatataaacagaaccaaagacaaaaaccacatgatgatctcaatagatgcagaaaaagccgttgacaaaattcaacagcccttcttgctaacaactctcaataaattaggtattgatggaatgtatctcaaaatagtaagagctgtttatgacaaacccacagccaatatcatactgaatgggcaaaaactggaagcattccctttgaaaactggcacaagacagggatgccctctctcaccactcctattcaacatagtgttggaagttctggccagggcagtcagtcaggagaaagaaataaaggatattcaattaggaaaagaggaagtcaaattgcccctgtttgcagatgatgtgattgtatatttagaaaaccccatcgtttcagcccaaaatctccttaagctgataagcaacttcagcaaagtctcaggatacaaaatcaatgtgcaaaaatcacaagcattcctatacaccaataacagacaaacagagagccaaatcatgtgtgaactcccattcacaattgcttcaaagagaataaaatacctaggaatccaagttaagggatgtgaaggacctcttcaaggagaactacaaaccactgctcaatgaagtaaaagaggatacaaacaaatggaagaacattccatgctcatggataggaagaatcaatatcgtgaaaatggccatactgctcaaggtaatttatagattcaatgccatccccatcaagctaccaatgactttcttcacagaattggaaaaaactactttaaagttcatatggaaccaaaaaagagcctgcattgccaagtcaatcctaagccaaaagaacaaagctggaggcgtcacgctacctgacttcaaactatactacaaggctacagtaaccaaaacagcatggtactggtaccaaaacagagatatcgaccaatggaacagaacagagccctgagaaataataccacacctctacaaccatctgatctttgacaaacctgacagaaacaagaaatggggaaaggattccctatttaataaatggcgctgggaaaactggctagccatatgtagaaagctgaaactggatcctttccttacaccttatagaaaaattaattcaagatggattaaagacttaaatgttagacctaaaaccataaaaaccctagaagaaaacctaggcaataccattcaggacataggcatgggcaaggacttcatgtctacaacaccaaaagcaatggcaacaaaagccaaaattgactaatgggatctaattaaactaaagagcttctgccagcaaaagaaactaccatcagagtgaacaggcaacctacagaatgggagaaaatttttgcaatctactcatctgacaaagggctaatatccagaatctacaaagaactcaaacaaatttacaagaaaaaaacaaccccatcacaaagtgggcgaaggctatgaacagacacttctcaaaagaagacatttatgcagccaacagacacataaaaaatgctcataatcactggccatcagagaaatgcaaatcaaarcaatgagataccatctcacaccagttagaatggtgatcgttaaaaagtgaggaaacaacaggtgctggacaggatgtggagaaataggaagacttttacactgttgttgttactgtaaactagttcaaccattgtgtaagaccatttgactatttgactcagccatcccattactgggtatatacccaaaggattataaatcctgctgctataaagacacatgcacacgtatgtttattgcggcactattcacaatagcaaatatttgggaccaatcaaaatgtccaacagtgatagactggattaagaaaatgtggcacatgcacaccgtggaatactatgcagccataaaaaagggtgagttcatgtcctttgtagggacatggatgaagctggaaaccattattctcagcaaactatagcaaggacaaaaaaccaaacactgcatgtactcactcataggtgggaattgaacaatgagaacacttggacacaggaaggggaacatcatacatcggatcctgttgtgggatggggggaggggagagggatagcattaggagatatacctaatgtaaatgacgagttaatgggcgcagcacaccaacatgggacatgtatacatatgtaacaaacctgcatgttttgcacatgtaccctagaacttaaagtgtaataataatttaaaaaagaatattgtgatcctctggtttttcctgaaaaaatgtatccatgttttaatacaggtatagttcctcttcactgctgtgtattgttacatcatagcatcatgttttcatcctttcttctgttgatgracatttgggttgcttgcagttttttgttgttatgacagtgtctttgtgaacattcttgtatataacccctgctgtgtgaagctttttctaccatttatatatggtaagagacagggtccagtttcatccttctgtgtatggacatccagttttcacagcactatttattaaagagactgtccttttccctatttgtattcttggcaccagtgttgaaatcaattgaccgtatatgtgagttcatttttgggccttctattggtgagtctttttttgtgtgagtatcatgttgttttmattactatcactttatagtatcgtttgaagttaggtagtgtgatacctcccactgtgttctttttcttcgtgattgctttggttttgttttgttttttttttcagttccagatgaattttaggattgttttctcttcatgaaaaatgactttgaaatcttgataggtattatattgactctttagcatgccttgtgtagcatggacaatttaacaatattaattattcctgtctatgaacattgtttttttcatttatttgcatctttttccatttctttctttaacattttatagttttcagtgtacatgtctttcacctccttagttcaatttattcctattttattttatttgtagctattgtaaatgggatttttctcttgatttstttttcagaatgttcattgttagtgtatagaaatgttcctgatttttgttarttgactttagattttgcaactttattgtatttattagttctgagttttttggtggaatmtttagggttttctctatataagatcatgttgtcagcagtgattgtttcattttgtactttccaatttggatgccttttatttctttctcttgcagaattgctctggcaaggaatccaacattcaatagacatgttggatttttgtcagatgcttttcctrcgtctaatgagatcatatagtttttgtctttcattctgttaatatagtgtatcacatttattgatttccatatgttgaactatccttgcatcccagggataaatgccacttcatcttggtgaatgattcttttgatgtggtggcaaattcaatttgctrtattattgaggatttttgcatctgtgttcatcaaggatattggcttgcagtattttttttttttgtgatgtccatgtttggtttttgcatcagagtaatactggcttcataaaaggatcccttcctcttttattttttttgaaggcgtgtctaaaaaattcatgtcagttcttcattacagcatttggtacaattaaacagtggagcyatctagccttgggattttctttaatagaagacttcttattactgattcaatctcctcacttgttagtggtctatttagattttctatttttcgtgattcagtcctaataagttgtatatatgtagaaatttatccacttattctaggttatccatttttggggaatataatttgttcataatgttctcttatggtcctttggatttccgtgctgtcagttgtaatattgcctctttcattgctgattttatttattttgagtcgtattttgggttatctctctagtctagctaaaggtttgtcaattttgtttgtcttttaaaaaatccaactcttagttttgttgatcttttgtactatttttctagtctttattttatttatttctgctctgtattagtccgttttcatgctgttgataaagcacacccaagattgggaagtaaaagaggcttatttggacttactgttcctcatggctggggaggcctcagaatcattgtgcgatatgaaaggcatttcttacatggctgcagcaagaaaaaaatgaggaagaagcaaaagcagaaatccccagtaaatgcatcagatcttgtgagactattcagtatcaccagaatagcacaggaaagactggcccctgtgattcaattacctccccctgggtccctcccacaacatgtgggaatcctgggagatacaattcaagatgagatttgggtggggacacaaccaaaccatatcatgctctgatcttaattatttctttcctttcactcatagtgagcttagtttattcttctttttctgtttccttgaggcataatattaagttgtttctctgagatcattcttctttcttagcataggcatttattgctgtaaaaactttcctcttgcaactgtttttgctgcatcccatgagctttggtatgttgtgtttccttttttgtttgtttcaatatatttttaaattttcctataatttatttattgatccattggttgttccgaaggatgtttaatttttatgtatttgtgaatttttgttttgaaatttctcctgttactgaattctagtttcataccattgtagtcagaaaaggtgcttggtatgattccagttttattaaattttctaagacttgtcttgtggcctgtcatatgatctgtcttggtgaatgcttcatatgtgcttgagaagaatgtgtactctgttgttgttggatggaatgttccatatctgtctgttaagtccattaggtttaaagtgttgtttaagtccartgttcccttattaattttctgtcttgatgacctattattgaaagtggagtattgaagtcccttgctgttattatattggaatctatctctcccttaagattctttaatatttgcattatatatttaggggctccaatgctgggtgcatgtgtatttacaattgatatatcctcttgatgaattgaacccattgttattatataatgtccttctttgtctctttttctagttttttacttataaagtctgttttgtctgatttaagtatagctacctctgctcttctttgctttccatttgagtgaaatatctttttctatctcttcactttcagtctatatgcacccttgaaaatgagatgaatgttttgtaggcattatatagtttagcctttaaaaaaagcatttagggctgggcaaggtggctcacacctgtaatcccagcactttggaaggccgaggcaggtagatcacgaggcgaggtcaggagttcaagacgatcctggccaagatggtgaaaccccatctctactaaaaatacaaaaaaattagccaggtgtggtggtgggcgcctgtaatcccagctgcttgggaggctgaggtagagaattgcttgaacctggaaggtggaggttgcagtgagccaagatcgtgcctctgtactccagcctgggcaacagagtgagactccatctcaaaaaaaaaaaaaaaaaaaccacacaaaagaatcatttagtcactctgtctttttattagggaatttaatcaatttacattcaaggtaattattgatagataggcaaggacttagtattttgtcagttttgttctggttgttttaagatactttgttcctttttccattcttgcagccttcctttgtggtttgatcgttttctgtaatgacgtgctttgaatccattctatttttctttgtctactatagatttttgctttgtagttactataaggttcacatggagcatattatacttctggcagtctatttcaagctgataaaaactcaagtttgattacatgcaacaacactacacttctctttcccccattttatgtttttaatgtcagaatttgtcattttgtaatatgtattccttcgtaatttattttagctatagttgttattaatagttttgtcttttaacccttgtacaaggaataaagttgccttatgcactgccattacagtcttagagtattctgaatatagctctgtattacttataccattaactattatgttattaattcacagccttttgtttcagcttaaaaaattccctttagcaatttctgtaaagcagacctaatgatgataaacttccttagcttttgtttgtctggaaaagtttctgtttctgcctcattttggaaagacagctttgctatgtaaaatatttttggttggcagattttttcccccttcactttgaatatatcatcccactcttagtctgctggatttctrctaataaatttgccaagatagtcatattgggacccctttgtatgtaatgtatttcttatctcttgctgttcttagaatttcttctttgtctttgatttagatagtttgattattatgtgtgttagtgaatgcctctttgggttgaagttgattagaaacctctctgtttcctgtacttggatattggcactttccccccagtaagaaaagttttcagccattctttcttttttctttttttcttttttttttcttttttagatggagtttcactcttgttgcccaggctggagtgcaatggcgtggtctcggctcactgcaacctctgccttctgggttcaagtgattctcctgcctcagcctcccaagtagctgggattacaggtgcctgccacyatgcccggctaaatttttttgtatttttagtagagatggggtttcaccatgttggccaggctggtctcaaactcctgacctcaggtggtttgcctaccttggcctcccaaagtgctgggattacagacatgagccactgcacccggcccattatttctttaaatatgctttctggccctttttctctttcttctccttttgacttgctattatgcgtaggccaggtctcttgatgatatcccataattttcatagtctttctttattcttttttctttttatttctctaattggataatttcaaagttctgtctttaagctcatttattcttttctcagattaattgagcctggtgttgaaactttctcttgcattttccagttcagatattgcttcttcatctctatgatttctttcttttacaaaaaattgtttccatttctttgtcagtcttgccatttggattggttccaggaccctcctctcccccatgtataccaaaatctgcagatgcttaagtctcttctataaaatggtgagtaggctgggtgtggtgactcacgccagtaattctagaactttgggaggtcraggcaggtggatcacaaggtcaagagattgagactatcctggccaacgtagtgaaaccctgtctctactaaaaatacaaagattagctgggtgtggtggtgtgcacctgtagtctcaactacttgggaggctgaggcaggagaattgcttgaacctgggaggcagaggttgcagtgagcctagatcacgtcactgcactccagcctggcaacagagtgatattccatctcaaaaccaaaacaaaacaaaacaaaaatggaatagtttttgtataaagcctatgcacatcctcccatagactttaaataatctctagattacatgtaatacgtaatgcaatgaaaatgctatgtaaatacttgttatattgtatttttaagtttgtatcattttttattgttgtgggttttgtattgtttctttctgaatattcttgatctgctgttggttgaatccacagatgtggaacccatgaatatggcgggctgactattatgactgtattcttgcagttcatggaatttctttaagaggatttttctaaattttttgtcatcattttattgatctccctttcattagggtcaatttttggagctttgtcagtttcttttggagatgtcatgatttcttcctgagtccatgtaatccttgtgtccttgcgttggtgtttgtgtacttgagataacaaccttttccagctttcacaggcattctttggaacagacccttattatgtagtttaacctgcaattctggttgggctagctggtaacagccttgggcaggcagagcttattttggagttctctaaatgtctggggtgctgcctttaccttgaattcacatggggcagctggctggactgagcttcacaatcaggctgagctgctggatgggcactacagtagcctcagatcakgccagggtgtgttctctgctcaagtggtaccactatttgagttctgcagttggccagggttgtgggaggggcctcaaagttaagtggagacactgagatggacaagaccagatgctatgcacaatrgaaatgcatggttgaagttttccttcctgcctrtgtggggccttagggtgagttaagtgttgaggttaagtgctgtgtaaactttccctctgctgtccctgctcttcaatgaagtttgctgcattgrttgtctccctgcctgggtagggtcttggggtaagctttgaggtcacaccaggtgttgttagactcccaggtgtggcacaactagctttccattttgctgcaattccctgtggtggttgttgtcctccatgggcagggccctcaggtagagtccaaggctggtcctggattgtgcctgtctaggaattcaagccaggtagcactttccacctcttccaggagtgatcagctcagctttgcctgtgagctacactgttagctggtacctctaatcaggtacytttgctgccaggtacacaaagctaccaccaagatctgtacactcattgctttgtttccacctgaccccaggtggtctagttgtgctgtattccgctgtgttccctttgaggtgagaccagagtggacttcctaagaagcatcttggaatgctagggaagctggatatttgctttcgggttctcttttccctctgtagaaaccatggtttttgggaaatcccgtctgtgaggccctgggccaacttgagggatggggtggggcaatgttgtcaaagtgagatagtttctctcaccctttccatgcggcttttattccatgctrtggaccacacaagtgactctgacttattcctaacttggggagttttcaccaaggcgttcttgtctgtggatagttgctagttgaactttttgtggggtaggggggtagtgaaacctgtgacctcctatcccaccatcttgctgatktcgtctgaattctctttgtacattagttttgtgatctaggaactctgaactctcttattaattctaatatgtagattattctggatttttaaatgtaaacaaaaataccacttctgaataacagtttggatatacccttccagtttttatggtctatttctttttctcgacctatctagcttactagaacctccactgcaaaatagaagtagtgttggggccaaacagaagtagcgttaagggtacttcagctttttttccaatttgaattctactaatgttttacatttaaggatgatgcttattgtagattttctgtaagtactgtttatcaggttattatgaacattgtttcgagtgtatcaactaattttcctgtatttattgacatgatcttatggtttttcttttttaatcttttgatttgtgaactacattcaataatttcccaatgttaaaccaatctagctttcctagaaatagccaacttggtcatgatgtgttactttttaaaatacattatttgattttgttttaggtatttgtttaaaattttatatccatatttgaatgtaatttgcctatagtgttcattttyctgmattgtccttattggattatggtaccacagttacattatccataataatgagttagggaagctttccctctttatctcctttgacttagtttatgtaaagctgaaattatttcttccttgaatgcttgatagaactcacttgaaattttctttgtgagaaaatttaaactactaagtcaacttctttaattattataagattattcggccaggcgtggttgctcaaacctgtaatcccagcattttgggaggccaagatgggtggatcatgaggtcaagagatcgagaccatcctggccaacatggtgaaaacccatctctactaaaaatacaaaaattagctggtcgtggtggcgtatgcttgtagtcccagctactcgggaggctgaggcaggagaatcacttgaactcgggaggcagagattgcagtgaatcaagatcacgccactgcactccagcctggcggcagagtgagactgtttcaaaaaaaaaaaaattattcatacattctcatttcttagaagtcaggctgttatagtaagcttttttttctgcagatttattttattaaattttcaaatttattggcctaaagttgttcacacctatcatcttttttatttatgactatagcatctctcagttttattcaagttatatatttcagattttatttattagagaattgtgatcaggggagtttattagatttttcaaaggacaaccttttgsctttgtccaacagacattttaggtatgtgaattatacctgttaattttgctcttatctattgtggtattagtatttttcttgtcagtgtcttctaaagtatgtctttatatatttaaggtattcattatttaactgatatcttggttataaataattatctctgtttttctttaattttgattttagtcaattttttgtttataattttgtttattacttttgtacttagaatcatcctttatttagaaatgaaagattaaaaaaawttttttaacattagttttatttgtatctctaactgtaatcaaactatgtctctgatctggaattttattccgacctatgaygttaagacttcaaatctatggttgaaaattccagctttatgatagaatcacctgaagtgctttttagagacatttgcccagttcccttcagttcccttccgcactcactaaatgtaggggtgggatggggtggtaaaatctcagaatatttaaaaaatatatatcatagacagttcttgatgcacaatcaggtttggaaaccactgatttaaatatatttattttccaaatagctacctgattgttccagcrccattcattgagcaagctttttccttattactggtttgggattcctcctttaccatgtgtgttaaactccagagtatgctgggggttgttctgtggctcattggttctattagcagtcttgtgccagcgtcacagacttagtgattcaaactttatgacatattttaatgtttattaatgctagacctccctcttccttattcttattttttaaaacgtatctcatctttctcctcaaaaaatttaggatatttttcatttaaacatgttattcagaacaaggttggttgtatgtgatcatcttttccatgtcatttccactgctttgttgttaagataatttcttctgtgtgtaaacttgtgttgttacataattattttctttgagtttgtgagaaatacgtaatttccttgattttctaactggctcttattggtgcataggaaagttcctgattttctttcagtagagtttttaaagcgcrctctgccttttggctctgctgagattctttcagttcctggattgtgtctcttgtccttgcactgactgtgccattcttccttttatttggaatgttcttcatcactgcccacactcccacctgtacctaatgatttcttaagctttagatttctgctgaatcatcccttccccaggatgttccttcagacttttcactaggtcatgacctcctgctgtgtacttcatcacaatctacatcttctgttacagtgctctgtttcagtgcaatcactcttccctgctggattgtaaacgtcttcaggtccaggaaggttttttgttttgtttaagtctttaaaccatctgagttaatttttgtctatggtgtaaggaaggkatccagtttcaatcttttgcatatggctagccagttatcccagcaccgtttattgaatagggagtcctttccagactggataaaggtggtacatatacaccatgggatactatgcagtcataaaaaagaatgagaccatgaccttcgcaggaacatgggtggagctggagttattagccttagcaaactaatgtaggaacagaaaaccaaataccacatgttctcatttataaggaggagctaaaggatgagaacacatggacacatagaggggaacaacagacactggggcttactggagggtggagagtgagaggaaggacaggatcagaaaatayaactaatgggtactaggcttaacacctaggtgattaaataatatgtataagaaacccccatgactcaagtttacctatatatcaaacctgcccatgtaatcctgaactttaaaataaaagttaaattaaaaacaagatttttgtttttgtttttgctgttgtctccttaatcaggagagcagaccgcacacaatgggtatttaataaattgcttaaatgaatgcatgaatgcttgcttcagcaacataactttggcaatgtggagattgtggtggaataggagagaagatgtagagaagccaaatgaaatctgttccaacttttcaggcagaggaggataagcatatgagctaaggtagacttactcaggatagagggtaagggttagctttcagagtgaagaggtgtgattggcatcaattaggtgctgactggatgctggcgagagagagagaaccaggtgaatgggatacctctggaggagctggccttgggaagaaaggtgagggaaaggtggggacatttgctttcctccctgtacactgtgaaggtaaggcatgagggagaatgcccctcagaaactgttgtttgcctcaaaatccaacaaagctctttttaggtttgaaaagaaagcagttcttttttgctcattcatagaatacctttcagtgagttgcttctaaggacggtagcagagtttttgctgtcattgttttgttttattttttggtttttagacrgtctcactctattacccaggctggagtgcagtggcacgataagggctcagtgcagcctagacttcctgggctcaggtgatccttccacctcagcctcccgagtggctgggaccacagatgtgtgccatatgcctgactaatatttgtaatttttatggagatgggatttcatcatgttgcccagatagttttaaactcctgggctcaaatgatctgcccgccttggcctcctcccaaagtgctaggattacaggcgtgagccactgtgccctgcccttggtagagttttgaagacagttgttatgatgttaagtcattgcactgagtcactaggccatcctttggctttacaggacataaaatatgggagtttcatcaccagacagtgggcggtactgggtttcctactgggtggacagtcctgctagtgggagagttctgtccttagtctgtgcccttggactgtagatatagacatagaaggtcatctccctttatttcgcctttctgccttcattgtcactggggaracagtccccccaagtcttcctgtgtgtgacgctgtgcaggtggyacatagaaatgcccatcagtgatacttattttgatgctgctgtgatcctgagaattttcccacttataggtgctctctttgggatatctgttggcattcaactgttttcaacagaagtctccaaaattggtactcatccagggttatgttaactgcccagtgtaccgaagggtgatgtggacaggtggaaaaagactgggttaatctcttagtgagactaagtgtttttttacaagtggttggttgtctgagggttagaagacttagaagagttttacattctacattgaggaagtaggcactcacccatggtgggtggtctgatgtccttgtttcttcagtggagttcttttttctttttttcttttctttcaagacagagtctcactctgtcacccaggctgagtgcagtggcacaatgtcagctcactgcaacctccgcctcctgggttcaagcaatcctcctgccttagcttcccaagtagctgggattacaggcatctgccaccacgcctggctaatttttgtatttttagtagagacagggttttgccatgttggccaggctggtctcgaactccgacctcaggtgatccacccacctcggcctcccaaagttttgggattacaggcgtgagccaccacacccagccatcagtggagctcttaatgtcatttagaacattattattgttgcagttgaactggagatggtaggaaatagtgaagttctgcagttgttgaaacaagatgctccctcaactgtgctgttccccacagtagagaggtaagacactccagaggagttgatggtcgagcagctatctgatgcctctaactgggaatggtctcacagattccttactgaccttaagcatcagtagtttgcttcccaagcttgtggccccaaactaaatctctttaaaaaaaaaaaaaagcaaaaaacccgaaagtacatgattagatcttgcaatacaattattgacaatgtattttctgtagtttaaatgaatcacttataaaactttagtgaatgggatacgtaccttatgtggttttagaaatattcgtgtgcaaatgggcagaatgaattggagttcaggtcactttgccaacttgtgagatgtcactagatttcaatgtatgtaaataaacaagctcgtctttccaaatacaactgcacttgttatttccaagagtctttcaacaaatgggataggaattcacaggcagggtcccagtgcctggttgaatctgactccccctgtgtaaccttggacccatcgctgaaaccctatgccttcgtgtcctttttgtaaaatatggacaccatcagtactcaggaacaccatgaggaccaaataggtttacacacgtaaatgcatggagaacagtagctgacagtgctcaagtgctcacattagcaaaatgaagtgattccctagtgaatcacactattacttaaagttggatttttttttgttttttgaaatggagtcttactctgtcgcccaggctggagtgcagtggcatgatctcagctcactgcaacctccgcctcctgggttcaagtgattcttctgcctcagtctcccaagtagctgggattacaggtgtgtgccatgatgcccggctaatttttgtatttttaatagagacaaagtttgaccatgttggccaggctggtcttgaactcctgacctcagatctgcccacctcggcctccgaaagtgctgggattacaggcgtgagccaccacacccagccaaagtttgatttttttaaaacttaaaagtcccaatggattcagatcattgagatttgtaacctattattaacatacattttctggctgggcatgggaggcagaggttgcagtgagctgagatcgtgccactgcactccagcctgagcaacagagtgagactctgtctcaaaaaaaaaaaaaaaagatatattttcttcagctgggtgtggtggctcacacctgtaattccagcattttgggagtccgaggtgggtggatcacttgaggccaggagttcaaaactagcctgggtaacatggtgaaaccctgtctctactaaaattacaaaaattagctgggcatggtggtgcatgcctgtaatcctagctactccagaggctgaggaaggacaatcgcttgaacccaggagatgaaggttgctgtgagccaagattgcaccactgcactctagcctgggtgacagatcgagactctgtctcaaaaaaaaaaaaaaaaaaaaaaaaaagacagatagttttcttcattaattcgggatatatattgtccaggggagttggggaaaagcctagacttaagacctaacacactgactttataactccagaaagccacatgaaatgagtttggtgttcaggtcaggaaaccaaagtgcaaaataagaggaggagctgtctgtatcctcttatgccttgtctggaggtgtgtaggaggctgagaatggtttagtgagcacattgctatacatcagtgatctcttccctcctgtctcagatactgactctgtgccccggggtccctctccgtgaagcaggagttacacgctcagatgcctggrggggtgagacagcaacataaatgtctttcatgggccagatggggactgtcaccagcagcagagcatgttcagccactactcattgccaagcagttgtttcctgtaggaattcaggcccagtgttccagaactcctgatttttcaagaagagacagaaatctgtactgcatagcccaaataaatcttggattagatgctggctgcaaccacactagtttgcaatttttgtaatgggaagaaaatatttatgatctatgtaacacacaaatgttggtgttaaacagatacttttactctagaatctttgggtaaaatgaagtctgatgaccttgttaaaacatattatgtaatgcttgactttggtcattcaggaaatacctactgtgtgcgttaacaygtaatttagtacatattttctctttaaaatgagcagttgctacaaatgaaacctggcccagaagtagcagattgtcattctgcaaaatatttgggagacctgtcttttgccttttaggttttgttagtttgatggaggtaacgttacttttggttcttccattgtatttaattgacagtatcatcttctaaagaatttcagttttacagattggagtagtgaactcagggaagcattaaaaactagtagaaagatttgagtagattgggcaacttggcaccaaggccactggtagggacgtgcacactcttttcttaataacttagaggtgatgaactcctgaktgattgcctcagctaacagatatttggctgtcactaaaaattatctaagttgtattacttgaaaacttagaatttaaaagtgttaccatagaggcagatgtgcctctagaattacctgtgtccagaccaccaaaaatgaccagacattccccttgcttcatatgagtgactgctacttcttgactttttaaagagttagctttggccaggcacggtggctcacaccggtaatcccagcactttgggaggccgaggcaggcagatcacctgagatcaggagttcgagaccagcctggccaatatggtgaaacccccgtctctactaaaaatataaaaattagccgggggtggtggtgcgcacctgtaatcccagctacttgggaggctgaggcaggagaatcacttgaacctgagaggcagaggttgcagtgagcagagatcgcaccattgcactccagcctggatgacaagagtgaaactccgtctcaaaaaataataaaagagttagcttcactttgtttgcttttcctatcttccagataaaattatcaagagattcagtcacagatttgcctctgctttcagacactgccaaatccagagcaaaaccatacttctctgaactttccccaaaatcatctaacaagagcccaaattccctcctacagctcttttgctcagagccaccccatagtttcccacctgctggctccctgattacaaagagtcaataaactcaacctggtactactgtagtctgctcctggtgagctgtggatgaagggtattgctacctaggtaagatttgatgatattattacaccattatttacttgttggcatttgtgaaatattaaaggtagcagggcctatcataggaggaaaggaaggttgatggtaaaaatggaatgatctatttcagcaaaagctgcctaagaaatcgtctccctcagaaggttatgtatgtgcaagctcttcactccctggaagagccagtgagtcactccaggcagtcttgcaaacggtcgtttgattcgagttacagatagtaggaggtgaccctttgaaatctatttagaaaaagttctttctaaaagctatcgattgtgctgattatgatcatagcaggtttcaacctgctgtccaagtctggaacttyaggcaagttaagatcaacaagcactctgcgatcgagtttcatttaattagagtttgctgccaagtcaggttttgaggccaactgcatgccaggcgcctttcaatggttgtctgtctgagctgggggaacgttggaggatgctctgccctttctccagtattaaccttagaccaaatcccaggggcttgccctgagataagctatctctacaccactggaaagagaatgctttgctgcaaatgcatgaaggcagagcaaagatgtaaggcaaataagtgggaaatccagttcggtaggcttttcccaaaagcgagagaaaagcgttcgtagtcctttatcaggatggtgggggaaaaagaaaaagtaagctgacttttattttttcaagtcactttcctaagaaacttgtaaggacctctctaaggcactgctatctgtctttgtagggcaagcgtgaagctttcccttgccagctttrtgatgtcattgaattaataatactgtaaaggctagatcagaagtcaatttggcagctgtgcctttagggaaatttttgggagagtgaccttccatttctaataagcatgttattacatttagaattaaattactaagagccaagctaccctcttgaatttgctattagccattttttcccttttatttttaatgaactagaacaagttgaagccagttgtttctattagtaatagtacacagtaagaaaggaacaaaaaatcttttactatcaggccctttatgttggacaagtttagctcttctaaatatcagaatttgtgaaagacttccacaaagtctatttcttttttcttaatttgggtagagtgggagaagccagtgggttcctttcaccaattttatatttgaatgcctcctcatgtgtgagttttcttccttaaagtgagaaagatcatcttcatttcaacgtttgtgtgattctgaaattcatgtggaatataaatgggccccaaagtccaatggtatattctgtaacaatgcacctacagagtatttaacccatcaaccactagagcccaatttaaaacaccagtccttaaggcagggtggtacccgggctgatgtaaatgaatagacacccagagggcagttgagaaatagctagcaagcaagttggatcaattttaatatcaaatcacactctcaaataagacagaagaactttttacgaatgatgttggcagagagagatggcagtttggagccaaaatttaaatcccacactgtaaacctaaaacaaacataaaagggtgctccaggttaactaaagatgacaaattattgaattgtggaaaacatagaaggaaaaaaaaaagagagtatgttcagatatgaagcaataaaccaagtcacaaagctggaaatattccctcattaaacaatacctctttaagagcaggggctgtcacaacaacttggtaatattccacacatttgctaaggtaaattcaacaatactatacgtggaaatgctgctactggggatcccggttaccccaaaagggactctttcctgtttggcttcatgaagacaatacataaaaccaaaagtgagtgccaagcagtgcagactttattcgatggtcatggaatggagaagtgggagcgtagcttgcatatcaacaactcagctcttgagaactgggaagttacagatataggggattcttcattttaataagcctgtaatgatggcccatttgtgtctgtgttcacacgtgcgtctctgagagacagagacagagttcactacatgtgggtatggtatttagattcctctattggaatgcaggttccttgaagctcaaggatattgtgatgcacaggtgctctgacccaggaacacagcctggcctgcctatcagatacggaccacaggaaccatctgttctactactcttccacacccaaaaaacctgccactgccgaggctacccctaccaagtctaggtgtgtacattagcttaaaataattcatggtattattaaaggtcaaaattatttctctctttgtacctttattgattccgctgatattcatccatttgcttattgactggtgttttcattgtggtagagccacacaatttttgtttttgattgtcattacttatatagatttttgagaggaacctaagattgtttttttctttcttgctcattaacttgtaatatctcaaatatatacttaataaagtaaaaattgacttaagtaaagggtgagaaaaagattatgaacttaagaaggattaaaaccaatttgcatagctctggagagactgtctttccttgtattacttggggaaagcaaaaattaaaagagatgagatctattatctgaawcatggatagtgtgacctacccagagtacctactttttaaccttccagtgggtgttgaaatctgattcagcacattcttggagagtgatgagtaaatttgttgttatataaagatttttcaaaaataagcatcggattcaaacatgagtagaaaggatgagatgttaatttaagtgattatgggaagctgtgatttatacacatgaaatcrttcatttagagatgggtagtaagaacaatgaggatcttagggactgagtatctgtttcctaggacactagagacagcattaggtagtgattaacttaagaattctgaagtgtgattgcctagatttgaatcctggttctagtcctttctagctctctgaccaggagcaaattacctaagctgtctctgcctggaccttcccatctgtaaaatggtgttaataataacatctacctcatagcattattgtgaggataaaagtgagttaatatatgcagatttctagaagagtacatagcatattgtaagcgctgttatacacatttactctcattacttgccatgatgagtgtgcagaggttaaccaggagacaaaggaagctcacaccccagttgttttgtgggctacattcttggcgatgttttatcgttgcccctgataatttccccatttttaagaaaaaagaattcataggcttagcatgtggttgatttaagcctaacttttgactgattctatatgggattctgactctctgattaactttgatgttctaactttacctagcgaatattttttttctttattttatcgaacagggaagaggtcttttgatttttggattatttggtataatattatattcttgaaatcatcctgtgactgtcaraaagctgactgtaaatgaacagtgagccactgcagacagaaacaattattcagggaaacataaattcataatcactgggcctaaaatgaattagtgagtaatccaatctgggggtgagaaatgagcccttggcaacattgtytttaggctacagatggtccttgaaacactattagccggtggatctgagcacctgaaaggtttaaggaagcctgggtctgtgctgaaggtgtctttgggtaaactgtcatatttgcatgcagcatccttttagaatatcaatgagatctttatatgcatgtgttatgtcatttccaagcaccctgtcagtaaatggatgggtggcatcagcccgaatgcaaaggaaaggggttcatctggaactgaaatagcagaaagggagcaggagatggatatttgatggctgcccttccctgtgcattgtgtgaataccactaggtgatcatctcagggcacctgcacaggcatctgaaatgcagtgtagaggctctgcttggcagatttgaggacattaaggctcagataagataactatcttggcccagatcacatacgtgggacatggcagagccaggattcaaattcaattttgaataattccaaagccaatgcagcacctgaatgcgtaggtttaataaaattcagcctaatccttctgaaagttaattcaatgcaggagtgactttagcatcaatattaatttaattttctttcttataagttatttcaagtttgctgtttccctacagtttgaattgaactttttcttcgattgctgggcaaatctcatttatgagtttgcagatgggagaggtattctttaagtcagctttgcaattaaaatgaactagagtacaaatgtctcaatttaaccttgacacctgatgtaatattcacacggcctcatcatccatcatcttttgtgtgccactgaggtgcattgggccactggcttttatcccatgattgtagagttgcatccgacattatctgtttcaaggatcgcagaccagctactttttctgaactagaattctctttgttctagacctgttgtttgggtgatatatagagatgaagcaatcttcgacctgattactgtctggctatagaactttattgtatcccatagtatacaggactgctttgagttttgcctctattctagccatttgctgagaagaaagacatttgtggaggtctcctcaataggaatttttattaaccataagtgatttaaaaccattgtcaaacctgtaacttttaagagttactgtgacagaatgaggggaaaatattctgaagtttaattagaaactatagaaattagacggccaggcatggtggctcacgcctgtaatcccagcactttgggaggccgaggtgggtggattgcttgaactcaggagtttgagaccagcctgggcaacatgatggaaccccgtctctacaaaaaatasaaaaattaggctagtgtggtggcaggcgcctgtaatcccagctcctcgggagcctgaggtgggaggatggcctgagtctgggagggcaacagagccagaccttgtctcacaaaaacaaacaaacaaaaactgaagaaattagaagatgaataatggctgtggtaatttactttcttgtaagtaaaggtctttacctactttacaagaaagatctttacttacaataaaataagttacctgtaaatggccttaaatattgattaggttgtaagagagaatatgaaattagataaaatgtagcaatatttgatgtcatcatttccttcctcacccacgcctcttctggagtgggcagttggtcacatgatcttgcccctcttcagcgattgcactgtggctgttactgtcaggagatgcccgtttgtaggtctgctggtagaagtctgagatagactggctcagagacaagctgtaccagtaagaacgccctaagaaactgttcaagccagagagagcagttgccagcgggcagtggttactggagctrgaatgccagatgaagtctgatgggtttggctctgatgggtcttgtgcatccaaaaccaggtagccagaaggagccagttgatcaagcagatatagaaagatccccagagagaagcagaggtatcatccaagagatgtgaaagatttttccacatcccaattgctacctggattcctgagacttggttttcattttcttctgtgaatctagtgaccatatacctttttccttgcggtaacatgggacataactgattttcttgaatgcgagagagctttaactaaaagaagattgacayttaagacaaaatgaaatattgcaaatagtcaagaagatctacacttgggtccagaatgttatagaattaagaaaataactttctgtggcatcagagattgaaaaaaaaaaagccgtcgagaccaggagcagtgtggctgtgaatccttccagagcccagatgtacaaggcagcagaagcaacaaaggctgtggccagcaaygaaggcagagtccccggtaggcggaggtccccgtgcacagtgtggtgcagcagtgaacccaagattttccttcacagggcaggggaactatttcctaataagcattggcattcaggttagtaaccagttgataggattatatcaacctgtctctaagtcaaaacagattattcaacttttttgagtggtattttagaatacataggtcaaagrtgggcatggtggcacacacctgtagtcccagctacttgggaggctgaggagggaggcgtgcctgagctcaggagttcaagtcagcctgggtaacatagggagatcctgtctctaaaaataaatattaaaaaagaacatgtagatcagaatttggatgacttttttttcctcaggtgcagagatggtaggggcatactttcaatccctggtacatgactttctttctggtctgcttagcaatatgtgtgaaatgtggccaaggatatgggacttgttgtgcctgtgccatataagagcctcatccaaataagtctgtacctctgtcttaaattccagaaaccatggatgcatgtaacaagcatattgaataggttctgtaacccagagcttatttgtttttattattattattattttagaggtgggggtcttactatgttgctcaggctggacttgaactcctgggctcaaggaatcctcccgcctcagcctcctgggtagctagctgggactacagatgcacaccaccactcctgtctcagagcttgatttttaagccttatatatacttataataaaatatgttcataatatattttataaaatgaatatataaatatatatttataaaatgtatataaggcttaaaattttaacgttaagaatgctgtttctcttttttagtttctactggccaatggaaagaacatcaagggattgcaggccaaatttataaaatgtttacccagggcaatgctagtttactttcatgtattcaagtattgtcattgtataatttaggtatttatactccccgggaaggtgtttcttggaacattttaattattgaatcttaagaatattagtttttattaattcgtcatttatttgtttatttttattttttatttttttgagacctagtcttgctctgtcacccaggctggattgcagtggcacaatcttggctcactgcaacctatacttcccagttcaagtgattcttctgcctcagcctcccaagtagctgggactacaggcacctgccacaatgcccggctaattttttktgtgtgtgtgtgtatgtatgtgtatatatatatattagtagagatgatgtttcaccaagttggccaggctggtcttaaactcctgacctcaggtgatccacccacctcaggctcccaaagtgctgggataacaggcgtgagtcaccacgcccggccagaatattagtttttaaatgaatgattccaagctaagttttgctattggaaatataggagttaattatgacaattatcatttgatgttgtgggggctaaatgtgggtatttttggtgtttttccttttttttgttacatatgttaaactctgagtcttttgacaacaccaaaaggcattatgacaactgtatatacatttaactttgctttcagggagactagttcaaggtagtaaaacctcaaaatggatttgcaactgaattaaggttttctgagtagagataaggctgaggtagccaaaactacttctgctatctctttagaaaaagtacttttattcagtctgttcttaaaakaaataagtgtggttgttttcttttttaccataagcagaatgaaaacaaaattagaagtcattacttttttttgccccagcttactttttgttatggaggtaaaaattacataacataaaactaaccattaaaagtgaacaattcagtatatttagtacattcatgttttgcaaccaccacctctgtctagttccaaaacattttcattacccccaaattaaaatcctgtatccattaaacagtaactcaactctttcccctcaaaatcaccagtctgttttctgtctctatggatttacccactctgattatttcatgtaaatggaatcatacagtgtgtgctatggtttagatatggtttgtttgcctccaccgacacacacatgttgaaatttgaaccccagcatggcagtattgggaagtggagcctactggaaggtgtttgggttacgggagtggatccttcatgaatgtcttggtactgttctcccagtagtgagtgagttctcatttttaggagaatggattaattttcatgagaaaggattagttctcacgggagtcagttgttaactcccttaagacatcctttgcatttccctctttttgcacatatctgtttccactttgaccttctttcccactctccatctcatgttgtgatgcagcatgaaagcccttgtcagatgccagggacatgtccttgaactcctcagtctgcgaaactgtggcctagataagcctcttttttttttataaattacccagtcttagatattctttaatagcaatacaaaatggactaagacaatatgtgtaaccttttatgcctggctgctttcacttaacatctaatactgctttcttttgtgtttgatttttttttctagtgtacccttttgattcccttttcactgctttttctgtatactttttagttattttcttactgatttaccatgagtattacaattaatattgcaagtttatagcattctagtttgaaatggtgccagtgtagcttcaatagcatataagaaccctgctgctgtatagctctgttccccctttatgttatttttactaattttatctttgtatattgtattaatatagatttatagttattgttttgtgcacgagtcttttaaatcacctgggaaaaagaagtggtacaaccccaaaatacgtaaataatgaattttatgtttacctatggttacctttacctgtgattgttatttcttcatatagctttgagttcctatgaaatgtcctttcctctcagcctgaagtatttctctttagcatgtcttatagggcaggcctagctcctttagctactgtatatctgggaatgtcttcatttctcctttattttagtaattttgccaagcatagcatttttggttaagtttttttttctttcagctttttaaatattttaccccattgtattctgggctccaaggtttctgatgagaaattggcagttgattttattaaggattgcttgtgtataataagttgcctctttctttctgttttcaagattctctcttttgttattggcttttgatggtttgaatatagtatgtctcaacatagatctctttgagtttatcctacttggagtttgttgagctttgtggatatgtagattcatgtctttcatcaaatttgggagttttcagttataatttattcagatattctttctgcctctttatctctctgtttttcttttggaactcccatttgcatgtgttggtatgcttgatagtataccacaggtctctaaggctctgcttatttttcttcttttttctttctacttctcagtatgatttaacagtatataaaatatgcataggagtatcttcacatttgctgagtctttcttctgcctgctcacttctgctattgaacccctttagtgaattttttacttcagttaaacttttcaatttaagaatttctgtttgattcgtttttataatttctatctctttactgatattagctatttgcttatacattgctttctttatttcctctactttttttgtccatgtttccatttccatttaagacagttaatttaaagttgttgtctagtaagcccagtgtttgagcttcttggggaatagtttctgtcaatttatttttttcctatgaatgggacatacttttttgttttttggtatgccttgtaattttttttttgaaaactagttgttttgaatattgttatatggtatccctggaaatcagattctctcccctaaccacggtctattattgttgactcttgagggctgccatctgtttagtgatttttccaaaggttgcattctttactgtgtatcattactgaagcctctgttctgttgacatatggttactgacatttccattttgttatctcattggtcagccagttatgtgacagaggatttccttaaatgtctggaaccaaaaagaaaagaaaaaaacaaaacaccaaacatttttctagtctttgcagcttarttctgacctaagtcattccctcaatgctaaaccaggtcacccatgactctgccttagccttcacctcctgctgtgcagaacccacagatccaccagtggggcaaacctatggtcctctcaggtcttctccaagcatgtggcagtcctaggcatggatttttcaccctagcttccacagcgtatacattttttattccctctagaaacttccttcttagcctctgccttccctgctttttggtctgtcccttactagtttttattccctctagaaacttccttcttagcctccaccttccctgctttttggtctgtcttttgcttccccatccattgtccgaggcataggtagtgtgtgtcttgaaatctttcaacagatgccactgctgcctgaaatgccactgcagcccaagggagcaggaatgaaacaagtaccagcctctgtgcagcccctcagggaacagccaggcaggtcaaaatacatacctgcagtattttaagaataaggtttactttagctccctgataccagcaagccacactaggagggcaggccaccatccccatggctgccctatggtgctggggttagagcatggtgggcaagtgagagaaaagaccccagtgctttcttactcaaatccagctgcctttttcttcattcggcatattccttactatcataggtttttaattaactcctagagttctgaaaaagctggttgtgtcagtatttgttagcttacttattattttagttcagggaccacttgtttgagtgccctactccaccattttgtatgatgtgatttggtagttccttctgaaggaagatagtcccactgcatagaaatctaagtatgaatattttcaatgaaacatgctgttattcaggcagccttttctgcctgaggttattgaatcagacgttctgcagtctcttgccctggtgttgagccctgggagctggatggagtctgaggtgggttgttctcatcctcttcccccttgctgcaggttccctctctgaatttcctggcacaatgccctgctgtcttaaatgtttactaatatttgctaaaaaaatgattatttcagtttagctatataaggtgaaaatggtttcccattttcagaagactggtttaccaccttttggctggcacacctgtatagctaacataaatgtgatttaaaatttaaatgaatttgcggagcctgaaagagcctcttctttgactaccctggagaaaaacaggtagcaacactttatgtcttagatgatgttcctcctgatgccttaattagaaacttgtagatttacttgcagtccagctatgtgctcatttgcacagtttagtctaaaggctttacctagagtcacaacttgattgttgtccaactcacactgggccactaacactgcaagcttgacctatatgtgaaatcatggagctggttcctcatcaatttcatgactgaaaagtttgtttacttcctttcttcttgttggcagttctgttaagtgtcttgcttcagctgtgtctgcagcctctggacaggtatagtggagcagtgttgcgggaagtcagggaccccaaacggagggaccggctgaagccatggcagaagaacgtggattgtgaaaatttcatggacatttattagttccccaaattaatacttttatagtttcttatgcctgtctttattgcaatctctaaacataaattgttaagatttcatggacacttatcacttccctagtcaatactcttgtgatttcctatgcctgtctttactttagtctctcaatcctgtcagctgaggaggatgtatatcgcctcaggaccctgtaataattgcattaactgtacaaattgtacagcatgtgtgtttgagcagtatgaaatctgggcaccttgaaaaaagaacaggataacagcaattgttcagggaataagagagataaccttaaactctgaccgccggtgagccaggcggaacagagccatatttctcttctttcaaaagcaaatgggagaaatatcgctgaattctttttctcagcatgggatatccctgagaaagagaatgtgtacctggaggtaggtctctaaactggcccccctgggtgtggtcgtctcttatggtcgagactgcagaggtgagatagactccagtctcccatagcgctcccaggcttattaggaagaggaaattcccacctaataaattttggtcagaccggttgatctcaaaaccctgtctcctgataagatgttatcaatgacaayggtggccaaaacttcattagcaattttaattttgcctcggtcctgtggtcctgtgatctcgccctgcctccacttgccttgtgatagtctattaccttgtaaagtacttgatgtctgtgacccacacctattcacacactccctccccttttgaaactccctaataaaaacttgccggtttttgcagcttgtggggtatcacgggacctaccgacgtgtgatgtctcccccggatgcccggctttaaagtttctctcttttgtactctgtccctttatttctcaagctggccaacacttaaggaaaatagaaaagaacctacatgaatatcggggcaggttccccaatagagcagcgtactattttgctcagtgggggacactgtaggtcatagagtccatcttggatgggtatcaacttgaagttagtgtctgcctgcctgcctgtctctcatatgtttgttyggggggcctatctgtatatatacttttgtcttatttgaagattccagtttttttcatagagaggcagtaaaagatgcccaaggatgttctgactccctttcaacttatccttgtaaggcaccatagagaargtatcttaggtcttttgttttttcagactgtggcatcatcagcttttctccaaagtgctggctgcctctcacaacatcactgcagtgtgtgttgtcttgctggcagagtctttccatttctctttggggtgggaatggaggcaggaagatattcttttctagcacrtttggcaaggggagttcaattcaaaactctaaggaattggtttttcaaatctgtgccacctttgttctttttttaaaaaaaggacatttaatatttctcaagtgcaaacttctcattctggctgctatttattttcttcattctctaaatttattctgtcagcgtttctgaagctgcctctgctggttgccaggcagtggctttactccttttggagtaaagatgaatctgaccccagggtaggatcaaaatctgtaccagtagrtcccagttctggctttttgagctaatatagtcaatctaatttcccttgcatgtgatagctattaaaacattttaagactgtgaacatgcttatttgagaccggaagagactgggtcacagaggaagaaggaggcaattacagagtgggagtgggcaggctttggtggtttggagactttgggagacatgaataatataagggattggtggaaaagagggagggagcagggtagagacaagaacctttggtcagcttgtattttttagggtcagtattctctggcaataatctctccagcttctttggaacgaaaacatgaatagtgtattagattaraaatcacaggactcccaggctagcattaattctccattcarccctgcctctttcctaccatgatggacaaggcaaggagatgagggacagaatgctttctcctccgcctctcactgttcctgtgattttcagattgtactattagcagagttctgcagacactataacagcgaatactgatgatcttctataaatgtatgtggaattctatttgatgattcttgtttaacgccacagaaattttggataggatacaagaagattacccatgatgtggcaaatgagaccagttgggatagctacaaagcagagactctgacttctgtatactgcacaggaaatggattctcctaactgtcctcctgtcatgtatgataccaatgtaattatagaaatagaagtcaaacatattttaacaaatgtggtactggaaaatcatacagctctactggctaattttccttaatttcatgatgttttacaaattggcatttattgctccctgtctacgctgactcgtttctctactaagcttgcttttttcctaccccagacacagatctgatcataatcttccatatatcccacccaaacagctattggtgcgtaggaaaaatggtttaggctgataaagaatgattcacggcaatggaaagaaagccagccactgaagtaacttataaaatgagtccagtaattcagatgtatttataattttatttgcctgtgtggtcctagttagacttggctctgcacagggaaaggaggggaaaaagaaacaattttaggggaaaaagtgaaagatggtacaaaaatttggtgaaaattacatagtccatatgccgctttgtcatcattaagctaatgttttcaacaagctgttttttgtggttcagcagaggaaactcggcagtgtgattgcagtcatggaatcctacctggctttggttccaccatggctacatcctgccataaacggagacttcgggaaggtctaggaaatattgtggtgttagtgtctttagttaaaagccaaccattcaaggttgtctggcccaaagtaacgtttccacacttagagaagccacccaacctctgcccctgtttaggctagtgtgaacaaattcatcctggccatgttgtcttctcagaactcctatgagggtccagatgtgtccccccccgaaaactaaatctataaggacctttggctcttttagctgctttattttttgttttcaaccatgtatgaaagtgagtgtgcaaaataggcttttcaataaattatgcatccttcaataatatatcgtttccattccagttagctttaggcccccaaaccagatcattaggtctctggaattggctgaggcaagctggcttttatgtctctgatgcctcttggcccatccttttcaccaagagaggattagaatggattcattgcaagggctgcagggaagtggtgtatttagtgctttgcagtgcctgccacagacttgagtgtcaaattcctcctttctctaaagagcataaaattcccatcagacttggagagctaaatgcaattgaaacattgaggggaagagtgttccttggcacattttccccacccggagatcctcaacagtacgtttcctcccgtgtagtgactattaggagtgcaaaacctgaatactttttcaaaattagaatgaccacaatagtaaataggacagaatgggagtggtattgaagtaagaatttgcttatagaattaaaccaaatccaaattatttctcactcgccttcaaaagataattttgagcttttgaacatagcagatttgctggtcgtgctactgagtagtttgaaagcaaatttcagtcaccaaaaggacgtaagtctagaaggaccctttacttctttctgttgtctgttttaatgggtgcattctggaaccaaatgcgagtcatcctgttttatctttttccctttgcccctaagtttcagttgcttgtctgagtgtacagctagattgtttgccttttgtaaaggtgagcatatgaagcagacatggtggagccttggggccctagtagtgcagaatttttggaatggcagcaatgttacctctatagtgtcagctttgttctttggatttgcattgcatgacccgtaataccaggtggaggaaaccatgttgaatttctctgggggccactgctcagcagttgtcaatctttaagtgcttaaaaatgtctagcattcttcctttccagagggcatcctgtgtttacacatttacgccgtcaaaatcaagcctagtggatagaggagttgtagaacagggcagacagaatcaaatcaggcctggtgtagaggtgtaccttgggaaatacctccagttgttttcagacacttgcaaatatgtgtaaatrataagttttatcagatagctttttattttaatattttgggaaatgggataacacaaccttttcttgtgaatatcttttgttcttttaatagaatgtgaaatcattacactctaagtagcaagacaagaatatcatgtaaacatgttctggaagatctgggctttaattttgttgtgattagtgtatttcagagagtgaacatgtttggaagagtattgaaaatactctcctgggttgtgcyggtgttcatgggttggacaagctcacctttgacaggcaggcttggatgctgctgatggagttacagagagggctttgcatgtgaaaaaatgacattttaagttgaaatgccataattaatcatttccccctttgattcatgttatagaaaccaaattaacataattaaattatttttacaatcatatattaatagaaatgaaaaatactcaaggtattggagaccccaaatatcctgacttgatccttattctatacatgtcaaaaatacttacatgtaacccataagcgtgtaaaatattgtatcttaataaaagaaaaaaaaatgtatatgtatattttaagaatcagtagtgccttgaaggataaatattctaataggtaggcagtggttaactgcaagtgatctgattggtggtctggatcagaaaattggaatttcaaattagagaatatgtttctgacttgacatcataagcatagatgtctttaaaatgcttttaatattcacaggcatttggggaagartgagctagattcttttttccctcatctagcttagatatttctacatttgctatcctcagtacatcatatctcagtagctcttcccccggcttgagttgtcctggaaaggtgcagacctcatgagaggtggaggatggcagggaaataaccaggtcatctcagrggtctgcagaagggtaacatctaattgagttctgagaccacacgtgaactctgcctcaggacattgcagcccttgtcctggccacacactttattgcatgtgagtgccccacactacccaaccagctcaaccagcttcactctgcctcacgagaaagctcttattttacctgtgccaaagtaaaaaaggttgaagtttgccaagtggaaaggaaaagacagacaacacattaagtgattttttaaaaaaaatttttatatattccttctggaaactgtttttctgtttgacttgatgaaagtatacatgtatacttgtatacatgttgtagaaaactataacagagaatacaggccagtattctctgtagtcgattaaaatctcttattggtagagttattcaatagggaactcccaatttgacaagttaaaactcctaaacaaaaaggtgtcttatgttttgtagtcttgctcttttgaagggatttaggaaacctctaacttctttttttgtttttcttttcctagtgcctttgttattgggaagaggaatttttattttcttttccagaggaagggaaatctctgggccagatcattgcctgggacaggattctcttgctaaatgccctgcacaccatcttccatcctactgcagcagactcaccttttaaaaactcttctattgtggcatcagcttagtctagaagtctgctgcccactatggtctctgctagccacatggggctgtttaaactcaaattaattaatgttaaataaaatcaaggttttagttcctcagatgcactcaccacatttcaagtgttcagtaggcacctgtggacagtccagaacatttcgagcatcatagaaagttttattggacaacattgattagatccataatggttttcaatttctttaagactttaaatgtgaactctttagcctggcctgtaaacctgcccaaattttgccatctgtagatattgaatataatttaccagaagggagaatgcagaaggtagtcaagaaaatccatgttggtataactcatgtgagacccgggtggtggtggagagacatttaattcccttctgaagaaggcatggcacttggacagacaggaggtagtccaggtagctctgggataatgtgtgaacatgaagattaatttgaggagtatagaagattttgatcttggtgaagggtaaggtgaatagaggacaacgggagagagataggtggcctgtattctctgttatagttttctataggggactgtcttctcatggtcttcagcctgtgtttgaattcaaacatttcagtctcctttgtcctcaaaaagagaacatgaaggagtggattcactcatggcaaagcagatgggaacaggggtgttagtgaatagtgtggacttcagactttaaggaatgatgatgagagttagtggtccacagattctggaaggagcactgtggtgatctggtgcgaatgagagggggtgggggatattacagagggttatgaggcaagtaatacctttacagaaagtcaaattttaatgatggaaagaatgcaggaatgtaagaactttaagatgaacagaacatgactcatgatagctcagacgacccagaagatagagtggataagtaatagaggtgcaggtggttcttgatgacaagaacttggccttcaactctgtgtccctagcacctgtcaaggcacttgatgattaatggattctgttaaacacttgttgcctctgtggggaaagctgggctcaccaagctagtagttgtggagtatgggggaaaacagagttctgtgtctcaggcggtaatttcagcaacaagtgaagaaggcagataataggctggggagaagggtagaggcacttagtgacaggctggcagcaggtggaggatatggccgggagtattgctgagtttataggattaaaaggccccactggagagctgctgagttgattgaattccctagaccccagatgccaaggtaaatgccactggggcagctctagcacttttcaatagtgctgcctgtggccctgagagtgtgccagcaggtggggttcttctgaggcaggagggcaggactggtggagtcaagcagagggagccagctctgcaacacagctcctgggtggcagcttgccttccagcacacgtgttatgcagcagagacctggtaaagccttgtttggaaagacaactttggcagcaggatagctggaaagccctaccttggaaattagtcctggggttgaattgtagctgtgccactcacttgctccgtgaccttgggcaagtcagttcacctctaaggcttcctcataaaatgaggagaataattcttaatctccctgtcactggaggctgctttgtggaggaaagcgatgtatgtgaaagcatgcagtaagctgtaacatgctacaaaaatgcaagttatttataagttgggtttcaggggcaaagaaagacaactcagtgaagatgtctttacagtaatcactgtgagttaatgacaacatgaatcaagaatatgataatggaaaaattagggagacaacagaaataaaggcttctagtaagaattttaaaattacacttggaaaccaggtaagcaatgggaggaaggyaataggatgaaggagaatgaaggctagtaaaagatagtaggattctgggtttgaatggttgagagaatggtggcaacattaacctagaggcagaaagagggaaatactggaaatcaagatgataggctttgttttggacttattaaattctctgtactactggaacatcctgataaaaaatggtaacaggacattctggttgtaagcacagtgaaaaaattgagactgagtttggaagccagccaccagaagcagtgtttgaggttttgcaacagaatgttatcacccaggcagccatgtagcattagaagaaggccagggataaactttggggcagataatgcgatttgacttccttgggtgttaggtcttcctcaaggtaagcgtagttttcttactgcttgtatggtggccatgacacttatgactgtcagcactacatgtttatgtgttcatatttttcacatactttcaattcttggagtttagggattgtattaatcttgtataccatagacacctgaacataagctaaatgtctactagcacacagtaaagatttgaatatgttattttgaaataatgaatcagtgccctaaaacaaaggtggtcattgttaaggatgatctggagaggcctgggygaaggataccaccctgggcccattccaggttagtgacatgaagagaccagttgatattgtcagtgtctttctcctttgatgctctatagattgagttgagaacatagattgttgattgcggattaggaaaaataggaggtcaaggggattaagacagcatcagttttcatgaagttcaaggtagttggagaggtgggttaagctgaggaataccagtctagagtgattcacagtagcttctagaacaaaacacttttgcaaaacaagacaggtggaattaaagtgggggcagaaattgaacaggagagaaatttcatgctctacgttcttggtgtgaccgtgctaattgtgtggcttttgtgggttggatcgcatccttgaaaagataygttgagttgttgagtcctaaacccccctgcacagtatcttagaatgtgacctggtttggaaatagaatcatggcagcttagttaagatgagttcataagttgaggctttcatgcaatgattgatgttcttctgaaagaagagatgcacacatatagggagatcaccatgcgatgatggaggctgagatggaagttagctgcagctgtgtactaaggaattggcagccagtcaccagaagtggggaagagactaggaaaagatccttcctacaggtttcagagggagtgtggctaccttgaattcagatttctagccccaggagctgtgagagagtacttttctgttgttttaagccacccagtttgtggtacttggttgttgcagccctgggaaactgacaccatggctcaagggaagcagaaatgaaggtcatggagaccagggtggtagaatcatggatgcaatgctgaaaatttggagaacaacatggagagatagagtgaagaaaacagaaggggaatgttctggagtgttctgtagccttcatagctaactgctcttgtcrtcctaaggctccttgtacgtcagtctctttgaaagcaaagtgagaggcttttgccattgccatcaaggtgccctctacaaccatgtttgtatttatctcagcggcccaggcttgtcagttcctggcatttgggtttaggttgtacttggtgtgggcgcttggtttcttttagagatattgtaaaagggacactgtatatttaaatagcatggaagacttcaggttgaattgggtcaaggtgcttcccactccctgcacaaaagaattctaattgcagacaactcaatcaaacaatacaactcagtatatttttctgaagagagggaaacaattggaattgaagtgactaattccttttgcaaggtcctctaggaaaactagaaattctagaatggctttctggagaaaagtctttgaagggtttggggaactgtttagaaaaaagaaagcaaagaaaaatctgggttcaaggaaacagacttgacaatattgaggttgtagggagtgtccagatacccggcatgcttgactgtctctccctctcccatgactccagtttggatatgatgaaaatgaatgtttttaatttgttagcctggagcttctcctgcattggaaagtgattttgggattaatgctaacgttttagaagatttttcccatattgagtgtagaattaaatgtttgcgtaccccatagtgtttactttaatttttccacactcttcaggagttggcaggtatataattctggatgatagcatgtgctgtgtgtactctccagtcctgacgctgcagggttagggcattggtgccttttgttcagtccacgcagggaaacgtgcaggcagggagctggtccgagacgtctccaggcagattacgggaatggctgctcccacaataacaaaaaatggctcctggtggaaaaagaaaaatagaggtagtctgaacttgtggacaggtttgtttcctccttcttagatatgagtatttaatttttctctttttagctccctctctctaccaaaacaaaacagacaactctttgaaaacacctccaaatgatttatgtgccaaagatgtgtgaaaatgatcatcttagatgttgttgggggtgggaaacaaccctcagtggtttgttccattcttatctgtccttgaaaatagttgagaacaaacgaagacttgggactgactgccttggatgtggtctggtttgccctgtaactgacaagagtgatgggtccccgtcgagtgacggcgttggactagaacccaggctgagagagcactgcggtccttggctgatgcactgaagaaaaacgcgtcagatagaaacaaaattactgtgtatccatttctgtgcataactatagtggaagaaaagcaaaatttaaaaaaaacacaccaaaaacccygcgatcaccattctctgtaattcagactcttttttgtagtaagaagtgccatgcagctttcatgaagttgctggtatctgttagccgcactccattgccatggcccatcttcttgaccttccactcttattgtgggtttccctgttaatcggatcgtgcctcccccctcctctgcaaacaccttatagttttgagagatgataatcaggcataaaatccttcccctgagtctgagtctgggacttcagtcaccttccagcctaagaggctggagcagcctggcatgctccccggcagctgtttttcttagttggtgcattgctttaattggccacagttctcctcatctgtcatgaagactcttaaagctcatacgagagtaattttctccacctcctttattgcgagttttctcttgacggggcacaccactgactctctggaaggcttctctgctcgctttctccagaaagccgttatttgctgagtttctgcaggctggccgattgagttacagcccgaagaatgttgaacctggttctcagctgcaggatgtctttccccaaagttcttgtactgctaggcctaccctgaggattcacatatgtgtattggtttacaacaacattaaagcatcccctgaactccccaccccgcctgccccaggtgggtagattacttttaggactatgaagtagtgctctcacaggggttggagctcagggttggcctgcagtataagccagttcccttctggctggtttcacatacatttatggccttcttttacacctaataggcttgctttgggttttcaggaaaaaattcttcatgcaattagggagagattctgtggtcatttaccataaaaggttgaaagctttaataatgtaaaacataaaacaaccccggaaagtaagcattaattggatctctaagtattgcatttgataagatatacacagagagtgaaagatcataagcagaaaaatgacttgctgatattacaatttgaggttattttagtaatggtgtataggatgaaatagaccaggaaacaacttggaaggaggggcctcacgttagcacattgcccttagacattaagcctgtagcagctgcaacatccaaggtgaggttgtggttgagactgtagtgagcgatttgtatgcagttcctacatcaccactgtccctgtggactgcagttggtcctcttgcttgttagtgttctagacacataagtttcttaaaatgcgtgatttcgtagtagagtcttataattctactagattttrtgtgtagttttatgtgtgtggactaatacttctgtgggtttcagtctacacatttgtattttattcttgtcattagagttctgaaatgatggttggcacgaatgaattctcatctcaactgaagtgccaggatgcccttgctttcctttaaccagtagggagaggtaggagccgtgcggaattacaaatggtggcttctgtgaaagcctgttcaagtgttgttcagagtttcaacaacaacaagaaaatgctatccaagccatcatttccttttttttttttttattatgagtctctagtcattcttgattttgtggcaaattgatggtcaagaaggccaagtttagcctacagtggtgtcttgtttggactgcactgtgaatatcgttaggtgggggcaggcactttccagttggccacagtcctcactactcctaatgtcctggcatatcttttttacctgcctggtgcccttgggtcatttatttgcatggtacacaaacacaaagtacattttcatatttcttccttaaagagaatcaaatagtaaaggagatttctatttgatttctatttttatttgtttctccaactgtcttaagactgtgatataaaatgaacaatgagatgcttaaaaggtttgagaggaaacaaaatttctaacgaataagatataataaaaaggcttccgcccaggataacattattaaccagccagttagcccttgagtgtgtgacgttgatcttattgactgcgcttagcagagtgggaagtttgtatgtttcaggtttactgtgtgaacagtcctagtagtgaatgattctggtttaacctttttcagtcttactggaaatatttttgctcctgcgtttcctttattcctcaaatgttgctaaattaactcaggccttggaaagccctgaatagtcatctccatttcacatacttctcttattttttcaattggaagtgttgatctcaagacaagctgaaggctgagcctggttgcattgatctgattgattctgccgtgtgctctgctcggcctccatggaaagaccatatcgagttcgtccactgttgtgaatgaaaataatcagttggtgaaagcacaaaattagaaacctcttggtatatttatttctgtgtctcaagaattctgatttaaagcagactttattccaagtaatgtgaacagtaggtcgttcaggagtctcggatgaatcaatgttttcttccctcctctccaagaaaatctatttaaagcaaaggtcaaatctgtgctggatttagaacctattaaatgtaagtctggaaaacagagccacttctcttttttttgttcttcacatagtttcaagcactggggacactctggtcttctgcaaatcatcatttcccacgtattcctggtgtttgtaactttccttttgttccagaggatggagtgtaacctgtagtgtatatactgagtgaatttgagctcttttgagtcttgggcttattacatttagaaataatttaaaccttgaaagttgtcttggaggagtttattaggctttgaattatacctgagaagaatgtattaatgtatagattaatcaactcatttaaataacctgcttacaaattgactcctcctgcttgtggttcctccccaacccctcctatcctgtcgccctctggcctcctccatctctatgaaggctgataagccatagttggatgtgacagccttagacacagcccctgcccaggcctcacactcagttactgagcccagtcccctttgcttctgtaaaggcttcagtcctgctgctccctccgtccaggccgattagatatatgggtgttggcatagtctctgaactggactccctgtttcccatctttaccttttttatgtcattcttccattcggtaaagatttgaatatactttgcaagccaggctgtgccctcggccctgaatatacaattgtgaaagagtcagccaggaaatmctggcccctgcagctgattctctagtggggagggtggacagtgagcaaaatgtgtcagtaaaagatgtagaagacggacatggtacatgccccaagggaaataaaggaggaaagggaaataaggagtttgcatggggaagtgtaattttaaatgggggcattcaggagggcctccctaagaagccacattgaggtggggtgagctgcatggaaatctgggagaatggatgcaagggagcagcaggtcagcctattagaagaaaagcagaaagctagttggggctctggcaccagasgaggtcagaggggtgctgggcctcgctggccatcagaaggcacttggttcttattcagatggagaccagaagctttggaggactttgaatgtagtgacaggacctgccttccwtggtaacagggtttctctgctgggtggaggcccagggacagttcaggaggctgctctgatggtccaggtgagggagggtgaccctagcagtggccaggtgagatatggtcagggtctagatgcatttcagaggcacaggtggcattgtttgctgattgattgaatatatggggtatgacagaaaggaagaagaatgattctgatatccttggtgtgagtacctggaagcatggagctgtcctggactgaaagagacagaagtgatcactgctgtgtttctctgggtggtgttccataactattccatgcagggccatgcaggcttgggagggagggaaccaggaactcagtttggggcatgctatatttgggatgcctgattggactactgtttgggatgagttttgtcctgttggaaatcagagagaatagggctcacaaggagcggatgcgtcacgggcctgaggggcaggaacatgatgcagtgctccaaggagacctctgtctccaaaccagaaacttatagctgccttggtcatctttattctgacttttaatggggaggtgggtccagaggaaaaaaacaagctgtacatgctcagtgacagtgacactcagtatcccagtatcagggaggcagtagacactgggaagcacctggccaagagcacgtgtgtttatttctcaggggtaacaagttcagtgggaacatgggctcagaactccctgacactgtaatgtttcaagagaagctagataacagagttttcttgtggaatctcttggcttttaaattttggcttaaaaatatttcttttaatgggatgaacagttaacctcttgtcaacctactggttgtatttcctggccactcaaattcgccatcaggaccttttgtgcactgaagtacaaactggtctacttccaccctcaggtaagtctcagtcttcttgactgcggctctgaatgcccaggattctgatggaatcctgcttcctaaaccctgcttggttttcatccacggctcttaacagctcatgacaccgcgttctgtttttatttgtgtagtgtctgtcccctcactaatgtgtaagcccattgagagctgggcctttggagttttgtgcacagctgtgttcctatagtcgatgtttcatgactgcttactgactgtatgaatggcccaccaagctaacatctcaaatactttccaaaatgtcatcagaaggcccttgtcacggccccaaagaagaagggagtcgtggagcagaggagagcacatggcccacagcggccatgagcagagtgctctggccggggtcaggagttcaggaggcagcagatagtccccaaacaaggggtggcaagcatttcttcagcacctgctgtttgctaggtgattggtttgtttgcttttttcacccagtgggagcagtaaggaaatgacccaggtgatctctttttccattcttcagccaacattgattgaaaggttatatgatccacaaagagcaagtgacagctgccggatgttcatttgaaatttacagacactaatgggggcatagtggtggaagtgactctcatcaggctgtccaggcacagcagtgtccctagagagcagctctcagtgttccagggcctagagaagcttcctgatcccccaccatcccagcaggccttcccactgccatcgaggggagcagtaggcagctcttaaacgaaagagccagctctctctccatggcgttgatattcagtgacttctgatctgcggtcacttggtccccacccctccccagttccttacttgttgctttcttagagattggctcctttttctgctggccacatgcctattacttattcccatttcctctctggtcctctcaccattcaccgagcactgtttattctttttagtaaatacacttcctggttttgtctgttatcacaggcagaggtgataccacaggcagaggttaggctcccagcattctaagcctccttaactggctgggtccttgttccagtccatcttccatactgtggtgggtgatctacaaataaaaattcaagtatgctatttctatccatacaaaccttcacaagctccctgtagactctgggatgaagtccaagtgcttcctcccagcctgccagagtccccaccctccagcaccttcctgacacgagactgtggctcaccatactttacaggcctgggatactcactgccccaacagccagacatgcggtgatctttggctgttttcskgykrtyktgtgsykkttttgtgctgttgtgtcgctgtttcattctgaaactcttgggcctctaggatcctgtgcacattataggcctttcctgcctaagagttaattacaggattttgtttcttgctctgtatttcagtgttaacatctgtctccatgaccttccctccttgccagtctgtgtaaaataaagaatggtgaggagagccccaaccygccccaaagcccaccctcacgcaccctagttygttacgggttctacacagccggaagcctttcggccaggtgtgtgtgtcagggagaagacttcttcctcactgtatctgcagtgctgaggccaccgtggaaatgagatgttttctacattttttgcttatttttttcayttactgmtttttaaagtttatgtataatagagtgcgccwctgccattaccaactggagactctcatgtagaaagtatttccaattttaaatgtggtaacggtgtcctatgtgagcatgagatattttcctgatatagcagaggatttgtagacagctgttcttttctctcatataactctgtctgtactccccagcgcctgctgattcagggagycctaagaaggtcctgctggcagggctttcaagaaccacgccctgtgggctaacctgcagcctgggagcctgtgggggacagcccagcttcggccctttctgtctggtgcctttgcttcagcaggttccaaatgtgagcctgtgctcccattttcgtcctatggctatgatcttcactgccagtttgcacagcctgcagctgccacacatgcatttagaatatttttaaatgatcttccttcactatttctctttcagaaatttgtcactgttttcatttgctgtttgcacaagactaaatacagcctgggcacattataatttttctaagagtcaaagggactttagagacagtaagtgtggtggctgtgtcttcaaaatattgaagttttaagtttaaatctccaagagtcaggaagttaaataattaagttgagattaccatgttcattttcttatacagcatctgtgaggtttgctttaaaagttttagcacgtgttttaagaaactggttttgtcttaaagcagataagtagttcaaaaattgtaatgactataccgcttatgtgctgcctatgctgacagaacatatattaacatttgtcgctgtaagccaaataaagatcttaatgagattaataaccctttatcttcctttggtaaaatttacctgatatacttaatgacatagttcattaaaaacgctctttgtaaacttaagttgtctagaaaataatttatctggtagtttcatttttcatttgtaaatgtaatctccattgtgctcagtttgggccctttataatttttccaattatcaaggggactttagaaatagtaagcagaatagctatatcattatttgttaaagttgaaaatgttaatccccaaaggtcgggcaattaagctaaggttattatgttcatagtaaaactattcctagttggagtgatgatattaaatgtggcattgattcattgtgtccctcaagtacacagtgacttctagagatccactctgggcaaatggtgtgacaagcaactgttccgtgggattatggaggtcattttatacatagctgagtggtggcttgcaaatgctgatttcacattcttcttgtaggaagatcacactttgaaataattttcttttaggaaaaaaaaacatctattttgaggagaattccatgttttaaaaaattacaaaaagaatccacagtcaagtagtaaatgcttcttaaaacatatacattatttttgagagatttaacagtattcaagaatctgtttgtttagcaaataaaaggattcctggtactaaaataaaaatctagtttgggggaaaaataaattaagcatattagggttgctatttaatatcttttgagaaatgaaaacagtaaatattttcagagtttttttttttttaacctcgatttgagccctgtcacaactgttagttaaattttctttcagtaaatagtagtaattaatagtgttcagactttctgggctctggagcctgagtgcataaatagtctctttcttacaaatgatacttgatcattaacagcatggccagttttctcttatgcatctcacttcctaaatctgtcctctaacactgcatgggatgctttttcaggaaaacgtgggtttttaagaaatttgtgacttttttttttttgaaaggaagaaactaaaattagagtatctcagctaccctgcaagagagcttcttagacaaggcaagcccatgcacacacagtgtgtccctggtattcttgaatgatcccacggtgtatgtcttgaaatctcagcaaacagaaattcagttcattcattaagcattagaaggtcttcaacacaccattggttatttgggaaatgcaaattaaaactactaaatctaatactacgcacccactggaaggctaaaattaaggagactgagcatgcaggtgtttgtgagcatgaagaatagtggcagagctcacctgtgagctcacctgggaacccacagtgactcaggcactttggaaaacagtcttacagtttctggaaggttaaacatgcacttgctctgtttgtgcctgtatgtgtggtatgactgggtaactccaatcttagatttctacctaagagtaatataaacgtaagtctacacagagaccagtcacacagattcatagaagaattattcataatatcctcaaagtggaaacaatccaaatgtccaataataggtgaacacctaaacaaattgtgctgtgttcatacattggaatactgcttggcaacagaaataataaagtattgacatgtgcattaatattagatgaatctgaaagcatcaggctaggtgaataggccaaacagaagagactgcaaactatgattctgtttatataacattctagaagaggccaaactgtagtaaaaagaggtagatgaaaggtcagcagggcctrgagtgagggaagggacttgtctgcagcatggaaggagggaactttggggatgatgaaagtgttctgtatcttgattgtggccggggttacctgactctrtacctttggcaaaacttgctgctgaatcctacgcttaaaatgggtcagctttattgtatgtcagttaataaagctgattaacaaaagagtatttctgtagaggcttacatgctagtgtgaatgtgtgaattcaataaattgggttggcttattctgagaaggataaaagttttttgtttttcgttttttggaaatagaaacattttgtgggaggtagggatggccagtrtagagaaatatgtcatggggtaagtgggaaaagataacctgagggtaccagactggcacctgggtgcttgcaggtgagaagccaaacatctcttgaaaatgtttgcttaatgcctgtgagatatcatcctgtcttcctttgaattattagtattataggtagtccttgaaatgttatacatttaacagaaatttctcttatctacttatggactttraatttagggatattcctagattggaagaaggcaatattcagagcaaaaaggtacaagctttacttgccaccagcagctgccagagtggaggccttatgtaattacttcggcttcagccttggcagcttttrttagcccaaagtggatttgctatatttgtgctttgaattttaccgtttacactcattaagttctataaatacaaaagcatggagagcattagtgctgtcaagaaagaggtgtgattatgttggaaatgaacatgatagtaaaaagaatatgaaagtggcagggaaatggtgactgcagctgcactgggtgtgagaggctgggcagggaacgatctgaagaatgggggagggygatggtgagaaaagacacagctgatggtcgacaggggacaggagaaagagattcacggaggggaagaaaaagcattgaatgtgtgggataaagaaagagcattatcattagctactcactagcccaattaatgcaggagaagggagtctgctctggaactcgaaggctaagcatggtgtggttgaagtgctgctagtgaaacctgaaccatctgctttgggcatggtcagctctgagcccactggaatttgcaggacatcaaagtgagggctgcagcagctgctgctccatggcatctaggaaatccctcgtggccctgccgagctgacggaggaagagggctcctacccgtgcagatttcagtggtgctggaaccattcatttttgaagagagactcttgccatctgcaaatcggtagaaatgcatccaggttctagaagttttcatctctcctggcttgtttattaactccaaagtgattaacagtggaaccaccttttgaatcctgggtactcctaggttgagcagggctgcacttccaccgtctttcagggttcaccagatgaaactctgaggatsctctatgaatcagcagayacacaacatctcctgagattataaggtggtactgtctgtggtgattacytaattttaatttataaactgggaatgcaaaggccatgctgaccttgctaagaaatgtgaagttcacaggagaacaaaactggggaaaaaggtaggggacagtcgtcagtagcagtcactcactttcgacattaaattatgcgtttgtttaattgtgaaggaaaatacaattgtagaacatgcaccaaaagctagaaatatacagtttaatgttaacacctaaaagcaaaatactaattaaagattttggaatattttttatctttctgggtatgaaacctccagccctgactttttatgccccttataacagctaagtccattgtaactttcagtaattggctttttattaaaataagagactgtagtataaattttagcaactggactaaataggcattaactggccctgggatccaaccataatttgtaacatcgttcctctgggaaaatggattctaagtgcccaataactaccttacaaatagactcttgaatcatagtccatttgagaataaggaactgtttgtgatagtaataccttcaattggctcgcttgagaactgcacagaagggacctatgttccaccacatgtgtgtggtgaacccagctcgtctgggtttgatcaaagattattgcygagtgggcatggaaagtgcaggaattaaactcaaagtagaggctggagacacgtcaagggtggcgttagaaggatggacctggagggctcttagtggtaggaagaggatttcaatcccagaggcaaaggagtgtatctgagcagatgaagggcagggagaagagaatggaagagtaagcaggattgagattgagaaccagccattttcaagcaaaatgtaactcaaagtgtaccagtaaggctgaatagcccaccaagaggtcagagagagacatccctcagatctctctgtctctctctctctctctgttttatttatttttattttatttatttattttgtctgtcacccaggttggagtgcagtggcacgatcttggctcactgcaacctctgcctcccaggttcaagtgattctcccacctcagcctcccaagtagttggaaatacaagggtgtgccaccacacttttctaatttttgggtttttgttgttgttgtctggagatggagtcttgctctgttgcccatttggaatgcagtggcacgatcttgactcactgcaacctctacctcctgggttcaagtaattctcctgcctcagcctcccaagtggctgggattacaggcgtgcaccaccacgcacatctaatttttttgtattttttgtatttttagtagagactgggttttaccacattggccaagctagtccctctcctcctcctgccaaggaagaagaaccatrtattggcatccagtctatcctcatgtgtgctgcagaaataaccctaactggagaaagctgccttcctaagatgagcacctatgtctccatttatgctgtgccctcttacaaaaagccacaggcaatgggctccacatttcagagatttttattcctcactctttccctccttggatccacgcataagtccagtggggaggcccatgggacttggcactgagctagactgggcctctactgtagcacctggatgctctccctgggccaaatctgtgtaccttgtctcatctctttggtgacgtgcttctcaagaggtttttctgtccttcatacactgacccccggcaggcacccctctagaatttcccagacttacctgaatttcctggtgaacacacccaggctgccaagctggcatttccccaggtcagggtaatttttttctctctacccaaattctaaagggcaggctgttgttttagataaggaaggcatagatgttttcaggatgcttgtttgagattcagaattacaaagctaattgacaataaaaagtataaagtttatttattttagagacaggctgttgctggactgcagtggcatgattatagctcactaaagcctccaattcctgggttcaagcgatctttgcacctcacccttctgagtagctgggactacaggcatgcaccatcatgcctggccaattatgtgcctatatgtccctttttttctagggacagagtctcactctgttgtttaggctggtcttgaactcctggcctcaggtgatcctccctctttggcaaaagtgctgggattacaggcatgagccaccatgactggcttctttgtttttaataaaagtccatttaacttttatgcatagaacattattctattaatgtttygtctattgcaggcatacctcagagatattgcagatttgggaccagtccatagcaataaagcaaatactgtaataaagcaagtcacactatctttttttttttttggttttccagtgcatataaaagttatgtttacacggtactgtactctattaagtgtgcaacagcatcacatctttaaaaaacccaatgtgtgtgccttaatttaaaaatactttttactaaaatacrctaacaatcgcctaagccttcagcaagtcataatctttttgttggtggagggtcttgccatgacattcatggctgctggctgatcaaggtggtggttgctgaaggttggggtggttttggcaatttctcaaaataagacaacaataaagtttgctgcatctgttgactctacttttcacaaaagatttatccatggcatgtgatgcygtttgatagcatttacccacagtagaacttccttcaaaattggaatcaattatcccaaacactgctgctgctttatcaactaagtttatgtcatgtkctaaatcctttgttgtcatttcaagaatgttcacggcgtgttcaccaggtgtagattccacctcaagaaaccactttctttgcccatccataagaagcaactcctcgtttattcaagtttgatcatgagattgcagcacattgtcrcatcttcaggcttcacttctaattctagttctcccgttgcttctaccacatcttcagttacttcctccactgaagtctcaaacttttcaaagttatgcatgagggttgaaatcaacttcttccaaactcctcttcatgttgatcttttgacctcctcccatgaatcataggtgttcttagtgacatctaaaatggtgaatccttgctgaaaggttttcaatttactttgcccagacccatcagaggaattrctrtctatggtagtatgaaatctatttcttaaataataagacttaaactctaaatgactccttgatccatgggctgcagaatggatattagataaacatgcatgaaaacaacattcattcatcaacgatgtctctatcagagctttgggtggcccagtgcattgttagtgagcagtaatattttgaaaggagtcttttgttctgagcagtaggtcttaacagtgggcttaatgttcggtaaaccattctataaacagatgtggtgttagccaggctttgtttttccatttctaagaattgatttagcataaattttcagaacggtaaatgagcattggcttcaacttcaagtcaccaacttcattagcctctaacaagagtcagcctatcctttgacactttaaagcttgggattgacttctcctctctagctatgaaaatcctagatggcatcttcttttaatagacggctgtttcatctacattgaaaatctgttattcagtgaagccaccttcatcaattatcttagctagaccttctggcgaacttgctgcagcttcctcgtcagcgcttactgcctcacctggcacttttatgttatggagacagctccttttttaaacctcataaaccaatatctgctaaggctcagacttaacacagctccctcacctctctcagccttcacagaattgaaaagagttagggtcttgctctggattaggctttgatttaagggaatgttgtggttccagaccactttctccataccagcaataaggcagttttgctttcttatcatttgtgtgtttactggagtagctcttttaatttccttcaagaacttttcctatgcattcacgacttggctaactggtgcaagaggcctagcttttggcctatcttcttttgacatggtgcaccatgcttttgacatggtgtaccaaaacaatttcaatagtaacatcaaaggtcactgatgacagattaccataacagatataatcatgagaaagaagtttaaaatattgcaagaattaccaaaatgtgacacagaggcacgaagtgagccggtgctgttggataaatggtgctgatcgacttgcttgactcagggttgctagaaatcttcaatttgtaagaaatgcaattgtctttgaagcacaataaagtgaagcacaataaaatgaggtgtgcctgtattacattaacaaagaaggcattgctaatgatggcatgtattcactgcctgaagtagaagagatgtgtattttccttgatagggaaaattcttttkttgttgttgttgttgttgttgtttttgagacggagcctcactctgtcatccaagctggaatgcagtggtgcaatctcggctcactgcaacctccacctcccaggttcaattgattctcctgcctcagactcctgagtagctgggattacaggtgcgtgccaccacagcccgactaatttttgtatttttagtacagatgggttttcgtcatgttggccaggctagtcttgaattcttgacctcaagtgatccacctgcctcggcctcccagagtgctgggattataggcgtgagccactgcacctggcccagataggggaaattcttgatgaataaatagtaagaggaagaagaatgggttttactgagtgtttgctgtatgccaagccccgtgctaaataatttacgttgattagtttatttgttcataagaaaagtgctatgaagtttttagctcctttttacacataagaaaatggcaatttaaagaggctaagtgtcttgctgaaggtcacagaggtaacaagtagagagcttggactagaacccaggtcatctgaccacaatgcagggctctagactacatctttcttaaataaatctttatgaaattgtcaaaagtcactttttgagaataaacactgaacaataagacagttttctggaacctgtttctcactttttaatagtagctgatcctcaattttactagaggtagaaggattcttgttaattaaacatatttctttaagattgcaatttaccttatcatataataaattgcatatgaatgttacttaatagtcgtcttccagacagaataatttcagcagaattctgtgcttcccaattaacttaaaccatattttttatgagcccaaaattacattcttatatttgagtgagatatcctgttcatagtcataaattcactgtgaaaacaggaacgtctgttttttttttttttttaaagaaacagggtctcactgtgttgtccagtctggagtggtgtgctcagtgttcactacagcgtcaactttccaggatcaagcgatcctcccacctcagcctccagagtagctgcgactacagacatgcagcagacacrcaccaccatgcctggataattttttagttttttcgtagagayggggtttctctatgttactgaggctggtcttgaactcctgggctcaagcagtccctcctgtctcggcctcctaaagtgctgggattacaggcgtgaaccaccgtgcccagcccactttttttttaaatctaaaaaatgttattgtgctttaattccatgtgataatggacattacaccaagatgcttttaaggctggtagtagtgttttggtaggtgttggcagtttaacttgattagatactttctataacatgggaaaaatgatcagcttatttcttacgctggcaatgcatggagagaatggtttaatctgaagatctcagcaggattcaaaattaatattttgtcatatttttatcttttggatgctttaaagattatcttatgcaaactgagaaatgatagtgtttgccattcaagttccaataatgctatctttccccaaaaagcacatttgtttatatggagttttctattctaggggcaccaagaataatgtgtatgtagtgtaaagaagtggattattgtaaatttctaacagatctcactatgaagatgtttgtacccataaaacagacccagagggcattgcattgaaattttaatgtataaatgtgcaaagctgaactgatagtatatttatattagaatgggtgtgttctcatttcaagaaacttaattttgaattctattttgtttttgatattaaacacacaaaaaatgtgattttcccctatactcttgtttcaggccacaagggcagccattactcagcactgcactgaccttgggaatttgctgggcaaggaaaatgacrtggccctsatcatcgatggccacacmctgaagtacgcgctctccttcgaagtccggaggagtttcctggatttggcactctcgtgcaaagcggtcatatgctgcaggtaggaacctgcaggctgtgcacagttcacactctgctgtgtctgtatcccgtgyttatacaaaagaaagggatgcatgggaattctaggtttaaagttttgtatctaaaaaaggcaaaacaaaaatacaaatttatttttaactgttggtgcacagattttgcagaggcagttagtggtttttacatttttgttttgtttattgtcttctgagaagataaaaagagtaagaaccagggcttccagtcacattcaccatgggggataaattggaaaaacactgcctcaagcccctttgagaaattactggggtccaacctactgcacatgtctgagctcaacttccaagatgtgtggggctttgatgcttcttttctggcgtttgttggggtatttcttttcagttaaggaggagctttggtcgggttcatgtgatagcaatttttgtggtaaaatctaaccagaaatctttgtaggttcttcccttcctgggaaggtttttttttttcagttggcagtggtgggggattgttacattccattggctgctggctatgtggaggtctagttctgatagaaatttgaaagtcagacagaattataaagacagtaaaccactagaaagatgagtggtcaccaaaggtcacagagagctggaggggctggctagtggagcatcagtagtggaaaggcatgtcagttttatgcctatggtcacaggatattcagggaccatggggatgaggacaaattcaaatgtgtttgaaacaatgagtgacaagtctgttgtacctttaagtcaggaaacctggtgcagctgtgggggacctggtgcagggagcaatggccagagcaccttgaaatacactgcttctgggttttatgatggcctccttctcttttcctcgaatagcttgattgtgatacaattcacataccatacagttcacctattgaaagcaattcattgcctttgagtatattcacaaaattatgtaaccatcatcacaaccaattttagaatattttcatcaccccgtaaagaaactcctgtatccattatcagttaatcccatcttcctgcacgccttcacccccatcccaaacaaccaatcatctactcacttgtctctctaattagcctgttctttttctgacttctctccatccctgttgtttcatgtgtcagtacttccttctttttatggctgagtaatattccattgtttagatgtaacacatgtttatccatttctcaatgtatgagaatttgggttttttaccctttttgactgttacgtgtaatgctactgtgaagattgatgtacaagcttctgtttggacgtaggttttcgactcctctgggtacgtgcctagaaatggagttgctgggtcatgcagtaactccatgtttaaccttttgaggaactgcgagatggttttccaaagtggctgcaccatttctgttcccactggcaatatgtgattgtttcagttcctccatatccatgctaacacttgtcgctagctatctttttgattagttaggatgtgaagtggtatcgcattgtccttttggtttgaatttttctgttgattaatgatgttgatcgttttttcatgtgtttattggccatctgtatatcttctttggagaaatgtctattcaaatcctttgcccatttttaagttggattatctttttattattgaggtataagggttctttagctactctggatacaagtatctcatcagatagatgatttgcagtttttccccttttaggttaccttttcactttcctgatagtattacttgcagcaaaattattttgacaaaggccagtttatctatctttttcttttgtgcttttggtgtcatagctaatgagctctctttttaaagtagctgatcctgtgctttctttcctgggttctatttgagcagtttagattagggctatgcaaatggaaaacaggatggaaagaatggtggggaaatacttttattcataaatttccctttgtttctacattgtaaagctgctgagtaggtgggtacctgattttatgaatttctccacactggaggttgttactgctctacctcagagccgtgagtcatgggagtcagccacttctgccygccactgccctgttgatcaaggggtcatccccctgactygctggtggacaaaaacaagtaacaacgtggaaaagtctggtaaactgtaacccaatgcaaacaccctaaaaccttataagtttttaagagggaaatcaaaatgagtccgttggattctcaggggagatccaggaatgcctgtaagggtttacaggaacatgttcttttcttgccaggtgcttgatactaaaacacmcacacacacacacacacacacacacacacacacacacacttttttccccttcttgctgtgactgcttcacagtgctttgtgtgtctcataggccatatacttgaagacttcaaaggggagttcaaactggaattggcacagaaagaggaaatttcaaattaaatactgttacagtctacaaaatggaagcattaattgaaaaagggaatttaggatagtgcatcattttcctgctcttggagacatttcttggctgatctcatacttaagattttaaaaaaatcaacatgtacttaaaaaaaagaaaaaagcacttgtacacttcagatgtacttactattcattgaaaatttaaacttaagctaaatttaatatgtggcttcaaacataaagttgaccttaattttcacttttcatcttcaaaatataatagttgtgagagttacctatttctctaataatgaaaraagtaattttttttcagaaaataactggtctatgaaatcatgaagcatgttcctatcaatattgattcagaaattggtgatgttgtatagaaataaatacctttaaactaaaacagtactttaggcagcaaaaagaagggaatgcaagaatttattaaatattttgctgaaattagaatcaaacaatttgctaattatgcatttctgtacccgaatattttccatatggttaaaatcctagagagggcatatatagtcagcactccagtataatttactttgtatctggcaggggtgttgccatgtaattagttgaagtgtaaactggtccagtccaaggtttttattgtgggcttgcaagtattgtgacatttacattgcaaattcctagtgtcatggatgaataaggagaggagacgtggcctttggtgtagaagtgcaaatagtgaataagagactatgttattgtatttgcctctrttcctttgcatctcacatacatcccaattccttgaaacccagcccttagtgaagaaggcatagctgggtctccatctggccacatgcagcagactcccttttgtgcttgattttcagatcctttcagcatctggtgttgagggctcttcccttgaggggttctctttttcttctgtggcacctttctcttctccttaagttatctgtctcctttatgggctttctggctgcctgtgaagtgttgttttcccaaggttttacctctggtcctatcgtattcccactccacatctccccrtgtgccttccatttaatgtgtcggatggcctcattcatcttatacattagtgacttctcacaacaccagcttcatatggaatcatctggagaacttttttgttgttgtttttgtttgtttgttttgagacagagactcgctctgttgccaggctggagtgcagtggcgctatctcagcccactgcaacctctacctcccaggttcaagcaattctcctgcctcggcctcccaaatagctgggactacaggcgcacaccactatgcccaactaatttttgtatttttagtagagacaggatttcaccatgttggccaggatggtctcgatctcttgaccttgtgatctgcccacctcggcctcccaaagtgatgggattacaggcatgagccactgcacctggctgagaactttttraaaacatattttcctcaaaaagctaaatctggaaagtaccatatgacccagaaattgcactcttaggtaggtatacacccaaaagaattaaaaacaggcactcaaacaaatacttgtatgtgcatgtccataatgttcatagcagcayggcccacagtagcctcaaattggaaaacaacccacatatgaatccatacggtggaatattattgagccataaaaaaaaataaagtagtgacatgtgctacaatgtggatgcagcttgaaaacaggctgaatgaaagaagccagtcacaaaagaccacatattatatgattccattcctatcatatactcagaataggcaaatccacagagccaggaagcaggctagtggttgccagcggttgggaggaggaagaatggccagtgactgctcagtgggcatgggatttccttttgaggatgatgaagtgtttttgaacaggctacaggggataattgtacaacattgtgaccatactaaattccactcaattgaaaatggtcaattttatcttatgtgatttctacctcagtaaaatataaataaatgaataaaagaattcatccatttaaatgaaatgtttgttgaattaaaaaactgatatgtttgaatgaaagttcactcatttgaatgaaatgtttgttgattataaaaaatgaatcctttgagcagaagttttgttagtttaaatgaaatgtttgtggaaagaaaaayaaagagtctgattcccaggcccttcctcagagcaataaaatcagaactctagaaattctacaaactccccgtggcacctctcttctccttagttacctgttgattctaaacagcagtcagggttgagaagacaacttctgccatctgcttgtccagcgtggcccctcacttcagctccagtttctgtacatccaaccacatctaggacttttttttttttttttgaggcagtcttgctctgtcacctagtctggagtgcagtgccatgaacacaaacacagctcactgcagccttgacctcctgggttcaagcratcttcctgttcagtctcccaaatagctgggactagcatgccactatgcctggctaatttttaaaatttttttatagagatggaggcttgctatgttgcccaggctgctctcaaactcctggcctcaagttatcctcctgcttcctcctcccaaagtgctgagattacaggcatgagccacagtgccagggccttttgacagcattagcaagcatggttttatatctaggggacctttagagagattaaaccatataagcacattattaaattgaggtcagacattaaaatctcttaatttgtttatccttttcagtattgcatttagttttataaataaggaaataaaggcctcagaaaaattatatcatgttgtctgtggtctcagctaggagtggaagagatagcattttatgttctatctgaataatatcagggcctatgctcttaagtcacacagttggctgtgtcagctaattcattgtcacacgtttattactgataatacagttttgcacgaaagttttgcttttcacatatttttcaactgtcttatatgtttagacttattcaagaaatcaacataaagtcttgtaggatttgtcattctccaaaggggtgaaagttatgtggaaaatgtgtaaaccattttcaatatgttcaagaaagagttatctgttctttcttccccctttctcattttccctttttctttgaaggtctttatttttgtccaaatggagataaattctctagcacagactaccaggggagaggactttgacctcttgagaacactcagaaatctttaaagtgactgtctcgtcaggaaaagagtcatgaaagaatcatcagtgaccccctgtgaggacgttagtgatggccccatcagagtccccagcaaatacaggtgacatgggggccgctgggcactgcctcattagcagatgtgatttacggcttcacatctctgggcaagagatggagtggaaggaaaacaccgcggcagggatttccacgggatgtgcaaattaagggtttccaaaggcatcatttattttctctgatatgtttagacttctgtctttcaggatagattcaaagataaacatgtataagcctgctgtgatatcatagatttgaaaacaggagagagaaaaaggccgagtggacgcactgaatgtttaaaaagacttcttgggtttatttttctaactgtaagagtgatttatattttttgtaaaaaattagaaaatacagacaaacaagaagaaagaaaatggcattcacaatccccccaactagggattagcactgttgacaattggttgtgaagtcttgatctccttctgtgaaaacacttttcattggacgaagggttacaccttttacaatatgcaaagttaaaggttatacacagtttctatgtcaaatttgttttttaaaagcataatggtgttctgttatatgaaaacacagcaattaatttattcctaattgatggatagtcagkttaacaatgttttttacatgaatagttgcaaagacacttgatgatgtccataaaacaataatggattcaaggataagcaacatagaaacttgcaaaagggcttgtagccttagactcagaaagtaagatgaattggcttagagtcagagagagatgactagtagcttagtccctgctgggacaaacatattctcctctgtttagtaagcatagtatggattccaagccccagtttggggtttgttagcctcactaagaaaggggagcagtttagaggttattttgtgaaagtatgtatatgtatacatgtatatatatactgtccaacattttaacacactggcagtgtatcattcccaacgtcaggtcagtcttccagcctatcctaagcttatcactcacttagcctgcattaaaaaacctggtggacatctgtcttaactttagactacttaatgtagaaaagaactggctcttctgatttggttccttccccagcttagcttttttaccttaatgaggcatgatggataataggaaatcagaacgttatgcattttgtgtgtggtatccttcagcctgtgaactacacacagaattatgtcaaaacagagttcagatgcagtaattagaattgtaccaccaattgtgttttagttggcctccatattggtagggatccaattgtacacttgcacaaataaaacttttctttagtttcattcatgatgtgatttctcagcatcatgaacgwttagttataagccagcttcctactttgacatcctattccagagagcattattaacttgtcgaggctgtaagtctatccttgggctgtttgattgtggcttagtatatatttgcccatttgttgattgcatgcaattaaggtagaattcacttttagataggtttttttaaatttaactctaacatgaatgctattgtttgaatgattacagcaattttatttggttctaaatggcttcattgttattttattaaggatgagagcgctcagatgtaatagttcttcagcaccatcttggaaaaaaaatttctcaaagcccaaagcttaaacactgtttttccacccacagatcttaccataatttctctagaataaaactagactgatgcagattttgtagtatattaaaaatagctcacgtgaatcattgtagaggccagaatatgtagagacttgagtattaatctaaagtaggaaaaggaaaccatttctaaataattatktacagcttaggaaaaaaaacaagctttttgaaattaaagctaattttgatgatagcacatttagaaatggagggcaattctcatcttaaatacctattgcagcaaataatttatatgaattactctataagatcaatttctaactgttagggatttctgacgttttgattcccctctaactaaaagttatatatcatcactatctgggtgttactatttcaggtgagaaattttttaaaaagtagcgtatcaactttgtttcttatgtcctggactaataaaacaatttggtggggagcaatatagtacatgtgataaaaatgtggacaaatatttagtataagattgaaaatacaggaagctcttctgcttgtcagctatgagcaactgagtgaatagacgtggataacatgttgagaatacttgccaaggggcatttaataatgaggattgatctataataatatgctgtgtaattgggaacacatctctttggagtttttttggcttataaaattattaccatatcattttgcttatatagtagacctacttttcctaatggttctgaaacctgatttacatggcacaagttcccctccactgagtaccttcacactagtgtttgtttgcagaagctcagatgcaaactgaacagtgggagtaatgaagccctttcctcttttggcagtagtctaagaaytatggtaatagggtctgtgtgatctcccatccatccgctctgcagctttcaacacatggggacccttgtgagacaccagaagasctcacagacacatgacttttcaagacttttcctgtgtttctttttttcctttcccctttttcatgaatgattacttcatcagtgcatgtcatttttgacaatactgcttgccaaatgaaacagggtgatacgaggtcacactgtggcctaaaattctgaagtagaagctcataatatttggcatctttcctactagaaaaacaaaccagaaaagaaaatcaagaacagagcttaattaaacatgtggaatatgtcatgaatatttatgtccccaagtcttgccttgtgatggtatttgtacttaaagtgctttttctcctctttcctgtgaaataattcagaatgtgtttcattaatacaagaatgtgtcatgttaactttcatcaggaaaaaatttcacttctgacaacactgacacctttctgattgaaagtatgcaaaatagctcttacgttaattggtcccaaagaaaattatgttatccattttcctgtctatacatctgrcactttccctcatctgtcacctcctgaattatcaatgctttcccttgcctgattttgacagccagtattctgcctatgactttaaaaaccataaaaaaaaaactccatcctgggagctttactgtcctccagtttgaataggaagccccaagattacartcagcaaggtgtagccacatctactactatgccacatctagactgcagtttctctattttaagcctctcccattgtttcttactcgttgaactttagagaggaaacaaatgacaaagaggaatgtttatacttttttaatatttagtcttatttagggtcacaagtaaattttgtcagcaggagctaggtcagactgacagagctaactaaagttgccaaattttgggagcctgtgcttggtttgagttttatgattggtgatgtctgcgccttatgaccattgtcatctgcagagctttgctgggtcagcagagtctgagagggtctgttgaatgatttggtttctgttgtttcttgttaaccagttaactgagctctgtgagagtcccagggctgaattgtcgccrgtggtttagtttctgacaggcctgtaagtgagagaggcagacagacagagagacagacagacaccccctccccaaccgtcccatcaaattcttgacacctggrtcatctgagcaaaacagagcatgcatttttttctcttactaagcaagtattcatagtggcgtcctttcaccacttggacacaccaatcattaaagaccaaagtaaatacaccaagttgaagataatcctttcacaaatatacaagtgccaagttaaaactgcctgtcaatcatttgtgcatttttccttactcttgtctgttttaatggatgggtgtggtatgaagatattagagcttgagaaattaggattcctgtgttatcacaattattttgcctctttacagatgattgaaccttaagttcttaatttctctatataaaatcatgatgaatagatactgagttttttttctgaaacagaataacaatagtagggaatatatgtttctatgtagatacatgaacacatgactatacatttaagctcaatgttttcaaacgatgatgcttcacattgagaaatgaattttgaattatcaaatatgggaacaagtttaacaataatatagaagcagattaagtctttttttaagggaaaaaagtaaatgttgaatgatattagtttaatgacacttagatctgaatttataatcccgtgtacctataactgtagtattagcctatgccaatataaacctagttataatacttaaaaataatgaataatgaatgcaattaagggctgataccaacatttcttgaagttttgaaataattataattagagatgttaaagaaataaagtaggatctttctgtggtcatatttgtgtttcctttatttgaaatctgctgccaagagtcttcaggataactcatcgctgggtgtcttgcatttctacatttctacttcagaatgtctcaagctcaagatttctttggtttagtttcacatgtgtttagataatgttgtggagaaggaggagacttttattttttttaatttttaattttaaagtatggatacgtactaattgtacatatttatgggataaatgtgatgttttgatacaggcatacaatatgtaatgatcagatcagggtaattggggygttatcacctcaagcatttatcttttcttgagtgttaggaacattccaactccgctgttttaattattttgaaatatacaataaattattgttaactataggtgtcctgttgtgctactgagcatcagatcttattccttttatcttactgtatgtttgtacccgttagccaacccctctgtatctcccatcctcaccactgttcccagcctctggtacccagcattctacttaggagaggacttttagacatcttataggtctccgtaagatctattttgtatttgatcctaatatttttttgaaacaggcttttattagtgtggttgaacaggtaaccacactgcttgtcaggccagctcccaggactggccaggctgttcactgtgacccaacttgagggagtacctactgtttaaggttgttgggtgaacacaaatggcacaacctttgcctgcctagagggctcaatctggtgggaaggccagtctggttatgacaaatggtaacacagtcacagcatgaggtgctatgaaagctgaatcttgggagatgacacagcctagtaaactccaagggatgagtgtgtggtgggaaatcctaatgccatcaagaggctagcactcaagctatcgtgatgtccagaccctctgcaaacactaacatctactactcctgagaatcctgaaaatgaagaggaaagttattgctcttattttataggttagcgaactgaggcatagactaacaaagatatatcctgaggtcctctaggtattttttttgttttctgagtcagagtctcactctgtcgcccaggctggaatgctgtggtgcgaactcagctcactgcaacctccgcctcccaggtcaagtaattctcctgcctcagcctccgtagtagctgggattacagggggcgtgccaccacacccagctaatttttgtatttttagtacagacagggtttcactatgttgacgaggctggtcacgaactcctgacctcaagacaccagccctcctcggcctcccagagtgctgggattacaggcgtgagctaccgcgcctggccagtcctgtaggtattaatgaacagtttcaggatttgaactctggagtccatgctgagagactattctaaagataatggtatggaattaaagtattttgagcagagtagcagagctagatcacaggctgggcatggtgactcatttctgtaatcccagcattttgggaggctgaggcgaaaaggttgtgtgaggccaggaattctaaaccagcctgggcaacacagtgagaccacatctctatatttaaaaaaaaaaawttttttttaaagcaaacagagccttaggagaaggcaacactatggaggtcaagttagagttcatatgcaaggtagaggcccgtgtaatacttcaatttagcacatgttagacttccactagggtcacaagtctctggcacatagtaggtgttagaaagaaaagttggactgaatttccagattctctggaatggactatgatccagatttayagtcatttaagagttagaatctgtaatwcttagtgactgactgaatgtacttggggatggtgagatggggtagagatgaagcactgctgtaagagagctcatgtcagagggggtcctggaggaggagttcatttccagcattgtgagatgtttagaattaccaccagctgctgggtgttcacttctggtgcaggtaggattctgccaagcccatattctcccagttacaggctatcaatctatctgaagctagaaaaaaaatgcctccttatttatttattttgtatctagcatttacagaatgcccatttctggttagtcaccatagtgtacagggctataggatgaaaaggagagagaaaccatgagtcaaggatacagtctcactcctgtatcaagttactttgcttcaaccagatgtatttattagactgctctttgacttttggcttaatgggtcaggggtgtccacagagttccccattagaaaggaattcttctacctatctctcagtctgcacagtaccatgagggtcttcatcttccaggtgtggaggtggcttatgtcagttagtgctgctgcccactagmaaccctggagcctggaagatgagscttgtaggaaatacctctttctaggtgcacactcaggactacgagaaatgttgaggaaggtgaaggattctcccataactcagtcctcctgggcaggtgactggcggggccagactttgagcatccttgctgaataataagcctgtttggtatgaaatccatgtgctactgatagcagggtaatcctgtggatttgctgaaaccataagggactagatgatacataaaaaggatatcagtgattccacgagtgtgtaacacgagacaaaagacataataaaagccaacctaatactaagcttagatttccatactgctcaggctatgtattaaaaattcttactgtagaatttttartcaactggagttttctagtaaactgaattggtgtatgttaaaagggtcggaaagtcgggtagggatgatgggtggggagaattgcttgagtaagagatagtagccttaagaatatttccttgcaaaatatacctgggtattcttcatgtttaaaactatgtgattccagcaaagataagttatttcatttgataaaagcaaaagtaagaattatcctcatggaactaaaaccctgttatatttagtttactataccatgtcttccattaaaactatcctgagattaacttgatttatcttgtctcagtttaagtttagcaatttaatccctaaaaatgtagatagtgctcattgtatagaattctcccctttcccaaaatgatgtacgcttctcttttactaaattctcaactttgttagcccactccatatttcagtcttgctgtaagttttagaaagcagaaatcgcatcttctatttctaacttgaaaggcattttttacaactctgtgtaacaaatgtcatcgttcccactacgtctgtttttttctgatagggctaagaggcaagttttattgatttagaatttttcaccagtttatatgcattatgctcttcaaacttgcttttatgtgtgcatgaaaggatattgatttagaacaaatttatattagcccacttttcaaaaccctgcagccaatcagcattatttttggtgctacagctttcatgtagacgttctgcaggaaaaaaccagaaagctctcattgccttgtaccgagattctcagtcaggagtctagaaaagtctttcttgaatctagtagttagtgattcataagtttttgttgtttataacttagtacttttttctgaggcgattctagtcaattcacaagtctcctaaggattatttcaaatgcaggtcacttcgtgttcttgmgatgactttgaaatccatctgtgtgtgtgctgaatgaatattgagcatatgtgtcgcaaatatgtttcctgacaaacaacgtgccatgttctgggtcctggggagckagcagctccccagggtagctagcagctaccgtggtggacaagatcagcacagcccagcacaacccctgcctctgtgagactcagggcctgggagaagagctggccagtaaaaattacgtagactgtacagttatgaattagatgcttggtctcttgtatttcagcaattagatgcctttgatcttaggtacgttgaattcttaaatttattagcttctctaatgctgtaggctgatatagatttctgtggctatccttaactatcagctttgattaacccagagtttggtgttcaaaaagaagctgtatccctctgctaaaagaaagaaaggaaggaaggaaggaaggaaggagggagggaaggaagaaaggaagaaaaccttctggtgacctctcagaattaaatttaaaaacctagtgggatgctgcttctcccttgctttctgtgtcccrgccacattggactcctttctgttcctttggctctcaaagcaggctttgccccaggactataacaggattttgccccactgacacatggcaaactcacctgattcaggtctttgctcaaatgtcaccctctcagctcaaggcagggtaccttgagtactctggctctgttagtgccactttccatagctttattttgcttgatagcatttaccactacctgacatactattatacttttgcctaattattgataatctgtctccacccaacagaatgtttgtttcattagagcagagattgtgtctccttagccttctcttccatcctcagcactggaaatgacacgagacacgtaatgaacactcaataaatattggtgaatgaatgaatgatgtgataggctaaccaaaccttcactttcttggaggcagcctactcccttctcatgacagttgctgaagttatgctgagaacagtggtgattgtaactatggaaaatgtttagggtgtcagggtcaacttttttctcctttggttatttgtccaatgcagggcacctgcttagctacttttatctccatgttcttggctatctacttgtaggaaatagatacccatgtaagagaatgcaaaagtctcttggaggaaccaaggagccttatgtatccaagttagcatgtactgagtgcagggtgctcttaagatctctgcttggacactagaaatagaaaaaaatatgtatgaagaagtttggataaatgcttcatttgaaagttatataccttagtatttgctttcccattctcatgccacttatgaagggtgaagttggcttcattgacagctaatactgttgaagtctattgtaaaatcagttcattaggttagtgtctattgagcaactactatgtgtatgtgttgtgttgggagtagtgcaagatgaggctggaggagaaaactgkggccgaatcacccaggtctgcaagtctcattggaacttggacttgctcctcagtgcaatgtgaaacctttgaaaaattttagcaaaggaatgatgtggtcagatttgtatttttaaaataacagctttattgaaatattagcataccatgtaattcacacatttgaagtatacaattcaatcaaattagtatactcatacagcagtataactatcactactacattccattttagaacatttcatcatccccaaaaagaaaccctgtaccaattagtcattcccaatgtctctccagttccccagcccaaggcaaccacttatttactttctgtctctatagatttacctgttctggacattgctttgcaactggcttttcccacttactrtaaagtcttcaaagggtcattcatgtcgtagcatttcaattctttttattgccaaaaaatatttcattgtatagatatatcacatgtagtttattcatcacttggcggatagttaggttgtttttacttcttggctactatgaattatacttctataaacattcatctacaartttttgtgtggacatatgttttcatttctcttgggtatatacctaggagtggaattgctggggtatatggtcactctatggttaaccttctaaaacagaactgccagactgtttttctaagtggctacaccactttacatttcatacattacaccccatacatttccactagcaatgtgtgagggtcccagttccaccacatccttgccaaaactttccttttttaagtcatagccatcctagtgggtataaagtggtatttcactgtggttttgatttgcatttccctgatgattaaagatgttgaacaacttttcatgtgtttgttagctacaaataaccagaatatcttccttgggaaatatctgttcaaatcctttgcccgtttttaaattgggttgcttgtcttttatcactgagttgtagcaattctttatatagtcttaatgtcagtatcttatcagatacatgatttgcaaaaaattttttctaattcattgggctgtcttttcacttgatggtattgtttgtagcacagaaattttaaattttgatgaagcccagtttatctacttttttttgttgttgcttatggggtcatatctaagaagccattgtctaatctgagatcatgaagatttactcctatgttttcccttacaagttttatagcttggctcttacctgtagtctttcatctccttttagttagtttttgtatatgttacaagataaaggtccagtttcatgcttttgcacatggatattcagtttttccagcaccatttgttraagagacagtcttttcctttttgagtggtcttggccagatgtatatttttaaaagatcactgtcagcagggtgtgaagggtttaaaggagkagcgatgagaatagaagtggggagatcaatttgaaaaatatttatgtagctcttattaygtgtaaaacattgttccaggcactggaactatgatcataaacaagtcagacatagccctggcctcatggagcttacattctggcactgaggatgagggatacaaacctaacaggaaagaggaaaaagaagcaaatgcagtgatgacaagttgtgagagaagaaacagtgatgtgcagtgtataagttataggactactgaatatataaagcatgaattgcttatttagttttttcctttaatttcaaagggccaaacataccgactcagaggcaggttggctagagtggagttaggaaaatactctttctggaaagaaaggygactttaatcattgctgcctatacatgccactatcaccagtgagtcttcacttaatgtgcatatccacctgctggcagcattgccagagtgactgtctgaaagaatggccgcttgttcattcgttcattcattcatcagattatggtagcatggattacagaggtgaagagaaatgaagagatttgagggtggtctagatgtaaaattgggaggatttgtagtcacatatgaaaggtaatagtaaggaagaaggagctattgagaatgggatcagggatttgggattttggtagttatgatagccattgagtgctgagaatgggttaggctctctattgagctctgtccaggcattattccatatgatcctgaaaaaactaaaaaaaaaaaaaaaaaacaccaaggtaggcactaccactaccagcagcagcagacaaaaccaaagcttaggggaggtcaagtcacttaccctagatcacaaaactatgaaactgggtaagtggtggtgccatgtgctactttaatgtacttcttttactttgttgagctcttcttttcaaaaagcatytaaagattgaatgaagaaatatacaacaattctaactaaatgtttaatgaagaaattttgaagggaaaaaatagaccaaaaccactttcttataatctcaccgacwgtgtataatgaatggctgtcctttggtggatatgtttccttttcgagagatcaaccctcatctgaatgcctccctcagtatagctgctgctggtcttgtagtatgtgcttggttgtgcagttcctgtggtctggcatgtacctaatgcacacagattggattgaagattgaagttaacctcgcttatcgatggcattttaatttccttcctcttactacattatgtgttttttatgatagtgctttaaagtccaggcttataaggaaaaggaaacmatctcctatgcaagtccccagggtttcagtgaagcagatggcaggaagggtctgggcatggtgtgtgttgcctgtttcaaaattatgtcccatgcaccccagcatttattcccttgatgttggcactgggcaggtgatcagattttaatttgtgtggcgtggtggccttttagagtaggataataacattgggaaaattaggttaagatcaatttgtcatttattttgtcgtaataaaatagagtaaatctttcaaaacagatttacgtaagttccttgaattggaggaagcctcaaatctaaaacttcattaagcaacatcttaatatcacagagactcggggtcagaaaaaatttaaatgacatataaattagtagagtttttcgtttgctattcattttttttcccgttttattgccctggtattctgagtctcttggttcattcttacgtgtgtatcattttggtttgggttatgagtgctcactggcatactggtatacaacactgagagccagtaggctgttattttgctgccattctattgtgtctagagaagtatccagggagagggttgtttgtttttacttgatgaggtgcagaagttgggactgtactgaaaaacagaatgctaaagagccagctccaatctaggaaacatcctccaagagcaccccctgagacagagtgtgaatcacagaaaggaaattagatttttttagccccaaataagaaagattaaaacaccagtaaattgttttacattgattttactaaggttagttagaagtaaaggcttacaaacacgtactgtttatttagtgayagatgaaacttagaggcgtttcttctgttgtaattggttggctctttgcattgattagaactaggtagacaagttggtacaaaaatggcaggagtggaagggaatgggcccctgttgatgtgtaagaacatacgcgtgcatgtggggacaccagtggcrttttctgcatgtttcrgggtttcagaagacttgccttgttctgcacctctaaattagacctactgtgaaaaacttacaggtcagtttctgggagtgcttttcttcctggactttcccaggtgagcacttagatcctgtgaatccatctccgtgtcggaaacttccgtgatccggctctatgctttaattttgaatgtcttgctatttcatttctttgaaaataaagcagttccacaacattacagccctgtgctgtctactcattctcctttgggrattgcttgttttaattgattgattcacagaggagaaagaaaaacaatttgttgctttggcaagattggtttttctaaggatgctactgtcttgctgggtctatgtggcagttagtaagagaagctggcttagcagttctgaggctgacatgaacattgcttcttaaattgaaaggttgggtgggtggatgggtggatgggtggatgggtggatgggtggatggatggatggatggatggatggatgatggagatagataagatagatagatacttgcagcaagcattcccagaacatttgttactcacctcactaaaattaagctgttgttattttgagatgagatggcagataaggtagattcaatcatttaacatccattccaatctcccgtctgtgtcttttcctgtcctgctgatactagaaagctgaaaaatcatcccctggcagcaagggttctgaaaatgactagcctgtcagartcacttatgtaagacttgaacacagagcagaattaaktgggtagagggatggtgtggtccagacatcagcttgctggcctgactggcaggcgagctgtgcccagagctggcatcgctgtggggcccccatggtggcccctgtagcccatgcttggaggcaatgtaaggatggggctctggtggggcctctggtggctcctgtgtcctgtgcttggagacagtggtatgaggacaggtttcctcatgtagcatcccctctgtgctggtgtctgggtcttgggggtcatcctggaggcacagctcagaggctattcttcaagtctctctcctgrttttataagctccgaattcttgtataaagttaccttctagttaaaatacccagcatgatttctgttatctgcacatgacctccgataaatgtatactttttcttttttttttttttttttgagaaggaatctcactctgtcgcccaggctggactgcagtggtgcaatctcggctcactgcaagctccacctcccaggttcatgccattctcctgcctcagcctgtagctgggactacaggtgcccaccaccatgccaggctaattttttatatttttagtagagacggggtttcaccgtgttcaccaggatggtctcaatctcctgaccttgtgatccgcctgcctcggcctcccaaagtgctgggattacaggcatgagccacygcgcctggccacatgacctctgataaatgtatacttctatgggacaaattttcagagttggcaaagaaaataggttcatctttatggaccttgggatctccgtgtgaaactctcaccttccctcaggtcgtccactcatctcacacgtggcctcttcccttacacaggaaggcaactctgggacgtttgctgatgatggctcatcgtgcccacccctcaggtgtgaaacctcagaaccatgtgcatttctcctcatcctcgtcccctttaaccattctccagttcttacttcctgatgcttgcttcttttgagtctaacttttcattcagccttcagcaatccctgtgctacgacagcctctgctaagaacttcatgcaacttgtcttattatagcctcataaaaaccctgtgggaggaaggttagatgccatgtcccaaggctgaacgtagtgctggactgggcagagaggcctcagctctgactggtctgagctgtgggagctttagctttttttttttttttttttcctgacacagagtcttactctgtcatccaggctggagtgcagtgatgcaatctgtacctcgaactcctaggctcaagtgatcctcccacctcagcctcccgaatagctgtggctacaggctcatgccaccacaaatggctcattattattattattattatttggtagggataagggtcttgctgtgtttctcaggttggtctcaaactcctgacttcaagtgagcttttttttttttcaataacagttttgttgagttacagtccatatactaaataactcagccacttagatgtacagttcagtggtttttaatatagtcacagatatgaacagccatcatcacactaaattaaggaacattttcatcacctctaggagaaagcttgtgtttgtctgtttttgctwtggttgcctgactctgaggtcttactcaaaaatctttgcccagaccagtgtcctgaagcatttccccaatgttttcttccagcagtttcacagtttcaggtttaacatttacatctttaatccattttgacttgaatgctgagagataggcccgagtatgtacagctgttatgtatcaggtttttaaaacaggtaacctggtacacttgaacagccctagccccctgccctaagcagccacttacctacttcccatttctatagatttgcttgtccttcccatttcttgtaaatggaatcatacatcatgcagtcttgcatgtgtctgtcttcttccacttacgacagtgttttcaaggttcatccacatccatgtatgtgtgcttcattctgttgtatgattgaataatattccattgtatggatataccacattttgtttatcyattcatcagttgatggacatttaggctatttccaccttttattgtctatgataaataatgctgctatgaacacgcatgtacaagtttttgcaaggatatgtgttttcattttttcctgggtatatgcccaggagtgaaatcactggctgaatggtaactgtatgtttaacctcttgargaaccatgaaactgttttccccagtggctgccttattttacactctcaccagcagtgtggaaaggttctaattcctctacatccttgccaatgctggtatgtgactttttgatattatgtgatgtcatgtgacttctcgcttatagccatcctagtgggtatgcagtggtatctcagtgtgggagccgtggctctgaaccccattgcagtaataccctctgctccttagtagcctcctcagttcaatttccccttcttccttgatggcagtagctgatcccttttgtttccagggccttcatcaatagattgctacctaagagggttactaaagtactgtttggtcccaagacttccttgaacaaggccatcaggaagttccccattccctatagggtgctgcctgcattttgctggggttacaggtaccccattattggcctcagccttgcattctgcttttctctcaggcagactttctgaccaatgagactggtatatgttttgcatcctgtacatgctatgtattttgacacttctctttcttgatcccctttctacccatatcatccagaagggactttggtgctgctacagaatttattattagtaacacacacttggcactaattcattgctgtatgttagttgtctattttgacttttgtctgtgtgtaccaaaaatgcatataacttataaaagccacaataaaataagtatttttttctaattccctggctaagacactcagtcttttcaagatccctgtgtacctaagatcatatcctcctttctatcccacaaaggtaactaattttattaattttatcattcacttgtgtttcttcatagtttctataatgaatcaaattgcttatttgctccataatcaagtayatgaaatttgaatggaattgtagtctattattttctgcattatgrgttattttgttcaaggttacttgagtttactccgtgttaattcctgtaggtggagtgtattcattctcactgctacataaagttccattgtatgaattttacctcaacttactttattattctcctggtgatagacatttggcttcttgccagatttcaagtgttacatatgatgtggctacaaaaatagtaaatgtcttgggcaaatttgtttttggacataatacttgggagtagaattgcttagtagtggggagtgggcatttttaacttcactaaataatgcaaacttatattcttaagtgaattaccaggagtttataaaaatttccttagatctacattcttgccaagacttgtattttcaatttattttaatctttaccagcctcgtgaatattaaatgctatctcctttctctaactttatacttttcttcttgttaaggagatgacattccttatctttagcaatgtgtttttgccttagaggctcttatttgatattcagttggctacagtgagtttcttgtagttagaatttgcctggcagatcttttacmtccttttacttttggcttttctgtattgattttaaacatcatctagccagattttgtttgttttctgtttttaactgcattgaagctggataattcagttcatttgcacagaggctgtagcgattgttagctgttgtttggggtaggtgaaaaatgggagagaggagtttgcttgcagccattgttctgggcagcattccagtccaagatggcgccaggatttctcaccctctggggcactccctccacgtaacccccgagactgcagctggaatgagttttacttccatgacgagctgactttaggaaagggagattatctgagcaggcctgacctatcacatgagccgtttaaatctgggtggagagaacagagataggggaagccagggagatttcaaataggagtaggatttgatggaccgtggctggtttgaagatggaggagaatgcgtggccaggaagtaggtaacctctaggtgctgggagtggcccccaaatggcatccagcatgaaaatgggkccctcagtcctacagctctaaggaactgaattctgtcacagccatgtgagtttggaagaggatcttgagctccagatgagaacacagcctggctgataccttgattttacacttgggagaccctgagaagaaaaccagttataatttgtcatgcagcaatagaaaactaatgcattcatgtggcatctgggagggctctgtgcccatgatcaggaacttccagaaggtaattgggcataaatacccagcactccagagaaagattcagcctggggatggattcaccatcactgtcactaacaagcggtagaaatgggatgtgtgggtgaggtcagtcagagagagtgaacaggcagggagaggctgaacagggaagcctggacaacatttcccaatgttgaattgtgaatgatggcctgagggcctgaaaattgatagctcaaggcactgtgagttataaaaactgtaagttttatctccttgatgagttataactcccttatgagctgagagcccattatatactgactgttttcaaaaatacccagtggcctcatctcatattatttctccattttaaaaattcacattgacttctttgggctccacagcacrtgcaggctgctgtctagtccttgggtcatttcctgggagtaaggaagagaaataaatcccttccagtaggaatatcttatggtaggcatggaaaagtagaagaaaatgaggtatctgtttttatgatgtcctaggcccattgaccacatcttgggcccacaaagggtgtagacaattgagtgagaacaatcagtataaagtctagattaattttatcctataccagttcaggaaaccattgcctcttccggttcctaggtgtcttcaataaaaaagagttatcagagtaaacaagtgattgaaatactatgtgtcagaccttctgctaggacctgtagagtaaatgtcaccctagataggcagatttcctgtcctcccagagtctrtcatctatcaggaagtgtagcctttaaacaagcrctctgaagaagctgtgataaatgctgggttctccattattgtcatctctgaaggccattggtaacctggaggaatattctcccactaacaggagaaagcacaggatcaaaaagaaaaacttcccttcattcttccagtttctcttaatcattttgccttttacttcctgtcctctgtgagcacgtgtctgtactgttaagtacaaatggacccagaggtttcaggcaaagcctgagtgaggcgctgcatgcctgtcttgcaggtcagggctaggaatggtgacagggctaggaattgaccattgctccattaaagtggaccaaagtggaatctgagtccttttcaggccctaggttcagtctgtgctgactctgamcctctgagatgactattcccaaacctgagggaccgaagatcagcatcaaggacaacagayaggggtgctggggtgcagatgtaagtgagctgggtcttctggagcgctggtcactgcatgctgtgggtataaaatggctgtctagtggaggcagccaggctgctgggaatgactccaggtagaccagacacatgattcttctgtgccttcaacccgatgctttcragtggcgtgccttagctgtggacattctgaccctgccttgttgaatgctttttgtatttttgctcagagagagaaatcagagtgatttcttttttgtcttatagatcaatcttgtagcttttaaggcagctctccataaggaccacaaaagatcagtctgatagctagatgtcacatgctgtggcagaaacactcctaccagcatacactcattctgtactaggaactatagtaggagttttatttgtgttatttatttcattcacatggcaacaccattttcctggtaagatgactgaagctcagaaaggataggtaactcaaataccattgctaaatatgtttacctttagtatgtagatagacacgcattcagaagaaaacgaaggtgaaatattttggacccgtttgtttcgaatgcatcagtggtgtttattatttaaagaaattctttaaagagaatgattttgtaaagaggataattttctaatttgtgtcaagcaggttgtaatgttttgtacaagtacctgaactagggtacccttgctgagaaggtagtaaagtgtggctatagctacatgtaaatgtaactcaatgtgtcaggtgtccctgtaactaaaggcgcaaaagtstgaaaagaatggcaagtgaagggcacctggacggtgggcatgttcgtttcctgttgccactgcaacagattaccacaaaggtagtggcttaaaacaacagtaagttattctcttaggttctgtgggctctggggagaatgtgtccttgccttttcagctcctagtagatgctggattctgatggctttttaaaaatgataaattcctcggcttgtggccccttctctcattttcaaaatgtatcccttcattctctgcttctgttgtcacattgctttctccaatcctgcagtgaaatctctctctctctgtggacacttggaattccatttagcgcccacccaatctcagatcatctccccacttcaagatcctttactatacctgcacatttcctttttgccacctaaagtaacatttataggtttcagggattagggtgtggacatctttgggggctgttattcagcctactacagttgccttgaaaggatataggaattatcaattccagggagtccttttcatagcaagagtgctagatttttgagggtctggaggtaaaagaccctgcaatagggcaggaatgctgggaggaaggctccatggggaaaagagaaccaccccaaggagaaggaggtgcagtggacagatacatacatgtgtacatttcagcctcatttttcgttgtcttgattttccgtgtagtacctggtgtctttaatatcatatccccgtccttctccatcaggggtacatgcatgcacgtgatgtagagctggggtaagcaagccgcagagcaaacctggcacatctcagggtgtgttttttctcagatctcagaaaatagcatttatatgtaaattaacctaactatggtgtgatggagaaaccatgaaaygataaataatcaagcttaacctttatgtgacaaactttggtagtcttggaaatatttttgaatatattggaacattacagaaagaagtttagagagttttttggggttgtttggtttcacaaaacattaggtaccacaaaatgctgtggccaaccaggaaagtgattttggcaacgttactatttgtgttctcttttgtcaacgccaagggagccgccccatgycagagctgtatttgcattactgaaaagcaaatatctcaggcctttggacaacacgatacactctcacatgccctggagactctgcgtgtgagatgattggaaatgctcatggctaaagtcagccattatccggaataaactttcccagagggagtttttcagaaacacaccagggaccagtaataaaacataaactataaaatgtcctctagcaaccaaaacacatgggatgtttttctatataatatttcacattaaacgtaattgtagattaacttttatagagaaaatattttttcaagccagatatgcttaaatcctttcatttcctcaagtatgacaaagcactgggaatatactcccctttgtaatttcctaccgatttgccctagttatgaatggaacattaactctgcgaaatctacatatggaaaacgaccccagatgaaaatcttaaactggccatatccctaactctggagtccaagccctgtgctctggtcctggcactgtggctcaccaggtagtcacgtgaccctactcacctgtgcaaatgcccccacgcttctcagwtcccaagctcaagggggcgttgargatcaggtcacccacaagttcccttcctgccctcagcttgcacgtggctcatctgtcaaggaaccacatactgtgtcagattttgttaaagcaaaaaccggtttttatagtctttataaaatgtaaaaacttggaataaatgtaacaatatctaaattcctggtgtgaatgaacagcagctgtagtgacaaagggaacaggtcttgaagtgaaacctgcctggcttggaattctgcctctgccacttaccagctttagtccttgttgaagaaattagctggaatcaggasttttctcatgggtgaagtgaggatacctcatggagaagtctatgcaaaagtaaggttctcagcacaatacccggctaataatattacctgcttagagagtgggggtaacagcaggtgcaatgtcatgtctgctgttttagctacaccaagctccatccacatcttgagttgatgccgtgaataaaggtcatattacttttcagtattactggggatatttgatccatgtgatgggcagataaaatgtctctgtcttagagaaaaaatggactttttaggtagccagcattgcartgtactattgttagcagacatttgagatggcttctaaaaaccgtgcaagtgaaacaccccaggttttgagaaggggggagcaccgtgtcccaggtcacagggctgtctgtgaacagaattcacctgtatcccctatctcattctgttttacccctgcagacttttgattagacatcttcattgcatcctgagtgacgggaaaatttgtaattagcaaatgcatctgcatatagaagtgtgtgcccgaaactgctgtgcttttagttctcatatgcgtgctccttggaaagtgactgttagtaacattaactctgaaaaccctgtttttcagattgcaaacgtaacttctttccaggtcctattaaatggagattttcctcttgcattcttaaaaactcagagctaaccttggagtggtgtctctttctctccacctctctctccctttctccttctctccttcctcctccactgtttttttcccaccctccccctctctcctttcttgtgcaagatttcagtcagtttactgaattgcctttacatggctatgaccttgaattgcttctgttagttcccctgtgctcttccacattttttcattttaggactacaggctaagcatacttagttattaccttgtaatacacaatcaagataacctggccttggtttctgtgactgtatctcagcctccctgtcctctgtctcgcagagaactagggaaggatggaaagtgactaaaggtatggaatgcctgaggcatggccaggccaggtactgtggcacataytttcgtatgttgtctcatttaaccctgattcataccttttaggacaggtcatgatattcccatttaactgcgctttaaagaagttgaatgtccactgggtcacacttggagggtttaagatctggatttgggtctgagtccaaccacgatgtcatttatatggactgtgtcgcgacacgtgtgtctttttcctggtttggtgttgttattcccctggcaaggtgtgcatgaagtcggtcctgccctacacctgttggcttgttttgtttgacttgtgtttacactcctttttaagatgactttgttaaactgaaaaaaaaaagctgaaatgttgatcaggtagcagatttgcaggagacctaggtactcatcactctagcacttcctaaactgtagttaaagaaacattgttcrggatgctaagkgtaacgtgggggaaaaaaatagctctctgtgcaaataaatttgtataattgttaaatgtgattgctttccctctgagtctttaatctgataatgtgcattctgccagaagggaatgtagtatactgcacctccccagcttgtttttgttcacatctaacttaatttattagaaagcagcctggcgcagttgtgcatgcctgtaatcccaggactttggaggccgaggtgggcagattgcttgaacccaggagtttgagaccagcgtgaacaatatggtgtaaccccatctctacaaaaaatacaaaaaattaaccrggcatggtgccgtgtgcctgtggttccagctactctggaggctcagttgggaggattgcctgaactcaggtggttgaggctgcaagtgagccgtgatcatgccactgcactcccgcctgagtgacagagtgagaccctgtctcaacaacaacaacaacaaaattattagaaagcaaaagtctctttaagacaggtatgtcttcaactctatcaagttggcttttgttttgaagaacaaaagggaatcatggcttggcagtttcagctatgtgtggggactacyttctattacactggtcctgcttttacctctggtgtctaaaatgtaataaatatgtgaactagagctcatagggtagcttcaactctgcttagagtttatagcttcaagtggcatgatatctgtcacactcacaagtagtatccattgctgatttctctttgtggttgagcttctttattttattctatattcttactttataatttttcatgtataatagaccaaatgtgattgccataaagaaggccaaatgtagaatccatgcccagtttgcttattctggaaaagcttactatgtaagctgggatttgaggagttcttagatttttattattgtttgattttttttaaggaaggaataggccaggcatgagtggctcacacctgtaatcctagcactttgggaggccaagacaggagaattacttgagaccaggagttggagaccagcctgggaaacaaagtgagacctgtctctacaaaaactcaaaaaattagccaggttggcggcacatacctgtggtcccagccgcacgagagactgagacaggaggatcacttgaacctgggttgttgaagctgtagtgagccatgttcctcccactacactccagccargtcgcaaaaaagaaggagaggggargaaaagaaaagaaaggagaaagaaagagagagagagggaaagggaaaagaaaagagagagagagagagaaataaaagaaagaaagagaaagaaggaaggaaagaaagaaaagaccggaaggagagagaaagagagaaagagaaagaagaaagaaggaaagagagagagaggaaggaaggaaggaaggaagcgggaggaagaaaaagaaagaaagagagagagaaagaaagaaaagaccggaaggagagagaaagagagaaagggaaagaagaaagaaggaaagagagagaggaaggaaggaagagggaggaagaaaaaggaagaaagagaaagaaagagagaggtgggaataaagataagggttaaagccataacaattaaaatattgatcaattgaactctcgtgcctgctattttttcaattctcttcccaaacacttttggccaaagaatgctttttatttggggtaaatgttgtccagccttaaattttcatttttctgggtaagggtactaaatcctagagtgctgatatacgatatttaggcctcaccccattggtaagtggaatgtgcctgttgatgtaatcaaattcacagaatgtggaatataacaccctcttggttaaaaaaataagcagagggatttctggcagaatccaactaacactcgcagaaatgaagcacatgaggtgacgaatacaaatgggtcacttagaactaggaaaatccattgtaacagggcacagaacttgttctttttaagcaagagtcttgctaacatccacatttatttcattcatattgaaggtcttcgaaagcttaagctctgaaaatggaagtggttgatttgaagatgataaatggaaactgggaaattagactgcttccataggtgggcagtgtgtcctctttttcaggactccggggtccctgaattgtgagttttccctcacagcctctccacattctctgtgctgttcacctcccacccactgctctgtcttccctgtgttagtgaaaaatcaagcttttccctccctagcccagagagctgagcttttccctgctttactactgtgtttaggaaaaggaggcagctttttcctaaaaagcagtgtttggaagttggaggcacgtatgatgctttctgggctgttatctccaatatccttgctagatgagcagcctcgcatgttgggaaagaatctgtaccagaattyggaatatggggcttgtggccacgtagcaatgaggtcactgaccagctacaatccctggagcaaaccattcacactgcagtcctctgtttcctgctggtgatattcgaggtagtggccatgtgagctccaagctatgatttgttgttgttctgaaattctatgtattatttaaattataatacctcagataaataaatgaaacatctcctgaatttattcttaatatgtaattcatggccaagaatattaactgatgaagtgaatcatttaaagaaggactttgtaatttttctgtgggattgtatttcaccagaagtgcttcagttccgttgagtcctgtgtgatgtacttcagcttgtctgtgagctgagctggtctaacacgctaagtgataacagaatggattctgtgttttatgagtcagtcagccagatctcaaagggataacaattaggaaaaatatatataatttwtcccagtaaaagaactagcctattgctgaaaaaaagttgtaccctgtattattgctttttttttgtcccacaggtgtgaataaacctggaaagcataaacatttggaagttattgaaatttattgaaaatatagtacaaaactcccacccttcctttgtttccacccaaaatgtagaattattatagttggctgcagtttttcttatatctcagtggtgtaattttcccacaagtaagaaaactgaatgggtagtatctaagaataagaagctattaaatagcaattttacatgcctttatgatgaaatactacagaagatgggaactgtgtgtcgtgaagtcatggaagtcttcaatgactaataaggaaataatctggctgacagcaggtgttctgattaacagagaagttatttcatagcataataaagaatggcatgaagaattatattgtcaaaaaaacctagccagatttttttgagcaaagaggggtatttccaccccygactgcccactgtaagaataagagacgcttattgtaggattggraaacagtgaaggaaatagaaaccgctaatggtatcactctcctaaggggactactgttatttcctcttaggcactttgtgttcgcatatacatacacaggcatgcccatacctgtgtgtgcatgcgtgcttcatttttcatggtgtgctctgtgtacattttttgcaaggtccaataggccataaatgacaaaaagatactgggaaccygtcattagcactctaaagttgtattctttccaccaggaacctttgccttttaattttagtcatttataatttattctgctcttcatgctttgtcggccctctcacatactggattttaatagtttttccaaagcaggtggtatacagaagttgaaaacattgtatcacttaatctattttatacatgggcccatattaaaaagcaaaaaagtcattcatggtctcargaagtatcttgagaattcatcagttccatctcctttcctcaaatacaactgctcagatcctctgaaactaaggacctcctgaacacaaaattataaaccacaaatagtgtttaacaccctttgatgtcagcaccttttttcttctgcctaacttcagtaccttatggcacagcttaaccccatttccttttgatttttgttcgttggcgatgaggaacagctggttacctcttttgtaaaaatgaccttttcccaatatacaaacaagatcaaattaccctttaactttctcttcatgttacatttcttcttttcatccttctcttttaccatgaaaagcttgctatgcacaccacatagtgcccagcatatggtctgcattcaataaatgcctattcgactgaataaacttcagtattcattgttaattgctgtgtaaataaagcatcaccctccttcctaattaccttctcccattccacccacattcctgtactggtcagtgctactgggaaaggctctgtgtccagctgggagtaggagctaggccattgctgagacagcacttgcaaaggccatttgcaaggacttgatcacatccttacttttcccatcttcagtttatgtctggaggataggaagtgagtagtgaactgaacacagaacagtaggtaacaggtttatctcttttcaactgatatagtactttatagtttacagtgcctttagtgtcttagcaagcatttattgagtgcctactgtgtgctacccagtgggcaagtgctagagcttcaaggttgcttaaagcaacccttgcctttagggagcaacagcctagtagagggcctggaatgtgacaaaaaatcatgacacattgtgataaggtttcctttctttttgagatggagtttcactcttgttgcctaggctggagtgcagtggtgcaatctcagctcactgcaacccccggcccccagattcaagcgattctcctgcctcagcctcctaagtagctgagattacaggtgcacatcaccacacctggctaatttttatatttttagtagagacggggtttcaccatattggttaggctggtcttgaactcctgacctcgagtgatccacctgcctcggcctcccaaagtgctgggattacaggcctgagctaccatgcctggccgtgataaggtgtctaatagaggtgagaccaaggcacaatggtggcagaaaggaacaagcgatcagttctatctgatggtcaggtgaaactccagaaaaggtggttgacttggtctgtagcacagtacctaaaatgtaatttatttaatatggttccattcccctgtcttgaaggtggatactggtcttctgttttggaaatcttattgcaggttgctggctggctaaagcattgaatggcaaggaagaaatgattttagatgtagctgaagagttagaggtcatatcttcgaggacactgaaggagaaataagggttggaagttttttgtttytgttttgagacagggtcttgctttgttacccaggctggagtgcagtggtgtgatcatagctcactgcagccttgacctcctgggcttgtgcgattgttccacttcagcctctcaattagctgggaccacaggagagcaccaccacgcctggctaattttttaaactttttgtagagacaaggtctcaccatgttgcccagactggtctcgaactcatgggctcaagtgatcttcctacctcggcctcccaaattgctgggattataggcgtgaacctccacactggcaagggttggaagttcttatgttagaaaaaaaaaactgacagcaggaggaggatgaatgagaggaaggtaagtcaggaggataagggaaacaggaggctttttgtatagtcgtgcaccatatgatgacattttggtcaataacagaacatatcaaccatggtggtcccatacgattataatggagctagaaaattcctttcacttggtgacgtcgtagctgttgtaatgtcrtagtgcaaatactttatttttcataaatttagggtagcctaagtgtatagtatttataaagtctacagtaggtacagtaatatcctaggtcttcagattcactcactactcactgactcacccagagcaacgtctagtcttgcaagctctgtttatggtaagtgctctatacgcgactactatttttatcttttatatcatatttttaccatacgttttctatgttgaaatgtgtttagatacacaaatacttatcattgtgttacaattgcctaccatattcagtacagtagcatgttgtacacatttgtagcctaggagcaataggctgtaccatatagcctaggtgtgtagtaggttataccatctgggtttgtgtaagtgcattctatgacgtttgcacaatgacagatttctcagattgcatccccttcattatgtgatgcgtgactacattccaagggtgaaaagatggccgctcaagaaaaggctggagaggcagtgggttaagataaggaaaaatttagaaagtaggaggaagattgaacttactttgtcacaaatttatgtggtcacagaaggcactactgcaatgaaccctgtgttcctgrgtaggaatcatgtattaactgaacgcgayatgaggttgaaatgattatttgtaaactgttgactgtcagacgtttcagaggggcctgtgaggtatagaggttggcatgattcgttggagacataaatasaagtgtgactttggacacaagtctgaatgaagggtcagtgtaacttttctgtaaaggatcatttcataaatattttaggctttgtggtctctctgcatctgaattctgctattgctgcacagaagttcccatggacagtacatgaatgaatgaatgtggctctgttccaataaaactttatttaaagaaatggacggtgggctggatttgacccggggcaatagttttttgatccctggtctagatgattatcaacaggcgggctctagttgatcatgggagtgtgtgagggggtgtcctgtgtgaatatgtccagacaggcaccccagggaatataaccagcgattgtagagtacaacaaaccagcaaagaaaaatgagataactatcgaytggggaaagactaaagtgggagagttttcagtgttagggagggtgcatgtgttgaagtcaactgtcacagacataacctgagtgcagagatgataacccacagtgcttgtgggatttgtgtgttaggaggggagttttagtggagggtggggcagaaggaattttaagagtgaacaagaggcaagaagtgaagacaggagttctaggccgtgtttcctgtgtgttgtcccattcagagatcataactctgcaagggaagaaggcagctatatttacttcacttttaaatatgaggaaacgggtcctcaggaagttaagtgaatagctcaagcctgtgccaaaactcacactcaggtgtttgcaccttatgtttgtgttattttattttattttttactttagccacctggaccccagttaattctcttggtgattctgtaaaatttcaagttaagcaaaccctgtctggtttgaccaagaagagtcacctgttggtttactgatccccagttgagttcacaggtaaaagccacccttatagaagaatccaaaacagactctgtttttgcaaattatcgctttcttttctgtgtgtgtgagacagggtcacactctatcacccaggctggagtgcagtggcacgatcatggctcactggagccttgacctccaggctcaagcagtcctcctacctcagccttcggagtagctgggaccacaggcaaatgccaccacgcctggcttttttatttttattttattattttattttatgtttttgagacggagtctcactctgtckcccaggctggagtgcagtagcgcgatctcagttcactgcaagctccacctcccaggttcatgccattcttctgcctcagcctcccgagtagctgggacttcaggcgcctggccaccatgcctgactaatttttttgtatttttagcagagacggggtttcaccgtgttagccaggatggtctcgatctcctgacctcgtgatccgcccctctcggcctcccaaagtgctgggattacaggcgtgagccaccacacccagccaaactatcactttcagttacagagatcagacaacattttgtgtaaatatgatgcctctttctgagtctgaagaccacgtcgtacattaggcacactggcttggttaatctctgcatcacttcctggttgcagaagtgctattttcatcttaccagtgagaaactccttttagagtgcaagatgctgtccagaggaagtagggggctgggatttaaactccaatgtccccgaggcttctcacaggtagagtaactgtaacataaactgatggcaaattctggaacgcaggtatgacactccctcttgtctcttgttttgatcacattgtctctgctttttttctttttgtgcccccctccccccccccccacacacttcttctggtagttgctgtagtttaatctttaagaaggttgcaggggtttggaatttgttacatcctgtcttctcattctgaggtctaccaccatggctgggcatgtgaacccagccagtggtaaatgataaaaatatgctgtgattggaaggaggtggagagcgagcagggaacacaggaagcagagagggatttgtggtgaagggtgggaaggggcctgggcctggagggccccaccaatgtgtctgtgtaccctaaacacttctgttttcagctggcttgcttctgctcacagtttctcaatttacatatgtaagaactgcaggcaaaatgactggaatcaagggcacatgccacttggatccttgccagcttttatttcaggctgacaactctttggatgtaatacaagatttatagttgtttgtttcttctaatgaggtggcaaggtaaatctgcatctgttacagctgtttggcacaggatatattgatttattttctaaaagaaacatgaaaacataaaaatttcaaggtctaaaaatagtgtacattattgtgatggtaawaacttatcagaagtcaacttatccttgttgacttatccttgttacgtaagtccaacttatcttgttgatgagtgtgggtgggaggcacgactgagagatatattgacagtgaagttgagtaaaagctcttccatttctcttgaacttctggagcaggagagtcacatcatgggatttgagcaggggaagaaaatcttctggtgtttctctcaggtgtctgcacaacccgacctcatccagagcctgaactggagtgtcagccttccatggcacatgctaatgcagggcccagggcaccttggcgatgcctttagggaggttccaggaggagctgctgtctgctcatcaggggctttgagtgtatctcacatatcataagtggagcttgttcacctcatgctcttctttgaatgggaaattctgttctctatcattaaactatgcagaatagaaacagtgtggagcagaaaggtttaaagaaggaaacctatggatttttaacttgcttatgtataactaagtcaactgagagaagagagcagtcttaatataacgtagagggaggttttctctttttatttttttagcagaaattttttagcctgttctattgcaaaataaattcaacttgtcttggagaagagccacacagatggaaaatagtggaaagacagttaaaaaaaaaagcttaacataaatggcaaggtaaccacttgtagctttatgttatgaggattggtatgatgtatcctattttatttaaagaggaataaacttaaacttcatgttgatgaagttggcagatgatcctgaatcaggggagatatcaaaaatctggaaggacagaaatattataatctccttcaggagattaaaagtataggcaggaaataacaaaatgagatacagcttggaaartgcacactaatgcggctgggaaaaaataatgtaaaatgcagaacctaagtgaacagaagaaatgtgcaccaaaatgccaaaggcaagcaatatttggatgtatacattgcacaacagtccaccacagtgggctgaccattaggggccacctacattgctcatcctcaatagagaaagagggctgggcgcagtggctcacgcctgtaatcccagcactttgggaggccgagacgggcggatcacaaggtcaggagatcgagaccatcctggctaacacggtgaaaccccatctctattccaaatacaaaaaattagctaggcgtggtggtgggcgcctgtagtcccagcttctcaggaggctgaggcaggagaatggtgtgaacctgggaggtggagcttgcagtgagctgagatcgcgccactgcactccagcctgggggacagagcaaggctctatctcaaaaaaaaaaaaaaaaaaaaagagaaagacatgattatttttgcagaaggatgaacagcagtgtttatttttcatttccaaaatttcaccatttaagagataaggagatggtaagtcagtcattggcagaaagcgacataacaacagggagtgtgggactctatgacaataggaatgatgaatgtctgaactgagacaatgtagcagggtaagtggaaatagtggactgaaatgaaatttaggagggaaaatcaacagagtgaagatccaacaaggaggaaggagaagttgaagatgattctatgtagcttcatggctttatggagtgcatggccattgtcactacccacgagaggcattataggtggaaatgcagatttggcatgaaagataatgaattccatattggttgagttgcttaaattggttggagcttaaaggatgttcagctgataggagttcctagcatgtaaatgaatattaaggtctgactgggttagtgtgtcagctaatttgaagtgttgatgagtgataggaaatttcacataattatgttgtagagacctttagcgtgttatctsaaaaggctgaaaaatgtgagaacctcagacaacttggtgagccaatggaagccaatcatttaaacaggcgtctttagataagactctgcttattcaactttcttaaatatggctacggtattayagataaagctatgtgagtaaccagacatttaaaaacacatattgtttttaagaactatataagaaaataagtatttttcagaaagtgtatgagttctcaaatttagttttatcggaaaaatctttgtttgagaaaattaatttaaaaatcatcaccaattctcaaaaatcatggaaattttgatgagcactggatataagtcctgcattctaaggaagctaagttggaagtcagattgttgcctcatttcttaagacatcgggactgatgatctccctggatagtaattagctgttaatgagcacagtacccagactagaagtgtccctaaaatagctgaaacatacactcgagcaacattttagttgtttgtttgtttgtgtttagacagggacttgcttctgctgcccaggctggagtgcaatggcatgattatggctcactgcagccgcaagctccctggactcaagtaaccctcccacctcagcctcctgaatagctgggtatataggtgcacaccaccacacccagctaatttttaatttttttttttttgtagaggcagggtctcactgtgttgtccaggctgatctggacaagcaatcctcccacctcagcctcccaaggtgctgagattacaggcatgagccaccatatctggccaacattttagatcttaattgaaaacttaggaaagttgaattattgatcttcaactaaaatacaaccttcataaaatgagggctcaacatcacagaatttgggggaagggtgctggacccagaaaattgggttctggggcagtatctgccccttttagatgcatgagctttacaaggctcttgagatacctgagcctgagtctataatgcctgagggcaggtgccactcctccctttgacatcttcgttgtagagtttcaggaggtgcaaatgttcattgatgaaaattccagcaaccttccttacaggtacagtcatgcattacttaatgatggggatacattctgagatattcgtcatcaggaaattttatcattgtgtgaacatcatagagtatacacacacaaacctagatgagatagcctactacacacctggactgtacggaatagcctgttgctcctaggctacaaacctatacgacgttactgttctgaatactgtaggtgattgcaacacagtggtaagtatttgtgtactaaacacatcctaaacatagaaaaggcacagtaaaaatacagcattataatcttatagggccactgtcgtatatgcaaaaacatcgttatggggcacatgactgtaaaagtcaaatgctttcatgtgcatatgaggcatatgagataatatacatatataaagtaaattcttaatgtaggcaaagaccatgtgtctcagacaacaaatgaggggtacacatgtgtttcatcataaagaagttttactacaagttaggggctaactagaaactgaggctgtgtgcttctcaaaatgttttctacttcctccccctcattattaaagtgtctcagttattgtcattgtttatatttaattttcagaagggagataaatagtattcagtcattcctaaacatatttgacttaattaatcccccccacacaccccactccacttttctctctctctctctctctctctgtcttttttttttttttttatggtaaatcttttggatcacttgttctgaaggatatgagctgggaactcatgaccagagattctagaaaagatggaggaggcagtgttttgggaaatgacctttggcagtgtaagagaagtttgtcaccccttcgagtctgcagcatatgggatgtgggaggatgtatagaacagacaagtttggtggaggtgctcttatagcacagccctttctgggggagccagcttccaatttggaagggaggggatttattgaagaggtgaaaggtatatgggtgttataagttgtattgtgtccacccaaaattcttatgtcaaagtcctaacctgctagtacctcagcatgtgtgcttgtttaaaactagggtcatttcagatgtattgagatgaggtcattagggtggacctcatcttaatacacctttataaggactggtgtgtccttataaagaggagaaatttggacacaggcacacaggaagaacgtcatgtgaagatgaaggcagaggttgtgcggtgcttctgccaaggaacgccatggaatgctgaagatggcagcaaccaccagaggccgaaagatgtctggagcagattctttttctcagacttcggaaggaatctactctgccaacaccttgatctacacctccggctttcagagctgtgacaataaatttctggtgtggaagccatccagtttatggtgcttggttacagaagccccaggaaactaatacaaggggagatgttagcatggagaattccagcagaattctatcagagtggtggatggtccagtaaagggaaagcgaggaaatcgtgagaattgttccctttgtgggtggtcactaaagtatgggagcagagctgcacttctgcatgtggatttgccggccacatgtttcatttgtaatggtagatgtatcatcaggttctggcatgtgtgggacaggaaacgcctgaaggaattttagacaaatgtgtcctgagatgtccagcagcaccactgaaagagtaccacagtgatttgttctagagctttcaacaagttgatcagtttcatccacttcacctgttgctgggtttttcttaaccttagcaagaacactaattagttatgaaaacctatattgatgaatgaggtgaaggcggtgaggaacatgcatactctctgttagccattgattcattcattagtggactgctctgggaaagagtatttcagattataagaaaagctccaaaatgttgtaggatgtcagttaatcctatgactacatctactacttatgaaagaagtatgtactgtcatttggaacagtataaatgtttaaagtcattaactatcttatattgtgggtctggtttagtaatttttacaaactaacatcttccagtgtgtgccttgatcttgtaggagggaagatattgaaattcagcgtgaattttctttggcaattgcccgattctttttcatttttctgtttataaaccaatttgagtgcagtggattttacttacttaatcctgaaactgtatgcagcatatcttttcttctttggcggctgcttcactgctgttgaaatcagctctcatgcctgcacatggcatctggctcactcaccacccccycgtgtgtatgtgcgcccytctctgtgagccggtggctcagctgcccacaaatgcaagtctgtgggtcagagatggtactgagaagtggaaaactgtgcgtgtgtttgcacatttcatttagactgtacttcccttagtcctttcaaaagaactaaagcggggggaggggagaacttaatttttatacagattgttctgtattttcacaatgagatcatttcagtyacatcagtgataaaaataattaggaagtaatagtgggctgataattagattgggagcaacaagatggtgttattgatcctagcccagctgtgtccttattatgagatgttggttagaattctcaatagccactggggtgataggaacctgcctcagacagtgtttgtaataaaaacttgctacaaggcatgttgtgaaattaaaatgcattcatctagagagaaatcctggagtttcttatcgttgctaattagaaacaggttgtattttcagaggaaaggaccttaaatgtattttccgagaatgtttttacggttgcatgacatgacttggggagtacataggggagcactagagcaggggcccagtttttcttttcttttcttttcttttcttttttgagatggagtctcttgctctgtcacccaggctggagtgcagtggcacgatcttggctcactacaacctccgcctcccaggttcaagccgttctcctgcctcagcctcccgagtagctgggactacaggcgcctgccaccacgcccagctaatttttttgtatttttagtagagacggggttttgccatgttggccaggctagtctcaaactcctgacctcaagtgatccacccgcctcggcctcccaaagtgctgggattacaggtgtgagccactgcttggggcctggcttttctgactcggcttaggaatttggaggatgtggctgggatgctcatggcatagaactcagcttgctccttgttttcctgaagctgacatgacaagccccatgcgttatgcygtgagcgtttgatgtcaatgggaagtggcgtgctcagtgacaggagccagcctagactgtaaagtcaacttacaatgaacttatctttatttatgtcctgttttggttccaacractggacatggacatttgatttggcatcattttcagtattatctcatgaggactcttggaatatttcatttgcttggtctacatctatctaggctctggactatgtatccactctrtgatcaaacttggaattttcctgatgcctggggatgggctggagtgtttacaagtggagtaaatatgaattcagccaagatataattgatacaaagagagggtagtatttaaggattgagatgacacttgtatgaatgaaataaaggccaggattggtttctartgccaatagaactttgattgcttattctttaagtaagattacttttaagcaagcaaacaaaaaccacctgagtkttttgaatcatcctctagttcagtttcttaggaatgcagtgccaaaaatggtattttagtaaaagagaaactgtgycaggatacatcactctgaatgtgacagcatgctaggcaggaggctgactacatcctatcatgttgatggtttatattgttttcaccacactccagatgcctggagctgtgggctgacttctcgttgatctgcagtgagcctctgtaaaaatgttctttaatacccaagagrtaccctgttgcaaataatacttttcagaaaagtctttaaaattcaggtaaaggcaattcattcatatgagttgtttctccagctgaaattggcattctcaatgatgttctcaatgaactgatgataaagccaactcaagacctcccacccccaraaaactcccaaacgcccaaaactgtcgtgaaaagaaggaagtcttgttcatggctctcaggatgtctgtaggaatttgcacactgacatgaacttaaagcaggacagatggatggcaagggctgtgcatctcattggatatttaasttgggaaatgagaacagtgagtctagcacgtaggcaaataaagttctgcagaatgaagctgattaaagaatttgaatttgaacctggaaggacttctatggtcctttctatgtatgtaatggtrtttttgtaggtaaatatttgaggttactctgtatagtaggttcaaatgtttgtgaaaktgccttagagttagaaaacaattaacccaggttgagtctattatgtttcctgctcatttgtgggaaagctggtgatcccacactgaaaggaaactggaccagcaccttctcttccctggacggacgttattcatgccccagcagcaataacaatgcctcgtctcaagagctaaaaatctgttgattccagctgaagtgtttagagaaaagtgcattgaagactgaaccatataaacaggtcagagtgaaagccaatttttataaccagagtcaaaatcagtgtggaataattcataggtcattcttaattttatgttaaacattgtgstagattatctccatctttttggcccgtgctttcaaaatatccccatgatcaaagcttcttagataggatatgtttccctccattgtggggaaacacagagcctatggtygttctgtcytgcgagcctctgcttcctctgcaaagtgagagctccttttccttgtgtttcctgacctcatccaagggtttttwaattattttctaagggagggtgtcactgtctttggaaagatctaaaatagcaaatttttgttttcctgtatacatrtaagaaaactggaaggagggatcagtagaaacttaggtctacctyagctacaattcatttatttattcagtagcaataatagaggattcgtgcctgttagagccatagcgcttgagcaggcaaacaggcctcatctgccrtgctccttgggctctcatcttcataaggaggacagtattgtgggaaggttagtagmgaaktcagttttcagtgtcgcatttccaaatttgtgtggtctttccacataagagtttgaaaatataaagggcttcaattcgaactgtttggcagatgtagcaaaaggtatcctgtgggtccttttattcatgtttgtttcatgtcttccacatacctgataactcttacagaacagtacgtgctggagtggaggaggtaagctcagtcatggaggaggggttagacacgtggaggtgtgcttaagtagaccaaaagctctgcaaggggtttagcatcgcctggggatacaatgcgtggggaggggtttgtttagggaagaatttcaggatgtcaggatgtgtgctttatagataacaatttcatttaayctttaaaatcccccgaagtatggatcagctccattttacagattaggacagagttgcagtgagtagcccaaagacatgccaacacattgactaaaataacattgaatcaccaagaaatgttcttcagggatgtaaaatgcaccaagtttgactttcctaagctgacgtttttagctggctttgttcagatatttttctacaagtatataagttttgttttattacaaagacatttattgggttttaaaaaattcattcagccaatcattcagaaaatctataagggttaactactgacatttgtagttcattctgatttaggaatcaccatatggtttaaattccaatttgagaaaaaaattactaagtagagatatatttgtatcatcatatttgtttaagctctgggtttccaaaacagtgtatatagatagtattggacattgtgaatgggctagtttaaattaagaacaatttcactcatagcagaaaaattatttttcgatgaaaggagatgataggattttccccccatgctgtttcatgttgaagatatttcagcaaattggtcagagttctgccaaagtattttgaatgttctttagaagtgtttggaatgayctgatttttctcctcaggacacatctgaattttcttaggcttttggaactctttttttgttttaaatgttacataagctctttggttcgagcattgaatgacatgttatgacatttaaggggaaaaaattttataagcattaatcaatgtaagatatttgttgctttttcattcgaccccatccagctttcatcctgaygcacaccatactggaggcatggctgcttgtttaattgtttagtgcagaacgcggtttgatctctttcttgtgctttcagtgctggtaaattaatcaaaagaagttactgctctgctgggcattagcatgggtttagatgtttctgcttcagggcctgttcatcaactaaaatgcttttaagccccaaatggagagtaaacagcgttgctgcggccactttgaggtgagccattacttgtgacccgcttacatttgggaaggggcctgtttgtattagcagttattctggtttgggttatagcattttcaaaatgttttttctcctttttattttagtgtttttagtatttgtaaagagtgccccccatcaccaccatgtatatacacataggcatttcaataacagtatgtggagattaaaatcagtggacatttctatgaagtttgaaaggtgaaatgtgtatcttcaccatggcttgtagtgagaggacagtgaaattataatgccaattgagatagcagatagcagaatagttttgactaacatgaaattgtggatccttaggttgtttttctgtcttccktgaaataaaagttgacactttctaactcttggcagcaggtgggccaggcatttgggaggcactgcagacgctgaagagaacagacctttgccttgcaggaatcagtccttccaggaagacaggcctggaaatggtgatttctgggcatgggctgagtattctgatgggaagagagtggaggagggggaagtgaagctggcagaggggaaggagggcctgacggagatgggagaagcatcagaggaccccgccaggaaggagacgacactggaggtggtcttcaggatagagctgaagttagccgaggggagtccagatgcgagggagtttgcggtgcaggttttgtctggagaaaagcagagcagtgggaatgtgggtgaggagggggtgtaggcagcagggaatcatgacgcaggcattgtcacatcgatgtcagagcaggaggctgtgctcggtgggggcagtcagraagccccttgagtgagcagctacagagcttaggctgttcctggggcaagggagatgggaggaatttaagaaagagtgggacagctttgccttaggagcagaccaaggctgcggtgtagacaggcagcagccaactcatgttccttccgattttctttaaaactggaaaggaagttaaaatgggacattctggtcactatagagtagaatgaatgcctgatgataactgtcacattgtctctttagtttctaattgttgacatctaagtttgtttttaaaataattatttggccaggcatggtggcacgtaccactagtcctggctactaaggaggctgagatgggggattgcttcagcccaggagtttgagtccagcctgggcaacatagcaagaccacatctctaaaaaataaaacaaaacaaaacaaaaaaacgaagaagaagaattatttgcatgtatgtgagctcctgtttgtatacgaaacaaccaagttcatctttagaaatcatctgattgtctcaatatttatttacttatttgtgtccctctaaagccacagtaaggagaacttcggtgaagtcctccctgaagggtcactggtccagttcgtgtggaagacaggccggtgtccagaaagcagctcctgacccaggcagagcaggctgcatttctcagagtagtcgctagagttttcaggagaccaaataaaatagtacacatctgtgtgtagttaccaaagccaggaacacgggccctaactgtgggcagtttccctctgctagtgccccctcttccttggttactctcatctgtctctagttttgggccatacactgtgcccacccccacactgaagcagcctccctccccacagctatccccccgattctgactcccacctgcttccatgttgctctgcccggctcccattccgaaggccggtggtttcagcccagctttgggagcaccgtagatactttcagttcagcagggcccttcgccccaccacgtgatgggattctagaaatgagtgtgttcsagtaatagggaggaagtgtggggagcctgggggccctgtcggcaggtacctcatatgtgtagttttggcatcgagtttatacgagcacatgggcatcaaaaagcttgcgaagaaaagtcctcttctgctcgatgtatacaaaacttctgttttgaaagagttgcttggggaaaaaaaaaaggaatctttttggaattacacgtgtagttcactaaagtattcctagtgacaacatagccatgtttaaagcctgagattgtgttgttctctgtccagggtccaacagggaactgaaatcttggaggttttcagcaccacagtgtatcagagcactcacagagagcttgggagtctcaatgacaaaggcgcccgtgggctcacagctagtactgcgtctttggtggacaaaagctccattttcctgataaaatttagcttactgtgcaaatgtgatttatttggtgggtttcctgattctcctacaaggagattctctgtggttatttgaaagtaactaagtcaacctcccayaccttggcttactttgaattcaacctcgtcaacagatgccctgagggccccagactgtaataagcagctctgctacagtgcctaccagaagggtaaaggcacagtgcaaagaaatggcaacatcttgttttctaggacttcttcaaataccttgtacttggaaagttatgatggaaatatcctgtaatgtagcatcactgaaatggcttcattttaggcaaggattgtaaagctttaaaattgagtgaaaccttgaagtgtttttattatttatttattttattttatgatttttttttcttttaagagacagggtctcactctatcacccgagcacagtcatggctcactacagcctccaactcctggattcaagcgatcttcctgcctcagcctcctgagtagctgggactacaggcgtgattgccatgactggctaattttaaaattttctgtagagacaaggtctcgctatgttgcccaggctggtcttgaacttttgggctcaagcagtcctcccacctaagcccaggagtttggcctcccaaagtgctgggattaagcctggcctgaattgtatttacactgcttttaataacttatttgctttttctttacaaaagtaatctatgttaataatataagcagaaataataaaatgaaggaataatacasccaaatcagagataaccactttctaaatcattttctcctgaagttttatcactgcatgtatatgtatgtatacatctagtatgtgtctaaaattggatgctactgttacgtgtactgttgtaatttgctttcttcattcaacaataggtagtgagggccaggcacagtggctcaggctcatgcctataatcccagcactttggggggccaaggcaagagagtaccaatgggcatatatattggtgcagtcctacgtaaaggcaatctgaatacaaattttacatgtgcataacttctgaataggcagcttggctatttatcctaagaaatttatcctaagaggccaggcgcagtggctcacgyctgtaatcccaacacttygggaggctgaggcaggtggatcacttggggtcaggagttcaagaccagcctggccaatgtggtgaaaccccatctctactacaaatacaaaaattagccaggagtggtggcatacccctgtagtcctagctacttgggggactgaggcaggagaatcgcttgaacccgggaaaaggttgcagtgagccgagatcatactcttgcactccagccggggcgacagagtgagactctraaaaaaaagaaagaaatttatcttaagaaagtaaatggataaatagacaaggtcataggcacagtcactagcttattgttcatcagcaggtccttgagagtgcagtagatgtaaaatgtattgttctggaagaatggacatatgctgactgcatggttttttgttttgttttgtgtttagagacagggtctcactatgttgcccaggctggagtgcagtggcagtgcaagcatagctcaatgcagcctctaactcctggccagtgcttgtttgcccacacataagcattatgtgatattagtctactttgttgttgccaaactctgttcaaagtgtttcctctacctcagattctttttggctggttttagttcagcatctctatccatggtctcagaactagctcagggcaaggctcctctgatttttctttctaactctcctccttccctttccttgccaccctctagcgtgtctttgagctatgtgtgatagcaggttttactggggtgatttataaataggtcatctctcccctcttgcactgtggagtactggggggcaccaccagcgctggctgctgtggggtctttgtgccctccctcggtctccttcagcaagctgggcccttaagctcttgtgccaagagaagggacagacagggcagagtggaggagtgggcatggggcgctgctgatcagagaaagggtagcctggtggccaacagcacgtccaagaacactgtatgagcaaaagtggcagggaaatccgggaagtgggagctcacaaaccaagtgctaacacttacagggtgtggttccacagctgccctttggctcgacccacaatcctttatacagccatttctagcttatttccagcccccagctcagtgctgactcatgtgaatgttggccagacgctctggcttgtgtggttattggcttcctctccctttgttgcatacagtcctctgtttgcctttctacagagtacagcaatgcatagctgcaaatttgagaatctcattctagtgcggtaggtcagtccacaaatactctctgagtgccagctccatgccagctattgagatgracaccaccaggactatgctgggaaaacagcaaacatggtgctggtattgcagggagatcacagagggaaaattatcctcaacctggagggatggcttcttagctcaatgatgtcctttcccagcttctctcttggagatattttgtctttggaactggcagccacatgacagccatgtgttgctccctgattgtggaagggtctcagtatcctgagtgcttggggtgcacccaaaagacaaacaccacttatgtcaaaacgcaggccccagagttaaggaaaagtctgtttctatcactaacatagcatctggaagaaatagaaaatggctatttcctaattactgttaaagtgtattaagccaacatccatgtatgcttttcctctccttcattcactgaaggactttcaaagaaattgcaccccttgcacttagcatggtgtctgtgtgacttagtcaatgagccgttaggcactgcagataccgtttgttcagtcaagatggatagccctgccttatcactgcgtaacgccttggaggccataggctatctctgcacatctcccttaattgcctggtgtatttatgtgggttgactagtttgttgccatctgcatagctgggttgtttaatatatttttctttgttctgctaatgacctgagcttcattacatgctgataaagaatcctaaaatgtacatagaaaactgacgaagaacgaactggccctggccctgaacagaacaggcatgccactatgccggctgcccagactcagcatttgtcgttacaggaaggaatggctttctgtttgcattttaggaaaacttcaccttttaaacatttcaaatggaaaaaaaagtatgcgatttttttttttgaggttttactgatatgagctacaaatagcttcttggaagccagtcagaactctcttttcaataatgttgaaacattttcctttgactggaaattaataccttcaatttagaagaactctagttagaagtttatagcacaratatagccccatgtaactaagggaatcttggagaattttctgatgtcaaaaaacagagcggtgttagctcattttaaaaaattgttctagtcaaatataaagcaaaaaatcccatttttaatttaatttttataatatttaagaatcatttcagagataaagtacttctgttttttaatatagcaaaagagattattatgatagagaataattatataaattaggattttaggctaagaaaaatggtcttctgttggagtggatggttgtggttttcacttgttagttgtctggtgttattttacataggctttttcaaaatttgttttatgtcaatttctgtcaattttcttagtgaaacactgtttctagacttccacttatactaattgcaccttgattggattatttgctgatttgttttttgggytttttgttgttgttggaggtaagagtaagaggaaaaactacttccagcacatgaatggaaaagaatcactttgctgtttgacgttgcttgaggagacaatgtttgtgacagttgcatgtattcgtatgtttgtaatttattcttgtgaacagctgatactgttttagggcatcaggtcaggatgagctaaatgtacagttctaatcaatcaagacaaatgatggtactatcacaattccatctccagaggcaggccctctccactgtagctcccagcttcacccagggacaaagctacagaaagggaggcatactgaccctgccaaagttccttcttcattcctgattcattccatctccaaacccacctgtgtcctgtggccctcctactgcttatcaaaactgttcccattattgctgcaatctgattcacataggcaaaattggcagtagccattgtgtgcaaagcattccgttgaatgtaggggcaatttaaaaatgaagacataatcttttccctgtaggaacttactatcttatttgtgttattcatattcagtgagtaataatttcagtgtgaatatgtaatataatataataggttgatatataaagaaaccccaggccgagcacrgtggctcatgcctgtaatcccagaactttgagaggctgaggtgggcaaatcatgaggtcaggagtttgagaccagcctggccaacatggtgaaaccccctctctactaaaaatacaaaaaaattagctgggcatggtggcgggcatgtataatcccagctacttgggaggctgatgtaggagaatcrattgaacctgggaggtggacgttgcaggcagccaagatcacaccactgcactccaaccccagatgacagtgcaagactccgtctcaaaaaaaaacccatatagaatttgacacatagacagtggacttgaagggaagggagataaattcaaacagggacacgtcagccaagactttcttctcttcttgtttctcttcccacctctgtcctgaagaccttgagaggccttaaagccaggagctgagaggggaagggcactcccagccagcactagctctcagcctggatggtgtcctcacagaggcagggggatggtgctccaggatagcatgcagcagcagctcctactccaggtgtagcagccaggataggttttttcacctttcatccatctttatcatttattcagttttcatggttatcttgtgaagcagatggcaatggcggtgtccccatattataagcagaaaactgtgaattggaggattaggtaactgttggattcttttttttttttttttttgagacagggtcttgctctttcgtccaggctggagtgaagtggtrtggttgtggctcctctgctggattcttacagtgttgggagcggaagctgtggtacctgtgttctgtctcccacccacggcccagttgctcagcagaattatgtgaaagcttccaaatgtgtgttttgaagaaatcaaagaatgtaacagagtaggtgagggtgtggagcctggagcaagaagacacttgcttgtgtttagtcttgtcttggccacttcttaggttgtgacctcgggcatactgtgtcaatctttcygagctgggttttctyacctgtaaaatggagagaataacagcaccaattttgcagagttgtgcttaggattacagcagccaatgcgtggaaagcacttagcccagttactgatgatcaaatggtatgtgcgaaatcagcacttgctgctgccctatcattattattactgaatcccatatttttgttttcaacttaaaagcataggctttggcttaaggaacattagaaatcctcctcattggtctcttcacagaggaggaaaaagaggaccagggagggggtctgtctggttaagaagaggcagggagcccctgtacagcccatcccttgaatcctgctcgctcagcgcattcgttccccacccttccccctcattaatatgttcacacattgccaacgcctgagttcttttctccttccccacagcatacactaaacctctagggagacaatacacctactctccaggagatggagtggtgggaggagggaggaattttccaaatagcccacaggatcatgaaggcttttcctcacatgttggtttttatcacctcggaccattggtcacagaatctggtctggaccttgtgccactgtgggaggatggccataggagaaaaagaaaaagcatcgctccctgtggctccagtggacacacgcgtgctttcctcacctttctatcaccagagccccaagacctagcatgcacttgccactgtgccctggaagctgagtcactctcatctaagtggatggcaggtcattttgttacatggtttggggaaaagattacaacaccaaagttgtcactactttaaattctatccatgtgccagttcagtgtaacgatatactatgtgtgtgtgtgtgtgtgtgtgtgcacacgcacttagaagagagggtgttctctgccaagctgcttgctactccactgccttaacctctctctctatcacactcagtcgcagttgggttgatgactcccatattcggctgagaagtgagtgtaattgtaaggcacaggcatgatatttcaagacctttacagcatgagaagtaaaatccttttctcagtcagctgagagcccctgttatatgtgttcctgacccccaaacccctcatttctcaagtttcatggctggaactttcttcattctcaactccccctttggtaccctcccaatccargcggttgtgtgtctggctcactctggcctttatctcctttctgagctcagtgactagctctattctgaaggcacagggtcctgctggctccatgctgcagcttccagcccaggtgagtgaggcagttgttggaggtattgaccccacccatgaagccaccacaatgccatacttgatgtttaggttgccgctgttaacctccaaaaggagataacctgataaacatggctgtcctcatgttaatttactctttactgaatagctaccaggtggagtcaaaagttgggatttggcttctctgaacaggggatgtaataaactcatagccttaatctttcaccccttttgatcaaaaactgcaagatgatcattactcatttcatatgataagtgtgtccttgaacatgaaatggaaacaattgaggaggagaaagaaaaaagagctgtgttttaagtccaaaaaaccattgcaaaaacatgggcaattaagcaaatatttgtttattacctattgtgtatgatgctaaaggtctaaagaggagtaaaacaagtccctaacaccaagtagcttgtagcctaattatggagacagaagcacatagccaaccacatttcagatcagactttgtccaaggaagtgctattatgatggtattaatcaattagaaaagcaagttgcaaaataacctttacattagattatgtcaactactattataattagttataaaaatgtgtttcttctatggatacacaatgtcttggggctcatgtcctctctataggcaggcccccatgtacctatattcatccacctgccaccaccaccacatctatctgaaatccgtttgtccatcttttctctgccattcaccaggacattagcagacatatagaatcactggaagtcattttcatgttccatttttggaatggtagaatgccactcctgtttttttaaaacagttttacacatataaccatgaaaaagtaaagcattattatttcccgctattgagatctagaataagtggcttgttaaacagtctttgggttttagaaggtgtgtatgctacttggaagaaagagctttgtgtaaattacctcctttcccacccaagaaattccacttccaaattaagaaagagagagaaagagagagagaaaggaaagaaggaaggggggagagagagaaagggaaagaaagagaaagaggaagagagaagtattaatctgcaaactacctgcctgagtgtgaagcacacatggtgttggccattgctgtccctgtggctctggggtctcttaattgcttggattaggactgaggtgaaggtcagaactggatagcctacccactatttccagagtgcaggaagttacagtttggtgtagatatgggattggtaatcagatgaccttttgttctgtgcacaggtgatgggtgaagggcagacctaattaaaaccatccaatatattaagcatctccgttgtcattaattttcagccgtgcatgagctcacgatgcctggtcctgcaggagtcacaagtttgctctgaaatgtcaaaactcaaacacttctcagctttcctctcagttctgattcctattcccaccttccccacagcagaggtcaggcacactattttgaaatactagtaaaatgtgcagtggggaacaatacatgtatgttaactttgaggaagccagacgctcctgagagggtcttgggggccttaataaagcatttcaaggaagcagagtatcaaattaatgctttttgtgctaaaaacattaaggtatttagatgtgttattctaatccctgtttcagcatgggaacagaaggatctaatatcttttatttaaatcccagccttcctagactgctccattcttttcagtctagtacaggaagagacagactataaccggttgatttcagtgactataaaactgtatataattcacaacatacaacccattcaacttttacatgaaatgcgcttgcccagatcttaatacattccacatcatttagtagagatgtcaggttttcagaagctagactcctgtcagaaygccactttaattgttctgtttttgtggacatgcgataaaattgtcacagacgcaagtaccgatgcataaattctgaacccccaagcaaagtatccttatttcaaagtgagccctttctcagttgtggagtaaaccgatcttgagcagacagggtgtcctcctgtttttctgagagcccctctgcaagtctcagctgcagaggcagcatttatggcttgagtacaggatcgagttttaagggttttgttcagttaataaagaatatcaagttgccctcaccactaacaactgtaggatagctgacctgtaactcctgtttcaaagaagacaatgctcataggatgttgaagcagtcaccagtcatcatgtagtaattaagatcagtaaaatatatgtagagagagatggccatatatatgcctcatgtctaaatcaattgttatggcttcttccctttaaaaatttttggttttcaaggacattattagagcctgaaatcagaatttagacgccatataaaggtatcttcaggtaaacagaatagctagtcttaaaattctttatatttgaggacttaacatccaacgtaagaggtgcagtacactttaagacactagcaagatttttttcaaggtcttttaaaaggacttgtagaagaaccaagactatattttgtgtgtatatgttgggaggtgcatataacactgaaataattaaaattaaacttcctatcattattaaatattgaaaatgagttaaatgaaccctttacacaacaaggaaattattagtaaatgttaatgtatttttgcagtagcatattaacatacataatattttctaaaagctctctctttatttgtggagtgtgaagaagagctcaaattctgtttttgaaagttgagttataaagaatctcttttggaatatggaaacatttaaccttagtatttttgagaaatgatacttataccctgttaaataatttttgtacttatacaatgctgtggaaatttcaagctttccacaatttaatatatgctcaaatatatgtgttaaattcctaaaattaccatggaattgcagcactaagataaaaagcaagatgcttgcacagctgcctgcctctcccctcacctttgcagagactcctggtgttgtgaccttagcacctgttcaactgcagtgtcactgaaaggaaaggacctatgcctggtattgccaaaatatggtggatgttatcaaaacatacatgtttcagccataccaaaataataccgtcagtacatctgggctcttacattacttgttcaacaaatcctggagcgtgttgacctgtatttctcaagagtggctggatagcatcagggtttgtcattaagtcatgcatgttttatcaccaataatgagatatacgtttgtcatattagtcagtcagcaagttaaatccttattctactgggcactgtgttaaatagtcatttgtagtgcaaagatattacagaggcattctattgtggtggaatctgattctaggcttaaatcattgcacaaagagcaaataggtggttgagctaagctgggcaaagtgatgcacacctgcggcctcagctgcttgggaggctgcggcaggaggatcgcttgagaccaggagttcaagaccagcatgggcaacataargagatcctgtctcaaaaaaagtatatgtatataaaatataatatatattagcacagtatatatatatacacacacatatgataaggtatatatataccttatatattatttattaaatataaataatttgtttggatgatttgtatcatgcagcacccccaagactacttgtaaatgtttggtaagctggtatttattaagccttcaaagtgcttttgtgaggtgttatgcaggggctgggggtgagcttttaatagttgaagcattatgatctraagaggccaggaaaaaaaactaagcttaggtgttagcttttcccaggagagccctttgtaaggacaaagattgttgtcagccatgtgtcattaaaagctgtcacaaggctgggtgtgatggctcatgcctgtaatctcagcactttgggaggtcgaggcaggcagatcacctgaggtcagaagttcaagaccaggctggccaacatggcaaaactctgtctctatgaaaaatacaaaagaaaaaaattagctgggtgtggaggtgcatgcatgtaatcccagctacttgggaggctgaggcaagagaattgcttgaacctgggaggcggaggttgcagtgagccaagatcrttccattgcactccagcctgggtgatggagtgagactctgtctcaaaaaaaaaaaaaaaaaaaaaaaaaaaaaaagctgtcccagaaggcctagaatgtttttaaggatatttgtagaaaatagaatcaagaccactagcatgttggtcaggaagtttgcaaacgatatctgtctcttgaatcacaggacaagtgggctgtttttatctgctttccatgagtgatgcatttagatctcacagaggtggccagtcatttatgtattcctttcatcctctccatctgtgcataggctttcagaattgcacactaatagcctgctcctaggtctgttgtttatatgaaagttaagatagttttgtttaaatagaactgtattttttttctattacgcttaattatgggtggagatgtagctagtcttggaatcatgattttggtagttagtcaccatttattgaatgtctgctgtacaaatcttaaattagacatttggagaagggtgaggaaagggagggatagaaaagaaatgaaagatgtcatctctgtccttgtgaaggttagagagaaaaacatattcccccatgatggatataaccaattatgttgaatagtttatggaaagaaatgtactgattaaataattttttaaaaagtgaattcttaaaacttttatgtcacctgtctgctctttcatgatgcagctgatggcgttagggaaagaatgttaactcaagtcacatgacattttgtaggaaatcccctcttttatattcagatgtggttttgaaatgtctaaggattccgagaaatgcttccatgggaggggctccataacaccttcatctctagaggaaatactggcataggatttccagaattttttgctgcaaaaacaaccaaagctagaaacgctcatccctgaaagtctgtgcctgtggctcatttaacaatggggtgcacgtagtcactctgaaacccattcgctcatggattgttcttttctctgtcagcactcaccttgcttttcaaaatacgtcccaccttagacccaacccktgtgaggctgcctcttggtcaaacactgcattctttgaaataaaaactgaactgctctcacctttccttcgttgttgcatctctctaaggcacactctcttgcagcttcctcagttacagctcctcgccatgtgtaagtttttatagtgagggagcttttatagtgagggagcacttacatctaccttagaactattgagtgattgagttgaaattttctttctttgtgcctctagataagctaacccacaggtacctattgggctcgcctgaatgcacccccattcctgccactatcctttcccactactgccctcccaaccccaaattctatatctgccactgtgctccaggggccattccaagctgcccaaattatctacttttagaatttagggctacaatgaaatataccaaaatctgggccatgagattaagttttgagggagccgcacagtttggatccgagcacagatgttccagaagggaacgactgtccagaaggcctggacacctgggttgtgtcctgcacaaatgtactaaatgcatctgaagaaagaacacagtagacagaagggatgtggtcagccatggaggcatttaataaataggattggttaattaattttaggttttagactcaaatatcacatgtttgtatatctatctaattaagctatgagatttttaaaggtactgaagtttttgactgactgccatgaaaaagaagatgttatattttatttaaataactatttcaataagaaaatccttttcataggatagtattttcaacaggaaaatgaacacttttccaattgaaatcttctgatatattggagcactttattttatagttaaatattatgtattttaggcttggtattgataagttggtttctgtgtcattacgaaaaacaacttatgaagtcttgtttgttgtatttcggttagtttttgcccctaccaccttcttatttgagacactcagattaaaagaatatttttaatgaaataccaataaaatgtatactttctgggtttctgtttaaaagcaaagaagaaaaacctacatatgcaaaactttaagaaaggggataagattcagtgtttcttgtaattgttaactgtcactatggaaattttgtatgtatcttatgctatggaaattcaagcttagctagaaaacatttttactagaaagaacctgtggtattgtctaggccagtgctggtgacttgagtatggtccagagacaagcagcagcggcagcagccgggagcttgttagaaatgcgcattcacaggcccagcccaggctttctgatcagaggctgtaccttgacaatccctctgggtgattccgatgctcacttaaagytggaaactcattgatctaggacagtggttttcaaacttccttttagtcataaggactgctacatgtaataaagatgttttcaaatccagatagtgaaagaattttgtgagtctggttaattaatatgtgttttgggtctctagggggttcctgggtggagttccttgtaacccctctggctcaagtgagctcagtgtacaaatctacaatcgagatccagcccctctttgacaaccaggcaggtaagatcggaggaggtaaagaatctgcttaggtttgttcagatgatattgcaagatcagaatcagaaactctgagagcagggtttatgtatatcagataaattagtgtatgatcactagttctataaaagcagttagccaaggtttcactaaagtgttatatttgaaataatgttagagagctagtttttaaatttcagggacatgtgtcccataaaatgagatactccaggaactgatttttgtaagtctcaaaagaaaaacttatttttcattttagaatctattatgttatccaaaaaagcagatagaatacttctccagtcaactgaatgcttttggtttatatttctattcataatacaccaaaataggattaaagaagtgcccccaagcacctagcttgggtcagctgtggtctggggtttttattttataggttgaattattatatgttgggaatacttattaagtgtggcatgtgaytccaggtcacaagttaagattaagaaacagccggcttgtgcttcctggcaacttggtatactaaaatactgcatatggctaaagtggagtggtgcctcttcatttctgtagaaattagctgttggacatctgttttgaacccctagtgtgtgctagaattatgttttctcaaggcattacagctgagggcataataaatccttgatgagaatttcatgctcctaaaatactaccgtatgacttgctttatataccctggtcaggttttctccttatttttgctttttgggaaaggcagctgttggatgttcatagattgtactttaagccattggaatcctcacttgacttacttgagatccaaatcccagagtggcaagcccagtgagtctatttgacttgctcctcatttcccattggttggcctatcgctaacctccctaacaaaaaaccaacaactttaacctcaaaaaaaacccgggtctgtttaggtccttccctgttccactcctgagattttccgacccctgcagtgtgaagtggccaagcctttgcctgtgggcttcctttctctccagaccaccttgaatttgctgatggagagrccagctttcttgatcagttgggtgacatacggacttaaggaggagtcgcagcctcaggcctgctgagtcctgtttaagttcctgttttacgctctcttgtgatactttcatggatgcataagaggagttgcagattaagtgatgscctccttagtgaggttccacctcagtgaatgaatgattttaattaaagagtgattaatataatcataagaatccagactgtagatccactatgtcctcagtgtctcagcaattcctttgcacagcccttagaccaaaaggaaaacttaagtttctaattattaagtaggtaaagtcaaataatttaagaagtatttatgacccaacaacttagcagacatttgaaacaataatgtcattgaaagacatacattgaaagaaataatccttatttcctccatcattaaataatcattactgttgacaatggcatgtggtgatgtacctgtttacctgttgagcgctgcacgacttctcgaactttagggtaagcatagctgctgccttgctcatttcctattccacattgattttcacaaggcatttgctttttatcatcaccgccacgagagctcagcttcacaacgacatatcatgaaaagggatgcagtgtgatttattgttgaaactgtgagctacttccagctagtattttgcactgttacctgagagacattgctgtatttccctcaaaaattaaaaaaatttctgctgcagcatccccagggcacctgcacacccagttgggaaccacaagtctgatggcatgcattactcagaggtgtccagtcttgttttgtttttccaacagttaagatgtttcacataatcctatgctaggtggagtgtgagatgcaattgttttatacttgctagtcaacacagtggtttcacattaatacatcacaaccatcccatgaggtggctggttctcattttcctgatcccactcatgaaaagcaggggctcatggacttcctttccctgcttaaatggtcartgtgtggtgcacaggaaaatgtcatactcaggcctttaactgtggctcccaggttgttttctccaactatatttgatctgtggttctgtggagtttcaaaacaaaatgggaaatcacttttgtgtagccagttacagttgtggrctgcctctgccaaaaagatcagcccttggctttaagtagcagttgcacaaactaggcgggaatagatacagcttaatatcccttcatgttaaaattgcttatgtggagttgactagaggcttcattgataagcagtgttaaagctccagtaactttcttttaggccacattaaagtgaatctggcatctgctacaagggagatggtgattctgttctattctgctctcagttgcctaaaagattatacttggaggctatcttttaagttctgaagcatgcctattaaataatggttgaagaacctgagaatatttagcaagcagcaacagagctttgggaggaaagatgtgatagctgtttttatatttcagccttccatatatttgtaagagaagttagacttttcctatttagccccaaatgacagagttagtactcttaagtatgctcagtaacaacaaaaaagtaataataatttgcagtggtcgcacctactgcaggaggcatcgaattgctgccattgcaaacccttgtgaaaatgctaaaagggatatcagattgtgcaacccagctcctaaagtcctttcattatgtttttctaactttctaatttttatctttgtcactgagcaaaggctttttacatggttctacattcagtttgctgtctcgccaaatgcatttctttctcaagttggtagaatgagatgtcaggtagcacttcagttttctgtttggaacaggtatctttgtgggtagagaccatctaggagctgttgaagttcttactgggcaaatctttgagtgtccattctagctgatgcgtgaagtccatatgtgggcgtggccagtagacctctgtgaaatccagaaaaatcttttactttgtgtttattctgtgtgtgtggtggcgtggggsgggggtggtgggggggcaagtgctgtttaagtgatccaaaagcttacctgtaaatcccgcaaatcaagcatcagcttaccaattcrgaatgtagagtcactcagtcctgagatgctagtctttgcttcgtgttgctgtgttttgtggtctacactctgaataagcacttcattatcatgaatacccctctgctttagaccccacagatttatactggctcctcttcccagacgacttgaggacttaggaaagcttggccgccatcttggattccttgtggaaagaacccttcctatgcaggggctgatcttcttgccccctttagggctgtgcttctgcatggctcaacaaggggagacttccactccctgactcccatcctagatcctctgccttggctgcccttcaaacacagcttcattttctggggcggatgtagggaagtcttttttctttgctcttaccccagccttctttctgcactttatcatgccctgccaatttcctttcccttctgtaaaagcagattttacagaaaattcccttgccagccctaggttgtatatgatgtaccataaagcaaaaggaggtctgtgctggttttctgatttattggaaagacatttccgaagacccctgtaactagactgacttcctttatcattcagcagggcacacgtacccccgaggagtttgtgcagatgcctcccacttagcagagtgattacaaataggctgtgttttaagttagttttctgttgtatatttcatctgagaagttggcaaatacttgaaagccacaagctactgttttctgaaagcttctttgcacatgagcataaaatggatgtattgaatttggagatcgtccagtaactgtccttttaatgcagcggaatgtagattacagctgtttcctctggaaagacatgcatagctctgatttccctctcttttctcacagagtgtctcctctgcagaagtctgagatagtggatgtggtgaagaagcgggtgaaggccatcaccctcgccatcggagacggcgccaacgatgtcgggatgatccagacagcccacgtgggtgtgggaatcagtgggaatgaaggcatgcaggccaccaacaactcggattacgccatcgcacaggtcagcagcttgggcgtccagctgccctgtcctgttgagagatgatagctgggcatgaggacctggcgtttaaccttcagtgcatctccaaacctctgccacccctcttgaggttgctgtctagatgaaaccccggggatatttggaattctctgtagttgtgatcttgtgcagtttggaggccctgtcctgctgattggatttctctggccagctatggggttggccaagctgctctgtgatccaggcaaggtgctgctcctggcagataggtctctgatcttgctaataataacctctcaccttcagcttctrcatctgctgcatggctttttctgctgcattgcctgctgaagcacagctgtgctcatgacagcctttctctataatcctgttccagtctcactcctcccaaaggtgytgggacaccccctggctaggtgcttaaggtcagggagaagcagtgatttacagctgtcgccttctctgtagttatgagaggggtgctgtccaggaccacccctgtgaggtgaattgccaagagcacgagctgggtttgggccataatgaccccatggtcagtagcaatcagcctcctgcagttaggccaagttcagtccagcggaggctgatccgagcctcgcatgccagggctcctgatgtgctgtactgcactggtggcctgaggatgaaagaaaggtccactccgtaatgatagcccaaaggtgaaggaagatagccaatttcctaacccrtagggtgcatatctgagaccacctttgcaaaattatgactgagacagtggaagagatstaacttaaccgactccatcttgcttctaacctccaagctgtccttgttcatttctgggcgtaagctgaactaactttgagagaaactcagtttatactttatagtttaaacaaagatggtaacagccctttcccaaagcagacctccttgcctggggactagactaacattagccacaggatttgaaatatggcttaggagtcatgcagctggaggctacgagattctgaccttcttaaactgctcctaagatcagtgcttgagatattttgcagaccctgcacttgatggatcagctggcaccactcagatcaataaactggctcatctaatcttgtggctccccaccacccaggaactgactgagctcaagaagacagctttgactccctatgatttcttccctgactgatcagcattcccggctcactggctacccccacccaccaagttatccttaaaaactctgctccccgaatgcttggggagactgatttgagtaataataaaactccagtctccctcacagccggctctgcatgaattactctttctctactgcagttcttctgtcttgatgaatcggctctgtctaggcagtgggcaaggtgaatcccttgggcggttacatatctagatgatttggcctgctggatcacccagaaaacctagacatcacagcgaatgcagggcctgtccctctgtctccagattgcgatacatcatgaatagatgcctgctcatcggctgggtagcaggaattcccttgtgtttctacggtgttgaggtgtttgaagaatgtgttcaccttaatcacatgaacacaaggaaaaatggctacacaccccttcaacctgaaatcaggtgctgcatataaaatgtgaaggagcttcctatagccccagggcttcaggccagtcctttgcagttctggggctccacctctccaaagcgggggctctgtgttagatcacctctcaggtttcttctcagctcacagttctgcagatgcagggagaaattacaaaatcctcctggctctgaaaagtgcatgcaatcaatcttcttcctttgctgatttcaaataaatcctcaagataatttctgaagtaggtaagagaaggaatcttgactttataggtgggaaaaccggggttccttcgtatcaggtgacttacatcaggtccaagcaagcaagcatcttggggtcagaaaacaacggacctgagtgtgaacttgggggccggccccacgcacacctgcctgtttactttcctgagtcaaatgctttgaggcctgtgggactcgcacttcctgtagtctgtcagcaactatagatgttatacaccccagcattattaaatacttgagttataacatcatatggctggaagggatcttaagaggtttcctaggagttccaggcaaatatttgtctgtctttttctttaaaatgtctagggaagggagatcccatgacctgctttactggaactgcataggaataggatgtgttatccagagcaattgctctcttcaaattaaaagtgtcaaagaagggtggagcagggagcgagkctttaaaacgccattgggggttttcttgcccctccagcatcatagtcacttctgccaaaggaactgatgcagcccacatgtttctgtgcaccctcatttctcctgtccatggtcctattgccgattaggtggggatgctgttacttcagggcaggttcctgctaacctcataacctttgcaccaaccaacatgctgcctctaccttagtcaccatgccagaaaagccacagcttgatgaatttctttgcctctcttgaaatggtaaacatctctggttgtttatcgccttgggctttatctgttcattttaatgtggakgcattttttttattacgcttcggaggaagtaccctcagggttattatactcagaaagaaaaaaatgttagctcaaagacttaccttgggaaagttacgaagtgggcaaagctctggttctatttcttccctgcctaccttgtgcttttatgcacatgggcagcccaagaccgagcgccgtcctttttcagctgccttgtcctgagcaaccttgctgccgtcgctgagtcatggtgctcccctagcccttggctttccattctcctcgggagaatcattcctgccccctgccctcctaatgttttcagaacgacctcatgatgacagcattttgatttagaatatacatttttttttcctgaaaacaaatcactgtagtgctcaagttgaggcattcaggatgactcaagcagatgttttctgtgcccattgaagtttaacatcagggggtcccsgtcaaatacaaacttcctttttatttgtttagctagttattttatgatttcccattcccctttggaatccttaatgagcctttatggggagttttatttttccatgtgcacctacttctgccacttcgaagcgatgatttagattccgaatgcgtggtgagccccgcgccttcccctcacctcctggaagaacatgctgagctgggactccacctaggatggagtcctttctttagtgctaatggagattattatgcagtttcctcctgaaaattttttgtttaagtattgtattttcagtctggtcatttcttttctattgagagttacatttaattaattaattaattaattawttaatttatttatttattattttttttattcagagtttcactcatgttgcccaggctggagtgcagtggctggatctcggctcactgcagcctccgcctccgcctcctgggttcaagtgattgtcctgcctcagcctcctgagtagctgggattacaggcacccaacaccacgtctgactactttttggatttttagcagagacggcgtttcaccacgttggccagactggtcttgaactcctggccttaggtgatctgcccgccttggcctcccaaagtgctgggattacaggtgtgagccactgtgcccagctgagagttacgtttaatttccaaagtcatctgaaattaataagaagtatataactgcaaaagaatttctaatgtcctgggcattctcaatacagcctgcttgtctctcctagtagtgtaataggtttcaagcttgtggacttactgacactctgacttagaacaggaggcattaaggttttcatgcaagggaactaagagggaactcaaatccagtgtaaggcatatcaaatgtgtagaaacgtgatgtaaacagggttgcagctaacggcacatttatgccagagcaggacaccaygcaccagaccagagaaactcgtttccctccctccagcgcaaggtttacactttttgggacctttatgaaacggcacacagaaggcaaagccaggctaaggggtggctgaggagatacgatctgagtggtgtccagagaccccctcccccagtgaggattcctgaatgttactggattatctatggctccaactcaaaccacaggagccatcacatcactcccagcttgggacccaccagcagcccctgactgcatagcactctggccagaggggctctgtactggttggaggcaaaaaaggagaagacaaaatgggtcaagaagtggaggcaaagtgtgtgtgtgtcttagtatatctatgtgtacatgtgtatttgtatgagtatctatgtatgtgtgtctgtgtgtatgtgtgtctctgtgtatctctgtcctgtgtgccactatctctgtgtctaggtgtgtgtgtctgcctgtatgtgtctgtttatctgtgcctgttatgtgtctctgtgtatctatgtgtgtacatccgtgtgtgtctatatgtgtgtgtaactttttaaactacgcagttgttagtggaagtagtgtatgtgcacctgtgtgtacttttcttttaaacaagactgtattgtgtgagtgtccctgtcccttgctctttttgtcactgaaaaaatctgtgtttgcttagagatatctgacttccactgtacttttctttcagtttagtagctcacctttgtttaataattaatccctattgcagcactattcataatagcaaagacatggaatcaacccaaatgtccatccgtgctagactggataaagaaaatgcaatacacatacaccatggaatactatgcagccataaaaaggaatgagatcatatcctttgcagagacttggatggagctggaaaccattatcctcagcaaactaacacaggaacagaaaaccaaacaccacatgtcctcacttataagtgggagctgaacaatgagaacacatggacacagggaggggaacaccacacactggggcctgttggggaggcagggggagggagggcatcagattaaatactaatgcatccagaccttgaaacctaggtgacgggttgataactgcagcaaaccatcatggcaaatgtttacttatgtaataaaccttcacatcctgcacatgtatcctggaacttaaaattcaattacaaaaaagcatttgtttaaatagaatttcataagaataacaattaggagtccagcagtatgtttagggaaaataataataatgtagtttcaagaaggattttacttgttctcactgggcctgaaagctctgtcttcagagaatggttttctgagattcctgcggaatctggtttcctctrcctacattatctgacttctgttcataaggacattctgtttgtgacttttattcctcaatgatgggctcttctgagctttgtaattttcctttttcagttttcctacttagagaagcttctgttggttcatggagcctggagctacaaccgggtgaccaagtgcatcttgtactgcttctataagaacgtggtcctgtatattattgaggtaagaaggggtattttttttccttgaagagaaagttcttttaagaggatatcttgaggtatttaaagtcatttcaaggcaggattttgttcatgtaaaattaaaagatgctgctgtgactttctacagcctgggtcacatgtaagctcctgtgaagctgggctcgccattctggtctagatcctcatgctggatgaccaaagcgggcatctgcagcctttcttacctacccggacatgccttcctcctagctctcctcctgtgttcctctttgccatgcctcttcctctgtgtccttggctggggtagaatcttgctaatactcacagcccttccacaggggtcagatcctatcagcagaggcctacaccttgccaggtgatcgctgaggtgttgctggaatgaacaagggggcctgatttctgccttatttctcacagactctgcaagtttcctagcatccattcactgcttctgggatacttggacactggtacttacgtgggaagggtgtgggagtgaggggatagtggggagtaaaacagcaaggtcattgacaatattgcagtgagttcatattctgttgtcagacaattttccaagatgctgattcagttaccagtaaaacaaacgtgcctgctagaggggtgggcccaggaagaaatggaaaagtcacttcatgtttgctattagtgggattacagccctgctataaagggggtggcttttgaggccatcatgactaatcgtttccaactatgtttgtctatggaggaaggcaatgttaattatggtgttttaatgcttcattctactatgggttattttatatctgatttcttgactcttagtaaaaataataagcaaggaagaaatcaactttttctgatgtaagctctgacaatactgggttcaaataactattaataacaagtgccttgctaaggtagctgtaactaactacttctttaccyggttgtctaatctttcctactcaatcattcaggtcaaacatataagttcatgtcacacatctggtaactaaactactaaagagtgatttccccaagttgtgcaggttgttcatggcccaagacaaccgggccaaaagagtaaatgaagcagaaacataacctgtgctacttcattcatctcttcagctgcccggagcccaactggaaacagcaatgcatttttctaagttgcacaagggccagcctattcgccaagacgtgtgcacttgcagagaggatgcctcttctagttcacacaaaagccccttgtgggctggggagcagccctgattcttaaggaatgttccaagcaatcaaaagggatctggttaaagtcctgaaactgacccattcttcctaatttgaatcttttgtgggaggtgccctgtctgcttaagtgtatttccctaggaagaaaatacacagcagaggcttgagagatttggtgatataattgacgttttattcagtatagtgaggttaaaatcaataatttaaaaaattattcacaatttgtctgctggtcttgtgctgtaatattcaactcagttcactctgggtgagaacttgtagatattggtgtaagaactttagtggtttctctcttctcttatttttacaattcccttttggcacttaaaggtgtttgtccccctcctgctcctacatttttctgtgtctgtggtaggagtcactcctcaacgtcactcaaggtcatggacgatagtgtaaagaggtatcgtagggtcayggaccatcgtgtaaaagggtattagaatctctgtttcttcgtgctatcccaggcttcccagcattttgtgctcctgtagctgctggctttcacggtttcttaataatctcgttttcttcacaatcagcaaattacagatagtctagacttcttatcaagacattctgcgtggagctcccaatctttcacttttcagatcgtcccctagggccccttcttagtcatttacacctactatcttgctggtgtttttttttttacttcaagtgggctgagtctgagaagagtgcaattttagtctgcctgaaaaattctatttggaaggaggccctgaaagtgccacatgcgtgcctcaaattaatatatttcaattgtagctgagcagcagttgttaaatggtcttttgtaaacagccttttaaacattctttataaagttaaagaaaatgttaaagtctgcaccactccatgcccaattttctatttagtatttctcggggatattaatttgaaaaccaagaaagcaaaatccttgaccgagcctatatggttagagccttgactcaggcagagcctacctaccactgccaaattacttctttcgcatcaacatgcacttcaaatatagttttaaaaataggaaagtactacttacttgcatgcaattttagtgtgttgtgaactgtaagatcaaagattattgtaagttgatttgcttatttgcaaagaatacttttttgttctaaaggtaacccttataattaattacttaagtaagaataaattaaatacattacttatttatcttaaatggttttcttgtaactcaaggagcgattctttacaatagccaatatgttgtcatctcagatgccctctaagatacataactactaatcacttaaaaatgtagtctaaaggcaatttggcaaattaaaaaaaaatacacatgtgtgcatgcacacacacattttatggccttagccattattatgaggatcattataggacttgaattgccaataaagattgtagggaagaactgtaagcctgtgatgtaatgcagtctactcacttggcatactaacctataaaagtggatttttctgtgtaaggaacacatggatgtattcatgttgctatatggaacactaactgaaagttccctccactctcgcccccaaacctccttccgtattatctgtcctgacctttttctctgtaggtatggagatatttatrtatacaaacaaatcaaggattttagataaatgccatcatgctgtgcagagccttctgcaactcatttcacctgacagtgtattctggagaccattcccagttactatgtatagacccagggcatgccatttcacaggggggtttcctgcaatctattcagccattccctgcactgataaacattccacttctctccagtttcaacccccaaaagccttgtggaataacagctttctcactagcccataaatattccacccaaatgatattgatctaattagaccatttttaccacagttccttgaacataacacatgcttacgtatttttatttatacaacaacaagttatttgttgctgacaaatcttaattaatgcttgttgagtgtgccgcataaaattcaagccaaaataactattggtttgagggatttaaaaactaggaacaaaattatgcaatacatggtttcatgttagccctattaataggtaaaactgaaaatactacaacctgtgcctccatcctccctgcagctgccttaatttagtactgttttctgggttgattacaaaaaccgctagtttcacttccttgaccatctccgctgtagctaggatacgatttctgaaacatacgtctgatcaattccagtgtctggcacaatgtctggaatggaggtgcttgaaaatgctggcaatgaaagagtgatgaatgctgctgcttcctgcagccccttcccaggctccctgtgccttctgatgaaatgcccatctccgtcccgtcacctgcccctctgcgatctgggttccaactgtcaccagcctcctctgccactgtatcctccttactttatttgtaatcagtgttactcaagtatgattgatgtacagcaagataaacactttttaagtgttccattctatgaattaaaactgggtttttatcattagaaacacactgaggattttgtctgtctcccatagacggtgaccagaatgtctcagagagctctggagacaaacagatggtggtgatggttgcacaaggctgggcactggaactgcagtgcaagtgtgaacatgggaccacacacttaaaaatggctatggtggcagactttgttatctatattgtacaatcattttaagatgctaaaaaaaaaaaaaagagaaaaatgtcacaaacacttggctgctttcatcgccttgagagagacaaaaatgtataaggacagattgtatgctttggcgagcttattgaaggtttgaaaaacaaattttacccatagttttgttttgcattaaactaattaaatgctatgtttcatggtcgtggccagatggaccatatttctcagaaggtaaaatcctgttgttgtctagaatgctcagagcttcagagccttgcagggcagccagctgggagtggggttggggtgggtggggcaggggggcggtgtgtattccctgtgtgtctgcactgggggtgggaatgggatgaaattagcaaaagcaaggagatagagcagggtaaagatatgtgagtgaccagggaagggcatctgaatggctcagtcggagtagtattgccattggaagctgggattcctttttttttcttctctttttgcaatagtcaaattacatagtaaatgtgatttaggaaaatttgtctatcaatatgtagggcagatggcaagcagagaacttacatgtaattttgtagttttaagcctggggcatagatcatgccattatgtaactatctctccatgtaatttagaagcagaaagcaaagactgatttttaaaactctttgatgttgacaatgggaggaatttgccttaaatgtaaagattaggggtaaagaggttaggaaaggattcctataaatttttgaagtcttgactgacctctgtgtggtatctcctaaggagagggattgaataagttctttaaagctcctacactatttaacaaactatgagttagttgttcagggttttcttaatagagtacagtttcaaagcacagcagcatcagcattttaagcatgtattaggtggcatatgcatttgtttgtggactttctgaacctctgggaaaaggttatttggaatagataacatttttagtggccataaaattcaaatagaaaaataatagggacattacttgaacttaacctatatttcgaamaattatcatagggatctcttgtaaactttggtataacataaggaagatatgccaaattatttttgaaatagagatgagtctgaaatcataatggtgattagttggtggttcctaatacaaagaataaccataacatatgtatattgatgtgaaaaagtggatattatatacagcttggagtctacttatttttggcaacacatacaagaaattttagtgttttcttgggggtgattaaactgataggggataaaggccaggaaatgagatgcatatttagcaggaaggtctggaaatactatcactgaaatagaaatagatattctaagaccacagcaatttggggaccaaatgaaactgaaccgcagaatttagttgacagctgtttaaaaatttgtcaatatctgacaagcctaaaacaagcaaacaaacctttattatactgcagcagagattcccaacctttctggcaccagacactggtttcagggaagacagtttttccacagagggcatggctttgggatgattcaagcacagtacatttatcattagatcctcataaggagcgtgcaaactagatcccttgcatgcgtgytttacaatagggttcatactcctgtgagaatctaatgctgccactgatctgacaggaggcggagcttaggcaatattgcccgctagccctccgctcacctcctgctatgtggtcgggtttgcaacagccaccgaccagcaccagtccagtccgtggcccaggggttggggatccctgtactacaggatatgagaaaaggccttactggcagtttgttttctgtgtcttcgaattctcacgcctgtaatcccagcactttgggaggccgaggtgggtggatcacgaggtcaggagatcgagaccatcctggctaacatggtgaaacccygtctctactaaaaaaacacaaaaaattagctgggcatggtggcaggtgcctgtagtcccagctactcgggaggctgaggcaggagaatgacgtgaacctgggaggcggaacttgcagtgagcggaagccgagatcgtgccactgcactccagcctgggtgacagagtgagactgcgtctcaaaaaaaaaagtgaaatgaattatggttcatgtataaattgccattttaatccaaaacgttttcagtagatgaatactttgattttttaaaattgttttgcaaacatatatttccttttgctgttttacagctttatttttttctgttggacctgtgagagattttgttttatcatcaattttttattattgtttgaaaataatcattatttttcaaacttttttttgtttgttttttgagatggagtctcactctgtcacccaggctggaatgcagtagtgcagtgttggctcactgcaacctccgccttccaggttcaagcgattctcctacctcagcctcccaagtaactggaattacaggagtgcaccaccacactcagctaatattttttgtatttttagtagagacaagttttcaccgtgttggacaggctggtctcaaactcctgacctcaagtgatccacccgcctcggcctcctgagctgttgagattactacaggcgtgacccctttgcccgaccttcaaacattgttagaaaaaaatcatatctaaattaccccttctttccattattatgtcattagcttcttgtttggggagccttaattaaatatgttaatgcacggagatgctatgcacttggtcaaccctattacaaattggtatctatgtcctactagtaacccatgcttcattataaatgataaaagaagtcactggctttgggctggatttcattttaaatgttagaatcaacagagagtagatgttttaaaccatgatcaaaatttcatccagtgacttttcccctcttgcatataatgcatgacttaactatacctcaaaacaatgtgtttcrtttgggggacacaagaaatttcattacacggtaaaagataaaatcctaatagctaagctttcctcttctgtcctgtgcatctgccttggcagagttagctttatgtttcctgttacagcttttatttgaaggaatagattggcagctatgagtgcggtgttaaaatgttaataagtaaaaggcaaatttaaaaatatcattgacatatggacctttctgtaaaggctgtggcttcatcaagtatggaaccatccattttctattaaaagctttaataagtgttgaccacctactccaaggcaggcagaatgctgagactgaggtactgggacatgctgcacagagttccccatctaatacaggttggggaagaggtgagtacagtcatcccttagtatccacagggtactggttccaggatacaccctccccaccttcagatgccaaaatttgtggatactcaagtcccttatataaaatagtgtagtatttgcatataatctatgcacatcctcttgtatactttacatcatctataaattacttaaatacctaatgcattgtaaatgctatgtaaatagttgttacactgcatcagttttgttttgttttgttttgtttttttgagacggagtttcactcttgttgccaggctggagtgcaatggcgtgatctcgactcactgcaagcyccgcctcctgggttcacttgattctcttgcctcagcctcccgagtagctgggattacaggcacgtgccaccgcacctggctaattttttgtatttttaggagagacagggtttcaccatgttggccaggctgatctcgaactcctgacctcaggtgatccacatgcctcagcctcccaaagtgctgggattacaggcgttagccacctcttctggcccagtttttaaatatgtactattttttattcttgtattgatatttttactgtttttctttcctgaatatttttttttcctgtggttgtttgaatctgtggagacggagagcctggctgtacagcgtaagtgctctgatggctgtgtgcacaaagacctctgcatgcacaggcctggtgccaaccccatcccaagagcatctgggcttacagtccatgattacctgggtggtccctatcttgtgctgacaattgttgagtaataactgcaactgtaatatgttggtgggaaaactacttagagaagtttcccattggacaattgaaaaatgggaattaactagaaatgtaaacattctgaattctgctttccttgcctcatgcatgctcattctccaagtcaagaactcttgggtcatggggacaagaggaacaggacagtccctcctcttggaatcaaatagagaatgcagataagaattcccacaattataatatggtgtggtggggctggcttagaggaagacagcttgcaatgagaactgttagaagtggtgctttacaggcgtggtagggtaagggcctcaggatcccaggatgaaacgagttaagacctgaaggatgagtagcagctgatcaggtgaaggggtgggaggagagggtcagggaatgtgccaaagagagcccagcacctgcctttcccatccatgttctctgtctgttccagctctgtgataaatgtcagcaattagcccagcccttagtacctaacagagaagaaatgcattatgctgcggttttatatttcagtcggaagatggctggagaactagttaaacacgtgcctaggaatgttctctgaaaggccagctggttgctgctggttgatagagctgggagtttattggcaaaaggtggagagggggtgagaggacagggaagaggtaggtattaagccagagaaatactagcagtctggagggattccctacaagatacacaatcactttgaactttataaaaatagactcttactgccctttccatgtgacaatctatgctttttttatgatgtttttgcagctgccctacctaaaaggatcattataaagatccagcactaaaaaaatgtttttaggcattgatggtttaaaaatggagtctttggaactctataaaatgttttaatctccttggaataaaaaaaaaatgcaagtccagaaacagagcccatgcaaagaacttccagggctcacgtgaactttgagaggtcagccctgtgctggagctgtgcttcgtagcccgggtgcactctcccaccctacctgttactgtggcagaagtgatgagaatccagcccacttcacctcacgaattccaatttgcttcccttccttaaaggcctcttgcattcagagacagcacccacatagtttagtactgattgcaggcaaggggtgaatgttacttttatttttccaaattggttatgacttccctaagggcaaataatccattgactacatttcagtagaggcacacacgtaagaatcttttggacattttggtttttgggttttgtttgtttttttagaatgtaagagaagatttcctaagtagcatattatttgtatttccttttaggaaatgcttttcttatccaactgaaatctttcccggtgtaattttcatgcagagaactatacccttcaagtactagaagatacatttctttttttttcttttgtttgagaaggagtctcgcgctgtcacccaggctggagtgcaatggcgtgatctcagctcactgcaacctctgcctcctgggttcaagcgattctcctgcctcagcctcctgagtggctgggattacaggtgcatgccaccacgcccggctaatttttgttttttaatagagatggggtttcaccatgttggtcaggctggtctcaaactcctagcctcatgatctgcctgcctcggcctcccaaagtgccgggattacaggcatgagccacacgtggcctacatttctattatattgtgtttaaccctatcttttgaaagaataaacaataattttggctgggtgtggtggctcatgcctgtaatcccagcactttgggaggctgaggtgggcagatcacctgaggtcaggagttcaagaccagcctggccaacatggtgaaaccctgtctgtactaaaaatacaaaaagttaaccggacatgggggcacacacctgtaatctcagctactcgggaggctgaggcaggagaatcacttgaacccatgaggcagaggctgcaataagctgagagtgagactccttctcaaaaaataataataataataattttgattgaattctttaaacacatttctaccttaatagaacttctattttggctgaaattctcaaagagcctttcattcttatgtagttgactttaccaattaggtttttccttgctaagttttcttttcattttagtttgtgttgctctcatttttttctttctgttctttcttttgccagtagagacatagttgtctaaaacttttgaaatcagatttcgtttaagttttagaactacttctgtgacaatgtctgagcacagagccactgatcgtgcctttctattcatttttctctctctatacccaaatagcaccattctaactggatttcagtaataactgctttagggtgatagaaagcccaagatcaagaatggagacttcatgtataggctgtagaaaagtcagtgggccaacagaaagagcaccttctgtagcaaatgaggaagaagataaaggaaggaggacacgggaattcgtgacgtatcactaccatgatggaaaatgatcctcatgtttgacaatcatacatttgcttgtagaggatcaagagcaggatatgttcccttctgctccttttctctaagctggtcagccttaggtgtgagatgtagattttgaccctcggttttaaaacacccttatgtatgcaagtaaaatgtaattatttatgagaatgcaattcgtcattttttttcttggacttgggagtttgttgccttttacctttagttgaaatagcttctatttaaaagtatcacatcaggaaactcatctctcttctggtaaatgtctgtactttcaagtggtaaataatctccattgcgttctaacgatacatctgagctgcgatattggttttccagcagatgtcctaagagtttagaatgcccttaacttctcagttccaatgtcctggcagatcaagtggactatttaaagatggatcaagaataggagtkatatacacgccttcttgcctggtttttcaaacagagagaaggcaaagtagattcatcctattaaatactacatgtgcctcaagagcatgtcagtgaaatattgatcaaaatattgtcctcttttacccaggaattataggatgaagtttatttttattcgtttaattaaactgcatgttgttttaataatcttttttgtcagtcccttgcccatttgaaagttgcttttcttaacatgaactgttaactagaagcttttacttccctgttagttccaccttagaggttgcctttattctactgaaagtgcttatttgtatagtatattattttattttttaaaaataaggtataatttacacggagtaaaattaaccctttttaatgcacaattctatgatttttttttttttttttttgagacagagtttcactctggttgcccaggctggagtgcagtggtggatctcagctcactgcaacctctgcctcctgggtttaagcgattctcctgcctcagcctccccagtagctgggattacaggtgtccaccaccatacccggctaattttttaaaaaattatctttagtaggtcactcaggacttgcttagaaacggggttttgccattttggctaggcttgtctcaaactcttggcctcaagtgatccacctgccttggcctcccaaagtgctgggattacaggcatgagccaccgtccccagccatagtactatgactcttgacaaacacataaaccagtgccatcaccaggaagtgggcttgcttcctactacacccagataagaacagtatgacactggctccaaaaattccccagtctcctctgtagttaacccctgtccccctcaggggactcagwtcctggcaacagctggtctgttttctgacctatagttttgcatttctcagaatgctgtatgaatggaattgtacagtattatgaccctctgattccaatttcttctactcaatataatgcatctgagattcatccatgtcgttggatcagtaatttattgcttttattgctgagtggtattccattgcatgggtgtttcacagtttattcattcacctgttgaaggacatttgggccgtttcctaattttggtgattatgaataatgcctctgtacacactcattttaggttttagtgtaaaggtagtttccattttacttggcaaataccttaaaaaatggggatcagtttcatttccttattcagcgttgctgcatggacttatttgcctctcctcctcactttggttacatgtgggaaaagtcaagcaaaaacttggcccaggggcctctggttccataacaccattggccgggcctctctgcctcagggcctctccggcataggtktcccatggttggggagtcctggaagtccagctttggggtctgggaaccagggaaccagggatcagaaagtcactggactccagggactatatcatagtttaaagaagggcttgagtaaaatgtgaccagaatagcattgacagtaatcaagcaagacgatggtagaagacggaggagttggcctggtgaccaatgcctgccagccctttctgcrcagaagaaatgccaggacccacagacatggctttccctggaaccactcctctgttggtggtctcactggtgcctgccrctagcagagagcagcatggttacaggtgaggccccrcacccaggccagctgtgggacctagtttccagctcaagccgtgaaaacttggctgcacctcctgacccatctcagcctcattatcctttcctgtaaagtgaggaaaatagaagtacatacatcaaaaagtttatgagggtgaagtaaaatcatacaggacaacctttagcaaagtgccgaccacagagtgagccttcctctttgccatttgcagtattttaaggtatttaacatcgatagaccatacaattatggcattgttaagagctggaagctcttctagtctgttgttccccaaccacagggttttcctatatgagtttacttcatccccacaaaccttctgatgcatgtccttctgttttcctcactttatagaagaagacactgaggccgagaggggttagaaggtgtgcccacgtttgcatggcttgagctagaagccctgtcttccaggtggcctggctgcaaccctcctaatccagaatcttccccacaacagcatggcagtcactgatgctctcctggaaaccttctggggaaggggctaagtcttcccttgctctaccttaaagacagctctaccttaaacatggctgttatatattgcaactatatatcattaccatagagcaaaatcaccatgattacatctgttagattaactcttgagtgggcttgcttcctgtttgtgcattcagaataattggtgcgctaagaatcaattgtatttcagcagtgtggtcaccagtttacaactgagaaatcattctctgcacatcatctgtggcctcatcttctcccctgacccaaattggtatttatagatttcattaattagcctagaatcccagaagctcagatgctttgcttgagttacatgaagagcaggtaaatgaaacatgaaaactgatgtacttgtttctttaaaactcatgccccagggtgttgagaaactcagattctaaacagaaatagtgaacgctggttgaattgaggatggatgtgtggtccatggtatttcaaaatcatagatatatagatcttttaaatgacaataatgttaactgtgtcaatgcttggaaataatggaattatgcttggaattaagttaaaattcagtataaaataatagcatatgcagtcactacaatttgtaaaatattaaggatcagaagacaaaacacaataatgtaattaacttgtttcgaattttgtaaaatgattttattgcaaagttagctaaaaataaaactctagtgtttaaacaaaacaaaaccaraaaaccccactactgataaacaacctcagcaaagtctcaggatataaattcattgtacaaaaatcactagcattcctatacaccaacaacagtcaagtcaagagtcaaatcgggaaaacaatgtcattcacaaatgccacaaaaagaattaagtacttaggtaactagggaggtgaaaggcctctacagtgagaaatacaaaacgctgctcaaaaaaatcagagatgacacaaacaaatggaaaaacattccatgttcatggataggaagaatcagtaaaatggccatagtgcccaaagcaatttatagattctatgctattcctgtcaaacgacaagtgacattcttcatagtactagaaaaaacttttaaaattcatatgaaacaaaaagaaatgagccccaatagccaaggcaatcctaagcaaaaagagcgaagctggatgcatcagtgttacctgacttcaaactatgctgcagggctacagtaacccaaacagcatggtactggtacaaaaacaggcacaaagaccaagggaacagaatagagaacccagaaataagaccacatacctacaaccatctgatcttccacaaagctggcaaaagaaatggagaaaggactcactattctataaatggtgctgggataactggttagtcatatgcagaagattgaaactgtaccattccttacatcatatacaaaaatcaactcaagatggattaaagatttaaatgtaaaacccaaagctataaaaaccctgaaagataacccaggcaataccattctggacataggaatgggtaaagatttcatgatgaagatggcaaaagcaattgcaacaaaagcaaaaattgacaaatgggatctaactaaactaaagacctctgcacagcaaaagaacctatctacagagtaaatagacaacctacagaacaggaaaaaatgtttgcaarctatataggtccaaaggtctaatatctagcatctataaggaacttagacaaatttacaggaaaaaaagaacaaccccattaaaaagtgggtaggctgggcgcagtggctcatgcttgtaattccagcactttgggaggcaggcagattgcttgagcccaggagtttgagaccagcctgggaaacatggcaaaaccctgtctctrtagaaaaaaaaaaaagtccaaaaattagctgggcatggtggtgcatgcccatagtcccagccacttgggaggctgaggtgggaggatcgcttgagcctgagaggttgaggtgtggtgagctgtgattgcaacattgtactccagcctgggcaacaaagtgagaccttgtctcaaaaaaaaaaaaaaaataagcaaagaacataaacagacacttttcaaaagaagacatacacagtggccaacaagcwtacaaaataaagctcaacatcacagatcattagagaaatgaaaaatcaaaatgacagtgaaataccatctgacaccagtcagaatggctattattaaaaagtcaaaaaataacagatgttggcgaggtggtggagaaaaaggaatgcttatacactgttggtgggagtgtaattagttcaaccattgtggaaaaacagtgtgatgatttcccaaagacctaaaaacagaaccaccatttggccaaccaatcccattactggatggatacatacccaaaggaatataaatcattctgttataaagacatatgcatgcatatgttcattgcagcacaattcacaatagcaaaggcatggaatcaacccaaatgcccatcaatgatagactggataaagaaaatgtggtacatatacaccatgggatactatgcagccataaagagaacgagatcatgtcctttgcaagaccatggatggagctggaggccattatcgttggcaaactaacataggaacagaaaactaaataccacatgttctcagttagcaggagctaaatgataagaacatacagacacaaagaagggaataacacacactggggcctattggagggtggaggatgggagtagggagaggatcaggaaaaataactaatgggtactaggcttaatacctgggtgatataatctgtacaacaaaccaccatgacacaagtttacctatgtaacaaacctgcacatgtatccccgaacttaaacacacacacacatacacacacacacacacacacacacacacacacacacacactccagctactcctactaagcagtccactctgcctggaagttgctggaaggactccatgcgaaagtggtttctctcctcccagaacatgattttactggtttctttcaaagcctattcatcatcctcccttcaggacactcttaaaatttgccttctgtggagctctttaccataagaacaagcaacaatgacatgttccagcccattagtgttaatatttgttgatccgaagatggaaaatacattttactagacccttgtttccttcttgctgctgagtatattttcaatctataaagcttagataaatttcgtatatgctcacctttttttgtgggagacttgcaagagaaacctaccctaaaagctaacctagccaccttctatttgcagaaataaagcaaaaatcattttagtgttgattttgatgtaccagaacctaaattgcttaaattaaaaactttttagagcagtgtgtagaattctatttgtgtccgtgagtatggctaataactccattttaagaaccagaaaaggaaataaaataagttaaccatctcccttgagctgcaaaagttgctaatcaaaaacttcatgtaaacaatgtaccgatatcagactctggttatgatctgtatacatttagtgtgcaattcaagtataaaggctttcattttttggcagcccagatgcaaacaataaaataatcctgcttatttcctctcagcagcaggttttgtcatccatatgtaactgaccgaacagtgtttagccacaaacagaaaacactttctgcaggtggttagttgtctttaatatgtctcatcaagcctatctgtgtgcttctgtgtgggctgctgtgctcttcaaggcctaggtcaagtgccttggccagttagtggttagataattaatagagactcactaagtatgtattatttaccgactaccactttcctgattgctttgaaactaatgaaatgaacaaaaaatgtaattatggtccttgagggaatttatgatctagttagaagggttaggaaatactttgggcccagacacagtggctcacacctgtaatcccagctctttgggaggctgaggcaggaggattgcttcagcctaggcgttcaagagcagtgttggcaacaaagtgagacctcatctctacaaaaactaaaagaaagaaaaaaaatagccgggggtggtggtatgggcctgtagtcctagctagctccttgggaggctgaggcaggaagactgattaagctcatgaggtcgaggctgcagtgagctatgatcacagcacaacaatgagaccctgtctcaaaaaaaagaaaagaaaaagagagagagagaaagaagaaaggaaggaaagaaggaaggaaggagaggggaggrgaggagaggagggataggggagagaggggagggcaggagagaagagaggagaagagaagagaagagaagagcaaaactttggaattgtttcataggagtggtaccttttcccacactgactgtaaaaagttcagagaaacaaagggattttcacagcagtgcttgcaattccaacatctgccttgtgactttcaattttgagttaatatttgaaactgtcttcrttgcctgcataaagtgatcaagtgaccatcagtacaaagactttttcacatacctgttttaattgctctggagaatgcctgattctctgagttattgcctagaggttttcagagtaaattacaagagtactacatagactttatattaagtygggtcaccccaaatattttatgaaaacctgcccagccatttctacatgacatggtaacaagcatagagatgaaaattttatttatctagattaggcaaaattctcctatacgctatgtttaatgccatgggttgtctatattttatctttatattgtgcaaatgtgtgtatgtgtattatacacacatgtatgtagaagtacatatgtgtgcacatatatgtgtataattgtatgtacacaagtacatacatacaaatactacatgtactatcaggctttctcaggggagacttagtgttttttttatctttactggaaaaaactgttgttggtaatagcaaagacattttgtgttagccattaacgagatagcagagaaatcctttgctatctaatatgtcacggtgaaggccactggtatgagcttatgttgaaattcaggatttttctgatgtcatgagtgtactcaggtgaccacattttgaatctttttacttttaaaaacaattccccaccccagttctttagctgagattgtcatttgaagacgtgtgccctgttcatccagytgcacatgaccagaaggccctggagaatggtttaagccattttgaagagcacagacatgggggagaaggaggtaatcgtcatcaatacatcatccctacctctttcaaacttctgtatatttttcgtacttggttggtttgtttttgagatggggagaagacagagggaggacagaggctctcaaggagtttgtgagtttagagctggcctgatggccatgagcagcatgttttccatcttgaagaaagaagargtgggaattcagaatggtgcagctgccttggtaaaaccttacggtggctttatttctacttaccaaatactagaaacaacctatatgtcccttgactgagaagtggataactgtgcagtatacctatkcagtggaatattacttagcaacaaaaaggagcaatacacagaatacagtgctttgctgtgcaaatgcattgtgctacatgaaagaacccagactcaaaaatgacaccctttcgtatgattttgtataaatgcatgattccacttatttgacattctgaaaaagacaaaaactgtggggaccaaaattagatctgtggtttccagggtctttgggtggaggaaaagggtgactacaaaggagcacaaagggtttgggagagtgacagaaatactcggtgtcttgattatggtggttacacaagggtgcgcagttatcaaaactcacaactgtacattaaaaaggatgaataattattgtatgcaaactatatctaaaaataaataagaaacagatatatatattccagtaattgcttcttggtatttgaatcaggccaaggataacatctatcagaaaggtcttttattgatattgaaattctgccccaacgcattcyctctcctacacacacacacacacacacacacacacacacacacacacaccttctctctctctctgcctgcccccaccatctcatattttcttgtaatcatttttatgggatttataggatgtccagctcatgcacaagtgtcagcctcttgtttgtaatctcggtagctcagcctcccgagagtgatccagccatccatgactgagttttgattcaagaaacaggactgtgatcaagatattaattctatgcattataaaccagggaacagttggaaaaaaactaaagcttagtctcctttaagactggaaaagttgtactttatatatgcatatgtgaatagtagcagggaattttcttgcattcaattttctcattcctgagaggttagatggttcaaatgtgctggggcagggagggattttcactcggctgtcagagcttcatatccctcactatttttgagttttaagaagatatttaaaatgcttatgtttctatacattacattaacttttaaatatgaatattatagtaaataataaatcataattcacaagtgcaaagaccttctgtgcccatgtttagcatatttggtcgatttcttttccatggcactcaatgacagctgaagaaatttctttaggatgacagattgtcagcacattgacatagattgttttagatgtatatttttagtgggaatgaatgaaatttaagtgagcttttctcagaaatatagtaataaggagaagagttgctatttcatgtgtcaagcttacaggacttttttccccctctttgggttatagtcaacctaattagcaattattaacaagtatcttacaaaataaaaagaaaatttggaatttgctgaaagcatcctaacatctactagaatagcgctattgataagtagtaaagaaatttatctcaaatctcccttgcccaagatagagaaaaattaattaagaatactctagaatttttttctggtcctttattgaacttcattacttaattagtccttagagagaagaaccatcaaaacttggtaggtggtgacagcatttttttacatttatctgtgagatggaactagaatatggagttcacaggacagcatttcactaacatatcttttttttttttttaaaagacagggtcttgctctgtcacccaggctggagtgcagtagcacgatcttggctcactgcaacctccacctcccaggttcaagcaattctcctgcctctgcctccctagtagctgggattacaagcacctgccaccatacccagctaatttttgtatttatagtagagacagggtttcttcatgttggccaggctggtctcaaactctgacctcaggtgatctgcctactttggcctccgaaagtgctgggattacaggcaygagccaccgcgcccggcccataactagttttaaaactatgattacttcatagaatcctggtttcttcagaaaactactttatcaggatgaagggctaattgtgtggttatgacctagttactgctggaagtgctggaaatcattcaataagaaggcaggtgtgtgttgtttattacctccaaacatttgggaccctctcttcactgcataggggccgtgagtactggagttccraaaggagagtgggacacacatgaaacccattttaatgaaggaatgtccaagctggttccccagatgctgaaattagatggggacctactggggaagagccatttccaaacaggagagaacaggcctagcttcctaaaggactgtctcagatcttcagcactagcccagagggaagtatttctccacactcacttgaaatggccactgtgctacacagagcccttatctggattccttttaaactgcaaagattttaaaggagagatctttatgcttttttaaattccaggtgtattactcattaaatatggacattgtagccaagaacagtgtagttcccatggtagtggaccgtattatattttatttagttcttctatattacttggttttttttaaatctgtgtttggctatttaaaagtttatactttgatcaaatgaataatatctagtatttgatagcacaaccaggtgactatagtcaacagtaatttattgtacatttaaaaataactaaaacagccaggcgccatggctcatgcctataatcccaacactttgggaggctgaggcgggcagatcacctgaggtcaggagtttgagaccagcctggccaacatggtgaaaccccatctctactaaaaatacaaaaattagctgggcatggtggcacacacctgtaatcccagctgctcgggaggctgaggcaggagaatcgcttgaacccaggagacagaggttgcagtgagccaagatcgcaccattgcactccagcccgggtgacaagagcaaaactccatctcaaaaaataaataaatagctaaaacagtagaattggattgtgtataacacaaagaaaggataaattcttgaggtgatggatacgctatttaccctgaggtaaaatacctatttcaaaatatctcatgtaccccataaatatatacacctaatatgtatccacgaaaactaaaaatttaaaattttattaaaaaataaaataataatttacattttggtaattggttatagtacgttcttaagagaaacaaataaaactttacattaactatttggacttgaaggaaacgatttcatctgcaactatatagactgttaaggcccgtgttcccacttttttaggaatttgatggagaggttgtcttactaccataggttttatttggtttaggtttccttttctatagtatttttacattttaaagggcccaaattgttcatttaatgggatgactgttaatgggtggagtctcccagggccgattagctgtttgaatgcaagtttattactcataatggcactttttttaagtgttaaagttttggtaaacatttcatctgaattcataaaattaaaagtgttgatatttcattataactgaagggagaaattgtatagaattagcagttgattccgtttggactgtgaataattatctatgggaagggtaccctgattaaatctgactatttaagagataagtgaatcttaaattcttaatttacaaaagtttgatctatatccaatgggaatgaatctctttttgtattccatgattaattttttttcaagaattccttaactcccatgttattttccctgtttaattttgcagaggctatgacttcctcaatgcaaggttccttcacccttgagaatctcctggttactaatggccaccatgtgtcacataatgagcttccagactgaaatcagaccaagtttgtttcatttgcactataagaaatggtagttattcttctgtgaagacatatatagaatgagcagtgatgcatataactgaaaatccctcagggaagcatttgttatttgtgaaaagtgtcatctcgttctctaagaacttcctcagctttttctgtttgtttaggggagggcacaggaacatgatggcatggtgttacatttggtgatttggtgcacacaactgtctgtggtcatgcactttgatgtaactcttgtccaactggcctayccaaagtacagatatatcttcttatagatggcttttaaaaaaaagtaaaaagcccatcctcaatagataaaaactattgcaaacaattttaaatccttaataagaaaataatttcaaattgctgtgcattgacagtatttgaargargtggggatgttataarggatggtttttagaaagaaagagctgagagacatgaattttgcagtgcagagaacatgagctttagattcaagctccagttgaatgatctttctgtacttcagagtcataattataaaataagatttagttgacctctgcaggtagtagtggcagttaaatgatgcaggggaggcaaagctttacctctatcctcttagggtcctggctgggcctgagaattaaatggacatgacaaawtaagccaggcacagtaatcccagctactagggaggctgaggcaggaggattgcttgaggccaggagtttgagaccagcctgggcaacatagtgagacccccatctctaagaaaaaaaaaattgacagaacaaattaacaggagaaaagcacaccaatttatttaatataagttttatgtggcacgggagccctcaaaggaaaataaagattaaaaaaaaaacacagtcagttatttttatatattgaattggacaaacaaagataagttgtaaaatgcrataaggccagcaggcttggcctagggtaggtaattattggagaaggaactaggatgataagggttagttaacaacctttgtgcagatttcccttggattcaaccttctatccttgatgataagaatgctactttccttttggggtaggaaggacatctttcacatgggagtttcacctcctgcctttaagaaacagaacgaaggtcacagtgatcttcttgtgcctgctgttttttaggttcccttaaatcaaaacagccaatatgccagaacatcatatttttaactcctttggtggcatgaatatggagctcctacctgagtctaaacacatgcagccgcttcccagacacggartcattgccatagatgattatgtgggatctgacagaagtttgttacttgaaaataatttcacacaagtcttccacgttggagggcagctgtgggctgcagaagagcctggagagagtagtccctgtggccttgcctccgtccctgagtgtatttagatgaacaaggacctttcccctgaacatttgtctgcatggatttttaaggactcccttctctggaagctgccctcaaagcatttcaagtgctcttgctgatggcagatgaagctgccgtaaagcagggggatgtgattgagcaaaaaatcttttctctttcaacccagsagagcaaaatagtaactctacttcatgaaaacaaaattggctgtttccaatagagcactcagatcttcaggaaaatgtagcatatttcctaaaggagrttaaaggtgaatgaaacctttgctggtggttccatatattctaccataatcgtaataacaacagcagctcacatttattgggccttttaatgtaccgtccattgctttaagtgttttacacatactgtattcacttatttaatgtccaccaactcctaagtccctgttagatgatcttcattttacrtgaggaagccaaggcacccagaggtgcgatgtaacttgtccacactcaaacagcagcaaagctggcatttaaaccagacatgctgattttagaacactaactgcatatgctgcatctataatgagtaaaaatctataacaggtaaaaatgtacaatggagaatggtgggaaccagtaccaggaacctgtgcagacctggtcagagcaggaaaggaaataaacacagttacatgattataaaacaacaaattggataataagatcagtcctgaaaagtcaaccaaaagatgctcacgccagacattattgcacagtatcttgaatcaggcccagatatctaaaataagcctctttccmgtgatttttcaagaatcttgcttattatatagggtgcagcaactcattttgactttaaaggagtagtgtggcaggctcctggacacctggaggcactatatgaatttctgcctaaaaattcatccataggaaggagatttgctgaactgagaaagtgaacatttcacaagaagtacatatgtctccatgctaagaagtaactccctgggcratcgccgtcatgctgagtgtttccatctccaagccctgctgcagcctgcctccttgtctccacccatgcctggaaaacctaaccctcataaaagtctcagtaagcaacagtgagaataactgtaaggtgttacaggagagatggttttggcagccaaaaagggcttatgatcctaagatccaccttaaaagtgttctgttgcccagttctgtrttaattctgagcagaggcagcagaaagcatctttcagggtcgagaatttctgagatcttgaccrtcaggaaaaggatgcttccaggcagccgtggaaactgaaatccgagccctaatcttgctcagagctgctgaggtctgtttgtaggaaaacatcgggttattgtctgaataacatacatccaagttacaacgggaaaagaaatctgccttatggaaagagaatgaacatttgctgggtagagtttatgcctgcctagatgctccacctccaggctctaggtactctacttcggagtgcagtctgcgctccctcttctgggatggctgcggagcccagggcatctctctctaaggctttcaacaagtcttatgggctgtctagactcgctgtcttggaatgagttagtgctctgacctgaggaaaattccccatgtttctcagtgtcaagccaaaatctctagggcttcagtattgccccacggttctggcccgctggccaaacacataactctttttgcagctcatacaggtaaatgtgagccagtgctgctcttacaacctgcctcccacatccctgtctgtgggtggctctctcctgaagatggtacttctccagaagtttccaaatgatcagagaggaactgcttctgggtactcctccttctccttcttcttcttgccagaggccttgaatttgctattgagagatttggcaatatactttgaaacgtgaagataatgaagttgttgggtgtgaacaaatgttacttgactatttaaatattaaaaatatgatatacatggtgtattagtccattctcacactgctaataaagaactgcctgagactgggtaacttacaaaggaaagaggtttaattgactcatagttctgcatggctggggaggcctcaggaaacttacagtcatggtggaaggggaagcatacatgtccttcttcacatggcagcatcaaggagaagtgcagagcaaagtgggggcagaaagccacttataaaaccatcagatctcgggagaactccctcattatcacgagaataacatgtaggtatctgcccccatgattcaattacctcccaccgggtccctcccatgacacgtgaggattatgggaactacaattcaagatgagatttgggtgaggacacagccaaaccatatcacatggtaacctacgttagagattcgttgtatgaatagcagaactttaaaaagttttgccttgcagaaaacagttcctattattgttacaaataagtatacatcatcttagaacttgtctttacaaatatgaacaatgagtaatggcagggaaacaagtggttaagattcagtgattgaggctcagtttctatactggcaactccatggagagcttgaagaccagcagctacattccctgtcttgatcatccgggggtaggaaaagcattgaaagatgggatgactaatgcctgctaaatgctggccaactttaaaaaaaattgactttagtattatgagatacgaatggcatattttaattaggaaatacagtaatcctaagtgagcttcatttcttacacaaaatataggaagatgatacatgttcactgtgcttgagaactttttctcaaattcaatgcagaaaggcagtctgtgaggcagtaggaaatgcagctgctggaattctgttatcagtatgtgtatcagttctgattgagttgtaaaatrgaagcctgatgtgctggatattaatttagcaatagataagtctgaaaatagacttaccttcaatttcatcataaaagtcaacctcccacctaacacgttgaaactcctgtggttgtgaaagaagaaaaatgaagttccacttccctttcattccatgagccccttcagtggttactgcctcactagaggtgcaagttactagaaccgcagaatataaactgttacataaaatgatgaaatatgcgcacagaaaataagggagctttttaaaataaaaactaatttgtatgctttggaaagactcaaaggtgagtktttttttttttaagctaattagatatgggtaagacaactgtgaaaaactggagaattttttttttaaaggcgtgaaggatgtacactcaaattgccttgtaatttttcctttacttaaaaccctgaaaccggacattttctaactgaaatcacattgacactctgtggtatctatgtgtgatggagaatatggagccaggagagcagttcttggatacagaaccacattttggttgaatgactttatgtttatgtattcgtagttaaatgcaatatgtatgtggtcaggtttcatggctttttcaagtgactaactacaggtcttaagtaagtcaggtgacaggattgtaccagatgtaaaaaacgagtttaatataaactcatcaatttgttgaaactgaatatcaaaatgagaacctcagtgtttggggaacagttaaatctacaacatagtaatttagtagaggttcatggagtcaatttaaggaatatcccatgatatgtaaaaatatatatgtatattattaaattgtatatttgtaaagatgtggcccagatataaactktatttacctccagccatataataagtaaatatcacacagattagttgtgcagtccaactctcgtgcgtgtgcacagatcagcctcgggaccaaaatgccacatccctcttccccatatgttagtattgaagttctgccaatccttcaaaaactgactcagatgttaccattacctgaaggctttcctaagttctccacatcaaactgtggttcacttagccaaacctgtttgtygttaatacgttggaatattacctgctgtttcctgtagctagaagtggtgcttagtactatggttttcggaatcacagtactgaagaggcatctgagaactgtgtatgtgtttgcacacagtactcaatctctagcttttctaaaacgccatctctggcacatttgcttaacttattttaaagagcacacactgaagtagtatgacaagcagcacaagaacttctgttttctgtgttggaagaaataacaaatgattatacacagcaaggacaaagagatgagtttttagagaaaaaagcacattagcaataatattccactggcgaagtcactacctatgcatatcatatattgtatacattggcaaagcattttgtttcaactttgccttttcgttttttccagtatgtataaaatgcttgtcttaattaatagtcattttctgctgggggtggggtaaggaatggccgttttaatgatattaatgtacagtgrattcttggctgtgaaggagtgttaccaaatattacagcttgtattaaaagtgtaaagatagaaataagtggtgcctgtttaaaaagctataagatttagaagcctctccgctctgacagggatggtaaagctcattttaattctgaaatgcaacttccatgtgttttacagtttaattttctataattttaaccaattttatataatgagttttgtagctttataagtatattaatctaacaattaaatagagaaaaacaattgtttctacacgtacaggactagaatgtgtggctagtttctctcttattggtacctctacacagtggagctttctgtaaacacattctaaatatagaagtgtctttaaagatgagcttttcctctttttctgttaagacagagcttcctttgggctggcattttgtttactctgaaggggctcctccaggagagacactctgaaccccgtgcattctgggtgccgagctgccgcaggctggtttggggacttctcaacttagtgcgcagaaaaatgaattctgtgaacttaaaatcagagtctctgcccaaggggacttctagcatcaagaaaaggtagaagctagctgaggtttaagaggtttgtgcaggagaaaaatgaggcgttaaatggttaaacactgccagcagatttttagcattgtttaatagttttaaattatggaggtcttaggtccaaaatgtaacagttatccaactcactgacattaaacattcagttgccagcttctgttttcttggtcattaattttcagtctatgtattttcggtgctttgctaagagttttgttaaaataacttttcttgtttgcattctcatttcctacaaattcagactttgctttagaatccaacagatggatacttggagttagcttattttttccatctaccctattttttttccttctaccttttatttaatgaggaggccaggtgtggtggctcacacctgtaatcccagcactttgggaggctggggtggacatatcacttgagcctaggagttcgataccagcctgcgcaacatggcaaaaatctatctctataaaaaatgcaaaaatacaaaattagccaggcatggtggtgcacacctgtattcctagctacttgggaagctaagatcagaggatcacctgagcccagggtggtcaaggctactgtgagccaagatcatgccactgtactccagcctgggcaacagagtaagaccctgtctcaaaaaaaaagaaaaagagtaacaaagtaagatatcttttgtctggttataataaaagctgtagtatgtataatttactcaaaagcagagcttgctttggaaatctctacatgcttgaaatttaaagcagtgcatatatagtctccatatgtattccatactgtaaaccatgatggtgttccagggattgagtctgagtgtttataaaatggcacatggcacttaattttgaaaccgtggaaatatttaaattactgacttgatgaaggctatagatcaatgtaagaacttattagttctcacattgatttggatgcattcaaagatgctaaatgattgccaatatagtttttttttctggactatttaattcatggtaggtatatccagtatgtataagaaagtaaaaaaaatgcaaacactttaatctcaaataacagtatgcagtgctctaatrtaatatcttctactctgaagggcaggtcataagagcaggctcctggtgatgagatgggagatcattcttcatttgttggaagatcaactttatttcatgccctagaaatgcttgctttacaaagaaacatacgtagggcagcatgtatcctgaggtttccaaaagagaaaagatttgttcacaggggtaagttgaggaggcgggagaacagctctcaaatccacctccctgcygataagacttaggaatatttttgggttaggaagtaacaggttcatttgtgcaagcgtatttggggttcttggcacttcatatgacatatatacagaagatggcagctttagcatgatctgtgggtggagttttttggccctctggcttcaaaaggccacctctcaggcatttgcgcaggcccacttgaagggttggtggtctcagctggtttgaagtgaacagcagctggcccaagtttctgaaaaacagctgaagccaacattaccaggaatgtcatctgtaatgcagccagtaatggttaagtttcagtgttctgtggcacggccttcaacttcatggaaaagggacaaaaataacataaagcaagtggccaaaagcaagcagagcaggcagttgtgatcagattaacctcttggtttcactgctatgaacatctgtatacaggttttttgtatagaaataggtattcagttctcttcaatacctagaagtggaattggtgagtcataatgataacgctatctttaacattttgaggaactgttgaactgttttctgaagtggcttcatcattttacattcttaccagcaatgtgctaggttccagtttctccatatcctcaccagcacttgtattgtctgtctttttttactataaccattctgatgggtttgaagtggtatgccattgtggttttggtttccatttccatgatgagtaaggatgttaaacatcttttcatgtggttattagccgtttatatatcatctttggagcaatgtctattcagattctttgcccatttttggattgggttgtctttttattgttggrctataagtgttctttatgtaatctatatacaaatgccaaatcctatatgagatatattatttgtaaatattttatcccattctgtaggttgtcttttcaccttctttatagtgtttttttttttttagcacaaatgtttgtaattttgataaagtctaatttatctgttttttcttttgtcccttatgcttttggtgccttatctaaaaaattactgcctagcccaaggtcaaaaaactttactccattttcttgtaggaattctatagattcagctcttaaacttacgactgttatttattttgagttattgtttgttaatggtgtgaggtagttgtccaacttcattcttttgcatgttgatatatagttgtaccagtaccatttactgaaaagactattctttttcctattgaattgtcttggtaacttgttgaaaatcaattgactaaaacagagaggatttattcctggactctcagttctatcccatttatttatacatctatctgcaaaattattttaataaaaacaaatagtgagcacattaatccagtgtgagtaattcatggatccattactaaatctttgtgaaaaatagagaatggaaaagtatctttaatcctgttactgtaaatgttttgctgtatttcccttgagtagacttagaccatttaattcctttacaacagctattcctacctgtttctttttttaactcactctgctcatgttacttcttttcctgtgcactcgagaagccagaagtaacactgcaaagcacaataacccctaaaatcacttgtctgtctcacacacacaggaagaaaggaataaagggtaaatttccttttaatattttatgttttattgttctttttttctacagtaagctactcatttactgcatctgatactgaggctctacagtagccatgcactttagtctgtctcttaagacacttttggagatattttcatcagtggtttaaatcacaagttgccttaatttaaagacaagaaagagagcattctgaacaaaacataaacattttttagcccaagttcaaactggcttttttgctccccaagacttttttttttttttgagacagggtcttgctgtgtcacccaggctggagtgcagtgccacagtcatagctcactgaagctttgacttcttgggctcaagtgattctcccacttcaactttctaggtagttgggactacaggcatgcactaccatgtccagctaaatgtttaaattttttgtagaggccaggcatggtggctcactcttgtaatcccagcactttgggaggccgaggaaggcagatcacttgaggtcaggagtctgagaccagcctgggcaacgtggtgaaatcccatctctactaaaaatacaaaaatttgctgggcatggtggtgcatgcctgtaatcccaactattcgggaggctgaggcaggagaatcacttgaactggggaggcagaggttgcagtgaaccgatatcatgccactgcactccagcctgggtgacagagcaagactccatctcaaaaaaaaaaaaaaattttttttttgtagagttgtctcactgtgtcacccaagctgttctcaaactcctgggctcaacctcccacctcagcctcccaaagtgctggtattacaggcttgaggtactgtgcctggcccccacaaagactttttatacctgaaatacctatttaaagtatatttctacttaaaattttttttcatctttcagatacactttaatacccatgtcttaacttttacaaaccactgtaactttataaacagagattacttgagaagcaaactggcaatccatattttcagagagctgagaggttttccacagagctgaaagagaactaaggaatacaaatctcagaaggaagaattgcgtcctacctaagaggtaggcatgaaggacacatgcactttttgcaaactgtgctgttgaaatttacacgctacatcttcagttgtctgacttggacaatgacactgcttgtatatgaaataatattagcttaaaattattaaacagtgaaatactgcttttaaaagtgaggtgtcttcaaagatgggaacaacagacacaggggcctctgaaatgggagagggagaggccgcaggttagaaaaactacctgttaggtacttgtgttcactatttgggtgacatgatcartggaagcccaaacctcagcatctcgcagtatacccacgtaacaaacctgtacatgtaccccctgaatctgaaataaaacaaagaataaaaatgaagtgtcttatctaaaatgaaaatctatattgctttgccctttcaaacttaacatgtccaaaagagagctrttgattctttcatctcaacactcgttcttcctgctttgtcttcccctgccctgtcctttcccctccctttgtgatccacccctgctgagcttcccaccttttggcaccacgctcataattccttattatgctccagctgtattgccctctttacttatctgaacaggtggcacttttcttcctctagctgctttgctcccaaatgttctgttcccttttgaaaggttggtgggtctctcctctagctcacaacaccctgtgttcttcagagctctgatgttcttatttgtacgtttccttctgtattacttgtgtcctcactggtccataggtgccttggagacaaggatcctatctgtctttccccctcaatctccagctmctggagtagagcctagtccatagttggtgctccataaatatgtgttcaataaatgatcaagcaggagtgagttataaccagaggtcaaaaccctggggcatcggagaagacatgcatatgtgtcaagtcgtaattaatgtgttgccccagagaggaccatgtcagctgtctgcttcctggggagctggcttctggcagcttcaaccatctaaatacagtcaaggagaaagttgcatcagttccatttgtttttgtttttccattggattttgaaccccaggagaacagttgccataacagctttccttcagcttttggtagtctctaacctccattcaatattgactactgtgggaaaagcactctctctgaacgaggcttcttactgtttctgaatttacccatacttctaatcttattgctaactaatttgtacagaagtctgtttctttagatagtaagttaaagatgagaatttgaatggagactgctgatctcgctataggcccatgcagccagctcctggccacatctcaaggctcagctgaagtggcctttcctcggggaaccctccttcaggtccttggcacattttactgtctttaataaatagcactgactccatttgggatgaaaaaagcaaatatgcagtctgttattgggcccagccccaatttaaacatcttgagggcagagaacatctgtcttttttttttaaggaaaaaaaaaacaaaacactactctatctccaaaacctgatatgtactcaatatttaataaaaataaattgaattaattaatcctttccaaccttacagatatttctgattgatagatccattgtccagcaacaataatatatgactrtgtctatcttagtaaataaatttctaaaaagctcaaatactgggacatgaatggctcactgagagcaatagggtgtggagaaagagagagagggagcgagcagagggagctggatgtacacgcagttgcagtcagtcacttgtttcctgagtagactatttgagtttttgaayggttattggtgtgattatgtctatcccatcaaattgttgatgaactttccagttttttttggaaaataaatattaaaggatacaattctgattatgtttatatttcgtttcattttgttttcaacttaccctgtgaatttygtccatgatgttatggtatcttaagggatgaatctaatacagaattatgcacaatttttgtcatttgcctcccttaaaagaaaaaaaaaatgtccatgactatactaaaagatcctgtcatcttaactaagaggcagctgtttccctggagttttttccctcttaactatatcagctatactgagtgggatgtaatcacatgatttaaaattgataattagtgtgtgaaaggcacttggcaatgaaatacatagcaatatcagtgacataattttggcagcagaaaaatgctaaatataatccaaatgtcaatgtagaaatgaaaacagtactagctagtcaatgatttatataatgtcttgggaaaatgaagtcaattgcatcaaattttaaatcaaaataaaatatactttatttaaaagttatagaagctggaggcgtagtatacgtgtgtgttatgtgtatgtatatacagtgtatggatatatttaatatcattaaaaatgattatccttgccccggttgtacttctcttctattcataaaccctaaagaaaagctctttagatttttcttctagggcaaggcgcaatggctcacacctttaatcacagcactttgggaggcttgaagtgggtggattgtctgagcccaggaatttgagacaagcctaggaacatgatgcaactccatctttacaaaacaaaacaaaacacacaaaaattagccaggcrtggtgrcatgttcctatagtctcagctactcagatagctgaagcaggaggatcacttgagcctaggaagttgaagttgcagtaagcaatgattgtgccactgcactccagcctgggtgacagagcaagaccctatctcaaagaaaacccaattgtttcttctggaagttgtcttcatatctctgaatatgtgtgcctattttgcagtatgctaaatttggttcattttagacattatcttttgacttcctgtttcaacaggtgaggatttccctctctacattacagctttgcctcctctccttctcccttcccacatagttacatctctaattttaattaattcagggatccatgataacctctttaaattaygtaaataatgttcattgtagggctaaaaagtatgatttttttttctttcttgttcaggtttcagttttctctgtggtttctaatggcctttctttttgtcttttaccctaactgcatcccacatttgtttaatactctcaagatgtaccattatagtatgtttgtctgagtctcttgtcccccttccccttccttctgaagcaccctctcctccagtccctatctggactgcttgctctctaggctctgcttgctgctggacttcacttctctttgatgctctccaggagggcaccatttcctggattccttgttttctttattcttagtttcctcactcacattcctgaagtatatgtatcaatagattcttactgttacatcagcagtatatttctgagacgttggatagccacaatatctttattctttgattatatttgattggtagattagctgggtataaaattctaggctgaaattctttttctgtcagaatgctatgtgttgtttagcttacttctggttgattggaaactcaatgcaattttgattctccatctttggcatttagattctattttctctttatgtttagtgttctgaaatttacaaagatatgtgtttttgtggatatccttttcttaatgcgctttcaatctaaagactggtttcctttagtctgggaaattttcttctattattttttggtaatatcctcctttgcattttctacattctgtctctctacaacttagtcatatatttaaccttctgggtttacattctaatcttatccttttactgtcttggatatttccgtgacttatcttctaggtcctctattgaggattgggtttttatactctctttttaattttcaagttcttttttatgtctttttttccctacaagcattctgatcttagtttacagatgtaatatcttctcctatctctttgaggatatgaaataaaatttatttaatgttttcttttgttctctcattcatctctgttttctctgtgttctttcttgtgaaaacttctcttaaaagccccaatgggtgtgttcagtctttctttaattagctcttttatttattaattacatcatttaacatccatctagtaatgcaaatattgaaatactgaatggctaatacatttcagatgctagtaaaagtaacatatgttcacagtaatttgaccctgtgataaaatgtgagagtttttttcatggcttatctcttttattttcctttcctggaagaatttccagaaaacaatagaatttctgttgttatgaaaacagtagagaacaaacttgttagcaaatgtagataatgaaaagcactatccatctcctttaaattctgttgtggaaagggattttacactgtgcaaatacaaagaatattgtattttaactatatatttattcatacttggatgataattaagaggaccttccatggaattagctgtggatttcttttccaggtgttcatgattgtgtcatatattcaggttaaatcagacattagcctatttagtgaaattctaatgtatacaagcatctgcagcaataaaatatattttgaggattttactcctcataaaacacattccatgctgtaattatttccttcagcagttgctgattccctatctatattagtattcttaggcttttcagcaggattgaaaaatatttctgttgattgttcagctactgttctgaagtcataaaagtacacttacaatagacaacttgctatatcaatgccttaaaattattttcaataaattatggtattttctgaatattaataatgccataattaagcataaacaataaaatgaccatgatagtagcttgattgctaggaattttttaaggcaatattgcttgttccttctgaaaataaaagctgagagcaaagagaaaggggaaggagaaaggaacaagtattcaagaatggttttccacgtgaaactgtgagctgaatgcaccagcatcatccacctgcagctttctggggcctgggagggacacgtggtgctgactgagaggtggggctcctggtgctgtttcccatttctgtccttgcaggggtcttagtgctaagccttttgcagcagctcctagtgtgggcccttgaggaagctgccacttctgagtgccagaaactgatagccgggattgtggggtctaacagctgggacgaagggccaaggaggagagtgcttttaccatgggcggcacaggttgggctttgtttgtctcatgtcatttttgatctgttggacagacagggctattgagccagcttgacctcttctgtaacctcttccccactgccattctcagcaatggctctggaggaggtcatgcttcctgattgtggccagtcatgtctgatgaagtctctgtcccagaataaatacttacttagggttaaaatagaggagccataaactttaggtaccgtttatgaaatgtattgcaaagtcccttttctttgcttctgtccttgcccttgacctttaagtgttgctgtcgcccagaggcccaccatggatttcctcttgcctccttacataagttcccttgctggagacttccactgctgtggttatagcatatttgccaatgttacaaacatttttcttatcagaaactctcccctgagcatcagccttgtgctgtggattttttcctggagagcccacaggtactgtgccttaaacatacccccaaaatacattcatctaccacttggcgctctccctcccgagcttcacctttggttgtgtttgttgccatctttcctgtctcctatcagaaaatgcctggagtcattctttgctgccaccctatatcaggtccatcagccgggacctctcaggatctttcttcaagactaatcccagctggtctcaaactcctggcctcaagtgatcctcttgtctcagcctcccaagtagctgggattaaaggcatgtaccactgttcctggcccatgtgggattcctgcctctcctgacactccagcctgctcccaaacatttctgtttaggtaattaacaattatctaacaagtaattaacaaatactttcacaagtcagtggttaggttagacttacaaaaactgtcagtgaatcatgctaccccccaccccactaccttgatgtagttgccctgtgttcccagttgctttgagaaagcagattcaagagcagaaagcattcctaaggacagatgaactttccacgagagtccattcgtagtggtccacttccgtggtactctgggccctccctccccacctccctctccagagcccacatttcccagtttacaaaaggaaggaatacatctcacttcttcaagtctttactgtggtgtatgcatcatgatacaaaaaatcttagggatacaaaccaatgagacaacatttagtggaaaaaaaaaaaaagaaaagactgcctatgtttattatatctggaccctgataggatatttatcttctgtcagggagttgagacagtatctattcagctgtacaatacaccctctcaccatacacaatggtcagcgataccttgctcctgagcaaaagtccaaagaaactgccagtgagaaacatgggaggcagctgcctctgatatcgtggagacaccaaggtcatggccagactgttcatcagatccatctgtgtctatgagtggaagctcagaagcaaaagagtcatcatggcatgtttattaacatgtgcattgtagttgaaatatgaaatcagagtctttttttatgatttaactgattggttagaaagtgaagacagaggtgttgtcagagtgtggcaaaaattttccaaaacttgaatgagctaaatctgcaactgtagggtttgaaagagcacttaaggcatgtgacacagtgactgtgatatgttggagagaacctttttcacaaagaatacaatgtgagcaagcttagccctgtgtgataagagaaaactattttatcaaatggcaatgaagtagcaagaggctattacaaatgaaacaattttactttcctcaaactttgctgagtgtactgagtgaaaaaagataaatctaaatgagaccatagcagggataattaaaggtcatttgaaacttcttggtatacctctagatatacttctcagaagttaagaaagtaaatgattcttgtgactaattaacaactattttcactagtcagtggtttctgtttctttgctttttagaaaatttagaaaacgacctartcacratgtcagcagatagaagatttcaaataactttgcaatacagcaccatattatttttggcatacggttcagaagaaatctaaagtattgatggctcttgctgtaatgaagctttacattmtttttaatgtgtgaactattaatagatttctcaggactgagatctatagaaatgagtaataggaatagaaattaaaacaaaattaagtaagatttccatttaccatttctgtgaagtataacaagtgatcaataaaataaacaaaactacattaaattatggtaaaactatatgtgtcaagtggaatggaaaacgagttcaaggtagaaggaatgatacaaaatttttgactcttcaagaaatccttgtttctattcacactagcaaagacacggaatcaacccaaatgcccatcaatgatagaatgctaaagaaaatgtggtacatatacaccatagaatactgtgcagccatagaaaggaatgagatcatgtcctttgcagggacatggatggaactggaagccattaccctcagcaaactaacgcagaaacagaagaccaaacaccgcatggggagctgaacagtgtgaacacatagacacagggaggggaacaccacacactggggcctgtgggggttggggagggagagcatcaggaaaaatagctaaggcacgctggacttaatgcctaggtaatgggttgacaggtgcagcaaaccaccatagcacatgtttacctatgtaacaaacctgcacatcctgcgcatgtaccccagaacttaaaataaaattaaaaaaaaaagaaagttgcctaagtatacagctaagagtaggagagccaggatgttagccagttggtctgactccagagtaaggtcttcagggcactgcaaagacatcaaggagttcacagtccagtgggagagacaggcaagccagccaggatgatgatatatgatatgatatgatatgatatgatatgatatgatatgatatgatggtatgatatgatatggtgatatgatgatgtgatataatatggtgatatgatctgatgatatgatatatgatatggtatgatatatgatatggtatgatatatgatgatacggtatatgataggatatgatgatacgatataatatggcctgtgatgaggctgtgggaacagagaaaggacactgaatggaatcttgtggaggtggggagatcatagaagcatttccagaattgaggttctagccatgtgtccccagtaccctgtgatggttaatgttatatgaactttactgagccatgggatgcccaggtatttggtcaacattattctgggtgtttctgtgaggatgcttttggatgagcttaacatctaaatagggagactgaggacagcagattgccctccctaatgtgggtgggcctcatcccatcagctgagggcctgaagagagcagargactgaccctcctgtgagtaaaagtcctcctgcctagctgccttcaaactggtacatcagccttttttccctgccttcagactggaactgaaacatcagcttttcctgggtstccagcttacagaccccctctgcagatcttgggacctgcccacctttctaattgcgtgaatcaattccttataatgaatctcttcatgtgctcacacatacagacacacacacacacacacacacacacactcattaagtgcttgttaatgtctttttaaaagtgggttgtgatgaatatctgtggtatttagaatccattagccacattaaaaagtgatgtaaatttattttatagttttaatatttataatatgccagaaattatatcttttacaactatttatccttatcattaaaaattttagatgttacctaaatgcaaatatgtagagattgcattgagtctgtagactcaaaatcccagtgacattttttgcaaaaacaggaaaacctattctaagcttcatatggaagcccagtggatccccaaatagccagaacaatctgtttggaggactcaacatttcctgatttcagaacttactacagagctacagtagtcaaaacagtgtgtgttaccataaagacagatacgtagacccaatggaatagaatagagagcccagaagtaaaccctggaatatgtaattaaatgattttcaacaagagtgccgagagcattcaattaaaaaaaaaaaaaaaaaaaagtcctttcaacgaatgaggctaggaaaactggatatccagatgcaaaataatgaagttggacccttacttaacaccatatgaaaaagataattcaggacagatgcagtggctcacacctgtaattccagcactttgggaggccagggcaggtggatcacttgagccaaggaatttgcgaccagtctgggcaacgtggtgaaatcccatctctaccaaataaaaatacaaaaattagccagttgtagtggcgcattcctgtagtcccagctactcatggggatgaggcgggtgctgaggtggraggatcacctgagtcctggggaggctgaggctgcagtaggccgtgattataccactgcattccagcctgggcggcagagtgagaccttgtttcaaaaaaaaaaaaattaactccaaatgaatcaaagacctaaacrtaagacctaaaacaataaaactcttagaagaagacataaggggacagtttcatgacattgaatttggcagtgtttacttgaacrccaaaaatataggcaacaacaccaaaaaatagacaaattggacttcatcaaaattcaacatttttgcccttcaaaagattctatcaacagagtgaaaaggcagcctatggaatgggagaaaatatttgcaaatcatatatccgataagagattaatatccaaaatatctgaagarctcctaaacacaacagcaaaaaaccaattcaaaaatgggcgaaagacttgagtagacatttctccaaagaagatatgcaaatatccaataagcaatgaaaaggtgctcagcatcactgatgattaaggaaatgtaattcaaagctacactgagataccacttcatacccattaggatgtctattatcaatagaaaacaaaaaagagttacagagtatgtagataagttgaaactcttgtgtattgctgctgggaaagtaaaatggtttagccacttgaaagatagtattgctgtacctccacgatattaaacatagaattactatatgatccagcaattctacttctgggtatatatcccagagaattgaaagcaaggactgaacccatgtttttataccactgtttatagcagcattattcacagtagccaaaaagtggaaacaacccaaatatccatgtatgggtgaatgaataaacaaagtatgctatatacatacaatggcatattatttagccttaaaaagaatgaagtcctaatacatgctacaacatggatgaataaaactttatgttaagaaatataagctacacagacaaggacaaatattgcatgatttcatagaggcaaaacagggactgtggggagaggagagttgcttaatactcattaatatagagtttaatggtttaattaataccattaatacagaatttcagtttggagtgatgaaaaagtcctggagatggatgatggtgatgggtacacatcaaggtaaatgtttttaataccactgaactgcacacttgaaaacagttaaaatggtgaattttatgttctgtatrttttaccataccaaaaaggacataaaacatattgagatagtttttgagatttgtagatacatggatctttagatttctcttagggaatgtgtgyacagctgctcatgtatttggagaattcatgtctagtgtccttcacggtctgaatcyagccctcttctctcacttcattttccttgttccagccacctggcagctcacacctgctaggcttttgtacaagttgttctctctactttcagtgccccttctccccgcacccagttgctgaatggaatctgatacttcaagacccagcccaagtggccaccacatttggaaaagttgtgctcactcctccagacgtaacctgtttcttcctctcctgtgttcccaaagaacttttctgcacttcagatacgtcccatgcctgtccccaaacagagtgaattgttggacagagatggtgtctcacctttgcaactcctacccatagcacagagcaaaacttgaagcagggccttagtaaacagttcagtaactgaatttttaaaatatatatatgtgattctttccttataaccctccsctgggagagtagacagacctttcgctctactttccaaaaccagaaaatgagacacaaagcaagttcacaccttgcccaggccacaggctcactgtggctgatgggaatagagggatagcatcagaattctcttctgatgatcctagtctgtgcagccaggcactaaatcttactgtcaataagttaagggtgtgactttattggttataaaacacatgttctcaaatatttgccatagatcctgtccataaatgaagtgatcttatacatatttctgctaccccttccataatagaccccctgccactgttccaacaccaggaggttggaaacagctgtgtcattaatgaacgacagcagatcctaaccagtgacctccagatgaaaggctcattatttccttactggtctcaagagctattcagtcccctagcaagccagctcagaatttggactgaagagtctaagccttgaactataaaaaaaatttacgaagtccttgacacaatttggagcgattatgttctattgtgccaagaatttcttattaaaaatcaatttaattgtgcataccccatctggtcggtattatggtcttttatggsgggggggggraacacgattttgtgtttacctgatgttccatagagtaagcatgtagttttgcagaaacagagacattttataacgctgagaaatgagtaattaaagaaaatttttaaatgtttaccagacttctttttactaacttttgtgactttgagctataagattcaactttcttgcgttagttgggattttaacggaaaagaaaatgccagactaaagtaaaaaatgtatgtgtgtacctcatctgctacatttatttccatgtaataatttctattttatactctcragattaaaattccagtccttttattcttttttctttttctttttttttgttttgttttttgtttttgagatatgatgtcatggagtctgtgcacgatcatggctcactgcagcctcaacctctctggctcaagcaaccttcccacctcaggctcctaggtaactgggactacaggcatgtgccaccatgtccagctaatttttgaaaaaatttttgtagagacagggtctcactctgttgcccaggctgatctcaaactcctgggctcaagcagtcctgctgcctcaacctcccaaagtgctgggattataggtaggagccactgtacccagcctcaagtccttttaaacataacctagatttcccattagtatttaatttgtgttattttttattcaaggaatttggataatgaaagatgagaagattacttctgattgtctgctaggccagtctcaaccatattagcaaaagattgcaatattttcactcaaaatattgccagatatattttaaactggagtggttgcattttgttgtacaaaatggggaagatttttaaagcttgcttttcaaacagcttataccctaatcttaaaaggatcccttggcactcaaggaaaaagatctggataattcataaattttttggtgtgcttatgtgcttatagttgttaagtattttgttcaagtgaccatcttaaagtatcagtaatataataagttagtagccataaatactgatttgattctgaattgccttaacttaaatgttttaaaaattacttttaaataagtaggattgactgctagtcgctgcagtctactaaacacctatttgatatgagccataatatctttcatcttctctgtgccccgatttcctcatttgtgaaatggaataacaccttttgttaggattgttaagatatttaaattagataattcatctagagtattgcaaggttcttggaactgagtaagccataaatacactttagcctgtatcatcatcaaaaataacagaaatgactgttctgcagtgtgtggttttcttatttaacatgctcttttagtgagcttttctctttaacatcaagtattaatattctgcatatatccatttattgagcacctactgtgtgcccacctgtgtgctagatcctaggtgtacgatattgagtggaatcaatataatctctgagcacatggggtagccagataacaatacaataaaaattacagaatgtggcaagctcgaagagaaaaatgagtgcggtgtggtgataaagacaagcaagttctcttcttctacataattctttgaagttgaagtgatgcttatttgttacactgataataaaaatgtataaggaaaaaataacttgccctcttctggctccatgtctgctcaggaatcaatagaaacagtttggccaaccattcatacttttctttgcactcatacaaatgtatgtaaacatacagcatttttgttgtggtttttacaaaaaaaaaatggattctgtgcattgctctgtaactttgttggtttgccttgaaaagtccttagaagtgttattagtatgtgatgtttgctgctggcattttacctacccaagactcagtcagcaatagaaaactctccaaagattttatagatgaggccctgtcattatcacggtatcctctctggtctccatttaattctggccactccatcccataatttattgaacagaaaaagattctctagggtgtcttactactactactgttattattattcctgacaacctttgctctataatagcatttctgatctttttcccttgatttcctgcctacttacctatttatttattttgccttttcctttgtcaatctcmtgctgtttcttgggcattgtttcatttccatatttataaatttaacattttaaaagataggtgtttctagttcatagatttgctgcaatcaccccctactaaagaacttcagggttttttgtttttttttttgtctgtgctttctattttgttttctgctaccaacaatactgcaaaacaagatgggtttttatataccgctgctttcatttatgagaagtggatttccagaaatagaatttctagacaaagtatatgtttatattttatcttactacmtatggccagatcaaatttcaaaaaaaacctgaagcattttracatttaaacagatatctttggtgccagtttatcagcccagacctgatatgcaaattagtagatcgtgatgttattgccacttcagtaagaaaccatatgttaatttacctcattattctccatagggtactttttcacttcagtcctctaccagggatcctgaaagagcagagtaaatagaagaacaggtcatcccttttccacattaagtagtcgtttgttaagtgtcggctgttagctgagagcctgagagtggcggcaggtacaacccgccgaggttggacgatggcagcgggacgtccagacaggagcctgtgcaattagccaagacggttactgtgtttttggcagtcaggcagcagttaaagcaaagaagggtcttttttttccaagaaggaaaagccatttaataagtttgggtcagtttgctcataacaacactacatttgaggaccaaaaaccccaggagcttggcaagccagcagtgcttggcaagtcttcctaccagctcaccaagtctgaggccatcctgcagggatctggctctctgggctttgactgtattcatttaacagcattcctagttaacaagaaactaaaggcagaggaatccttttcccattagtccaagagtaaaatttagtggctataagcaagccaccatccaagtaactgcacgtcaaatgggggacggacagtctgtttgtattgaaggctctgcgtttagtgtacacagctgggaacttgtggcccaccaaaaatgacatttatatttaggaattgggtggtgctgtctttttggtgtatgaattaacatttgtatatgacttactagtgtgaaagtctgattttataatgtgtcagagagccatcgtttacctgtctcatgaataaataaaataaaagctaagtacgtttstataaatatttaaaaatacactgccttctcatacttttcccatttcacctatggaaaccttgccaaaatgaaatcaaatttgagcgtttcaatgtaagggaaaaccagctcatggattttaaaattaagaagtggatttttttgtttgttttgtttatgttggctttgggtttgtttttttttttctctaccaagtaaatagtttcgatgaaataaacaggtccaatcatctaatgatggattatttgaatgcagattgaaattgaattgaaaatgttgagaatgagcttgtttatgcttctcaaaaagctgcagcacctgcaactgataaaaattagtgcaaacatatcaaaagtctttgaagaaacatgtggccaatccagtgccaacttggacagartcagaacactggctgcttagaggaaatatcccaacattcagctaatcaacaatgttaaatgaaatgaagaatgaaactttttacatgactcagtattgcttggaacaatgttaatgtcaacaaggtcagttcatggaaggagatgctagatttcttaagatttttaccccctcgtatgttttcaacagcttgcgtgtcttgattataccgaattcactcagtctttgaaataatttctcattaataatttacaaagttatgtgtttgttttcaggatccaaatttgtgaaggtagcagattcatatccagttataggaatctgttattcctttttatttgaaaaagagtaaagctttctaaacccaagctcccatacatataagcagaatcatggcttcatgcaaccagccacatgttattattttgtttgtaacaaacatctgttagaaacaagatttctaagttttgtatcgggttgaccaaataaacttatttctttagtctagggtttctcaacagtggcattattgacattttggactatatgattttttgctgtagagagctcttctgggccttgtaggatgtttagcagcagcatctttggcccactcaatgccagtaggctcctcccccaaggtgtgacagtaaaaaacatttccagatcctgtcaaatgtctcctcagaggcaaaatcacccctagctgagaattactgctagaaacagctatataaataaaacatgaatgtgttaaacaagtctccctctttcccccagagaacacttctaccacctaaagatgatgaatattaatgatcccttatgtttcccagaaagttgccatgcatatatgagtatgtacatctgttctgcacagtcatggccattcaatactacccttattttttcatttttaatgtatctgtgagattcttatcttgcagtgcatggggacttatatttaaaattaaatctttttaaacttacttagagttcattacaggatgagccgtaatttctttaaccagctttcaatatacatgcaggctctagttctttgttttccatatataagggtgtggcattgttttccaaataatgccataccattatatttttgtgttgaatattatgtgattagagctataaggtataatttagagtatgtccctacaggtggaatcacttgttcaaacgaaaactaaattaaacatatttatagacaatgctatctcaccagctgggtattacagtgttgtttccccagtttaccaarcttttatatttttacccatctgataagaaaaacagttatatccatttgtgtacatgtttaataaaaatgagatttcctgtgtttctaagccttttcttccccctgtgatcacactccatatactctttgcccatttttctagcagcttgtagggttctttctgtctgatttgtaagaactttttatatattgaagaaattgggcctttgttttcatagatattccaaatatgtgtgtactattcatttaatatcagttttctttcaactttgttaatatttgtatttatagaaattagtttcaratttgtccctcatttctaagtttaatgtcttacaggagtcmtgtttcacatagagcaaaataatggttttcatgttttcttccaatgctttcagagttttgttttttgtgcttaaatattcaaggcatctgaaattcatttgagtatatagagactgaaatactacatattcttttccaaatactatggtaatttatcatgtgataagggacatttcaaacaagtgggataaagatgacttattaaacaaatgctgttgacataattgctgatatttaggtgcaaaataataaagctgggtccgtacttggtgcctgcaaggaaccaacagaaggccactgtagctgactggaggagatgcagtgttgtcagaaagataggtgggggcctgattgtgttgggctttgtaaatccaagctaagaatttgatcttttttgaatagagtgtctttttcatgttcatttggcatgtttctcttatatgtagcatatattttggattttatttttttatccatctgaacttttatygtatgttgggctttgtaaatccaagctaagaaactgatcttctttgaatagtgtctttttcatgttcatttgacatgtttatcttatatgtagcatatattttggattttatctttttacccacctgagcttttattttttattattaatataagacacgtgtttaatattacttctgtcatcacattttatgttacttttcagcttttgatgtttccttggtttctatcttttactaaaattcctatcacactttatttccctaaggacttgtaaacatcttttactctcttttggtattgtgtactgctagagagaagtaggaagacttcttgatttttttctctttgttactttttctgtctgaatatactgaagaattgatcctataaaatcttaaaactcattaatttctatagcaggacatgtgtgggtattgatctttctgtgtctgttgcttgttttgtttcctaggatgaaggatcccctctctactggctgattagggtatttcagaaaattttcttctgttatatctttgaacatttttttaacttctattttcctctttttttaaaatacatctttttgggaattttttgcttatctttaaagtcttctgacctttgctgagaattgtgttctcaagctttactacctatctctacgtgtggtttcagcagtgtcagttcttttttttgaggcagagtcttgctctgtcacccaggctggggtgcagtggtgcaatcttggctctatgmaacctccacctcccaggttcaagtgattctcctgcctcagccttttgaggagctgggattacaggtgtgcaccaccacgcctggctaatgtttgtatttttagtagacatgggttttcaccatgttggaccaggctggtctcaaactcctgaccttaggtgatccaccctccttggcctcccaaagtgctgggattacagacatgagtcactgaaccctgctagcagtgtcaattctggctttcatttctctttagggtagcttcagtttgtaacaatgacctcttcctatttgtctctttctttgctatattagacatcttattgtaactttcgttgcaaagaaaattcactttttcattagctctcttagtctcaccaagaatgtttgagattttcttcrgccgtgtggcttgttctcctggaaagattatttcatgtgcgtttgtcatatcctcttatttttttctataatatttttggaagatgtctaggggaaaggggattccaagttgtcttggagcacttcctgctctggtctcctatcactttgcaatcataagcacctcccttgctgttgtttctttcccttaggagaggaggcctgtatgccctagaggaaatttctgtgtgttataggtttctcttggatgattctgcattttttttcttttcagttcaccttgaaacttacttgatcagtgtctgccaagttgattrtcatttatattttctatactgccctgctgtcttccctgattgattcctgaaaaaaaggagggaaaaagcatattgcccttcagctttaatttgcctgctgtgttgaatccatccaggattcaacctctgcctctgcttgccctgacctctatattttatctattttatcctctaaattagagttggtttggctatttcttgcgttgtttcacctatttctttgaaaactttttttacttggtttaatctgtagattcggtctgctgtgggcattctctcttgatttggtctaatctgatcatatttgtttgcatctattgtatatcatttgtagttttaattaaagctactcatagtttcattgtgtatgtgtttgctttttttttttttttttttttttttttttgagacagggtctcactccatagcccaggttggagtgcaatggcatggtcagagctcactgctgctgcccaccttttaggctcaaggaatcctcctgccttagcctcccgagtagctgggactacagaggtgtgcatcaccacacccagctaactttttattttttgtagagatggggtctcactatgttgcccaggctggtcatgaactcctgggctcaagcagttctctccccctggcctcccaaagtgctgggattacaggcataagtcactatgcccaggctyttttctatttttatttgttttttctatttttagttgataacaagacaacatgttaactggattttgcaataaaataaaatacccactagatatctttttggtcaattgtttgaataggagaactcagaattatggcacagtcttgggaaaattaacttaaaacccttgaaacagtttactaatgtgtttgaatctgatgtggatccaggctctcattgcactaaaagtgtggttgaagtattgactgccaagacctccagtggtagggagagagtggggttgaaattgtggttttagggatggctattatttgaataaatgttgtaggaattttccaagcacagaacacagcatgaatctctggttcttagttcttcaccaatatttcttcaccgagaatagccagacctcttggaagggtagttgaaattgagtgactaggagagagagcatcagatcctacaaagaatggtgatgacagaggatggagggaattggggtgatggtcaaagggtacaaagtctcggacaggaggaataagttgtttggggttttttgagatccattgtgcagtgtggtgaatataattaatagtgcattgtacatttcaaagttgctaagagtaaatttcaaatattctcacaccctcaaaataagtatttgaggtgatagatatgttagttagaatgacttaattattctacactgaacttggaaactttaatatcactttgtaccccataaatacatacagttataaagggtcaatttacaataaaataaaaagttttaaaggaaaaagaaattaagagtgaatagaagtgtggaaggatttttgaaagtcagcaagtttatcttggatttaggagggagccctagtagttttttgaacagggtaatgacaaggtgaaagctgtatttaaggaaaacttcatctagcacttgatttggcatttaatttgatctcacggggacttggtgagtacctgtttgtaccaagtatcatactggatacagtagtgcacagagcagcatggggaagaattcctgcttcaagaaacgcagtctggtggagtcaagaaactgattttgaaaaatctgcctcagtaaaatttcagtaccagagttgacctcaactctggttgtcatggtgtctgttctatgttgccagttaggttctaccacagcagcggtctctgtctgtgatgatgtgacacagataacgttgattctatgatttgtatgggacactctaaagtctgccctcaatcagactctcatatctcatataaatgtagctgaatattcagcagcaactttttgaattccatattttcatgtttgcttccttctaagtcaggtttctgtcctcccggtggctcggccctcttctaccccagtcctgctgcctccgtgtattcagattacatctggatgatcacatctcatataaatgtagctgaatattcagcagcaactttttgaattccatattttcatgtttgcttccttctaagtcaggtttctgtcctcccggtggctcggccctcttctaccccagtcctgctgcctccgtgtattcagattacatctggatgatctttccttttctgacagtgttttttgttttttttgtttgtttgtttgttttggtttttattttcttgagatgaaatcttgctcttgtcgcccaggctggagtgcagtggcactatcttggctcactgcaacctccacctcccaggttcaagcgattctcctgcctcagacccccccgagtagctgggattacaggtgcgtgccaccacaccccgctaatttttgtattttcagtagagatggggtttcaccacgttggccaggctggtctcaaactcctgtcctcaggtgatccgccaacctcggcttcccagagtgctgggattacaggcatgagccaccacgcccggtctctgacagtgttttatcccttgycatgtacactaattatatcctggcacttggctctgtagttgtttttatatcagtcttgcctaatcggttagaatcatagactacttgaaggcatgaataacagcccacattttatctatttatttatacatctctcattacttcaaaaaatgatttgaacatgtttcttttatatgattgtgttttgaccttggtcaaggtggtagacatctgattaaggagggtcaataatttatgaactcagaacacacagaacagaggactttttgttgttgtttttaatttatgatttatatctctttgaaagtccggcaaagacacatcrtatttctcaaatcaactttagagaaaaacaagartgtgaagctgagactcctccagtcaatgagaaagttttgataccaaacctattaaatgcaaattaaatctatttttctatgaacatgtgcatattatctctgaaagtagatgtatgccttaaatataaattttccttacaatatggatttctgkgatatcgggaatctatgttttataaaggaacaacygctgcagtccctgtggctcatgattccttagcagctgtgtccagctggtggtccacattcccgctacttcttcagtgaatggaaacatttaggtcaatattgatataaaacttcatgagctttcttctctttcagctttggttcgcctttgttaatggattttctgggcagattttatttgaacgttggtgcatcggcctgtacaatgtggtaagcattcttcatctctatctgatagcatgcagaacttagaacttcagtgacattccttcactgtttatgtctgggaagtgtatctgagtcaatcatctgtatacttagcaggcagcacaaatacatctttgggccctttgttgctgtgaaacatcctgcagaagcccaaactctccacacatggtttcaatcatagcagatcattcctgaataaccccttgaaattattaacccatatatcttgataatagaccctygttacccccttactacatgcctgtgcaacactttcgtgtttttagctcaagtacaaatttctgaactacacctaaactcattccgcttcattatttttgttctgaattcttaaacatagatacaaatrtacagtgtgtgatctggtgtccgttctgtccttcctgaaagggtatctgtccttgtggaagaacattttcttctgcagttagagctaaaataatgaattctgacttccagctactgtggaggatggtaatcagctcatctggtattttttatgattttcaagttccttttttattactttttataactatgatgaattcagaagctagaaataaatataaactgtagctaaaatggctcagtagctgcttagctttcttgctttttgtttcactggcaggaagaactaaggggcatgtagagcactctagagaccctagaatggcccattttttgagttgttctctcacttgccttcaatcctaactctgctccgtgggaatttacattctgaagcagccatcataaataaatgtagatggaagttaccagacatacaataataaaacctatggtgctataaatccactggtggctagatatttaagtcttccatgctttcacccccctttattgaataacctcagtgctgggtgctgatgtaaaatgctgaatgcagtagtttgccctggccctgtgtagcttgcaggttaagagggtcaaatgtgtggattcagacacctccaaggaggactgggtccagatcttgagttgaaattgtgttggtgagtcagtaactgtgttaacttgctgcaaagtcactagcacatttcctcctgatactgatgccctaaaagacaaagattaggagtggtaagaacaggacagaattgatgtccattccctcctgtgctaaaaaagctactctgactacctacccatggatgggggctccagggcctcccctttgtgtactaaggggagatcacagattgctaactctgtacctcctgaaactattttaagtaggttaaagctatgcaaccatttcggggaaatatgcagaatgctccacgattattcagtgcttgaaagggtcaggtatcaatggagctgacacttcacacaaacacatgccacatccctattttagaaacaaaatgctgagacctaggagagattttgttgtagagccaaggacaggtgtggttatatatatatatatatatatcacctgcttatagtatgagtggattttagcttgatttctatgctcagggcatgagggctggattcttttcttagctccatgcagtcttggccaattcaaattaatccaacagattttattgagtgcctactacagataagatgctgacaggctagagggcagtgttggtcaaartaaggcccacagaccatttgcaggagaataactagggtttatttgaaaaatgcagattcctgagccccaccccagattaacaaagagtatctcagacatattgcagtttttgcaattttttttttttttttgagactgggtcttgttctgtcacccaggctggagtgcagtggtgccatcactactcactgtatccttgacctccctggctcaagcaatcctcccacctcagcctccttagtagctgggaccatgggcaaatgccaccacagccagctaattaaaaaacattttttttgtggaaatggggtctcgccatgttgcccagattggtctcaaactcctgggctcaagcagtcctccctcctaggcctcccaaagtggtaggattatagtcatgagccgcaaacttttctagttattgttatgcatgaccctagggttgagattatattttatgcagtttttctgtcccctaaactatacagagagtacactgtgatagaaaagtgtatttcaaggtgaaagggtctaggttaccactgagtccacagtgcaggcattgaagtgggctgccagtgagtgctggcagttgggatggaatggtcaaggatctgccaggtgaactccaatgtgccactgggctctggacttgctcatactggaggggccaaaccttctgggaacatggagatttgcccccatgaaaattgttttggtgacatttgtataaaataaatagaaatatagagaaaagttacaaaaaaggtacaaagaactactatttacccttcacccagattgaacagtaattagcatttccaccaattgcattctctttctccatacttgtacgcatgcacacatgcctacactcatgcacacactagtgaatgcatttatttctgacccagtggggtattacaaacatcatgtcgctttcctgcttaacactttagtcaatagtagcaagagcttcctcttatacaaccgaagtataatgatcaaatctgaaacatttaacatggatttaatactattatctaattcatcttaatccatattccagttttgctattcttgctccaataatgccctatttagcaacttttccagtccaggatcattctagagactgcctgcaagagaacatttgtgatgtggaaggcatttgctagtgatcctcctcttctgggctgggttctccgctgtcattttcttcatgcagtatttctctcctgctttttcttctaaatgtactctttgtttgattccgcaagtcagctaaagtagcaagtcgttgttcctcaaactaattttcttttttttttttttttgagatggagtctagctctgttgcccgggctggagtgcagkggtgcaatctcagctcactgcaagttccacctcccgggttcacgccattctcctgcctcagcctcccaagtagctgggattacagtcgcccgccaccgcgcccggctaatttttgtatttttagtagagatgaggtttcactgtgttagccaggatggtctcaatctcctgaactcgtgttccacccgccttggcctcccaaagttctgggattacaggcatgagccaccacactcagcctctcaaactaattttcataacaagttaatagcattaaaacagacttgaggccgggcgtgttggctcacacctataatcccggcactttgggaggctgaagcaggtggatcacctgaggtcaagagttcgagaccagcctggccaacatggtgaaacctcatccctactaaaagtacaaacattagctgggcgtgcccgtgtgcacctgtaatcccagctacttgggaggctgagacaggagaattgcttgaacccgggaggcggaggttgcagtaagctgagatcacaccactgcactctagcctgggcaacagagcaagactctgtctcaaaaacaacaataacaacaagaaacaggcttcttcctaagtaatgaatgaatgctgtcccagaagattttcattatatccatagtcaaatttctttatttttttttattttttttgagacggagtttcactcctgttgcccaggctggagtgcaatggcgcaatcttggctcactgcaacctctgcctcccgggttcaagcgaytctcctgcctcagcctcccgagtagccaggattacaggtgcgcaccaccacgcctggcaaattttctgtatttttaatagagacggggtttcaccatggccaggctggtcttgaactcctgacctcaggtgatctgcctgcctcggccccccagagtgctggaattacaggcgtgagccactgtgcctggctcattttgttytgtgggtagaatgagactaaaaataccacgaaggaccaatgctgctaggatcaaatggatttcagctaaattttatgtcttttataatgcagagaacactctagtattatttgaccacttgcagaaaatgaatcctgttgtcaagccagcatcgtttgaggaagaaaactgtaggccagtctcacttataaacataaatacaaaaattctacgtaaaatattggcaaatggagtccaataatatattaaaagaaaaagtatgtgacaaagtaagatttattttggggatacaggagtcttgaaattaaatatctttctaaatatcactatatcaagaaaataagaaaaacatgatcccatcagcagatgctacaaaaacgtttgaagcaattcagctgccattcccaaaataagaactctaaataaaatagaaacagaaaaaagccatttaaccagaattcagaccatttacaaaaaccagtagcatgctgcccaaaatggtaaaattctgaaayggtttcatttaaaataagaaattaatcaagatgcctgccatcactatataattcattgttttcatgttttyggcaactgcaaagaagattacaaatattgggaaaacagtgaacaatttctgtacktatacacatatgctcacagaaatatggtaatgtaaatatgttcatatatgattgtgtatctagaaaacaaaagaaaaaacagtagataaatactcgaattataagagaatttgataaagtgwccagataaatgataaatatatttttaaaatcaatagcctttttctagcctagcaataaacagcttttttttttctctagcagtggacacctagaaatgcaaaggaagtacgaattctttcaaaaaagcaattaaaattatacattgcataggaaaaatgtttacagtacctacatttttaaaagtcttattgaacaaatggaaaagcatactaytttcttgtatgggaagacttagtatcataaaagattcaactcttctaaaattaatataaatatatatgattccacatagactcaatcccaacaggtgaatgttttgggaggaaagggggaagttgcataaagttatattaaaatataaatggaatttacacatatctgagaataaatatgtaaagcatgctcaaaaaaagaacataaaagtagacttatttttactaaatatcagactatactatgaagccaccataaccaaatcactgttattgacaaataagttggagattctagaactacattcccattctagagtcagatgtgtaatacatgaaaatttgattagccttaaaggtgatctttcaatgtagtggggaaagtttggcctcattaattatgttatcacaattggctctttatctggaataaaatggactcctatatagaaaaattaattccagatatattaaagacttaaatgtggaaaataaaatagtaaaatcctacaagacactcctggaaacatgtacttttcatggaagagtaacttctgtagccgcaattggacatgcagaagcatttcttggccatttaaatattaaaagcttttatatggcaaaagaacccatttaaaaaaccaatagacaaagagtgcatttgcatgaaatttcataatataaagacagggttgatatctgttctactcaaagaactctttaaaaagaggataagccatggatagaaagtagacaaaagacatgagtagacatttcacagaactgcaaatgcagatagccagcaaatgtatgaaaacctgctcaaactcactgatagttggggaattgcagctttttaaagtaagaagtagacaaaagacatgagtagacatttcacagaactgcaaatccagataaccaacaattgtatgaaaacatgctcaaactcactggtagttggggaaatgcagctttttaaagtaagaagtaacatctttaatttttaagactggagaacattaaaagaccaatgtaacaaccattgctgatagggaaatagcgaaaaatctatgattttcttttgcaatgggagaggaaaatgctttcaaaatcctttgaaaggcagaatctagtaaaattaaaaatgcatgtatccttttaactctcctgctgggccttcttcccatagagataaaagaaaaagtctgtatgttataatatagtatagatatgtattacataatgtttgtggtaacaaagaactggaaagaaaatgaatgtctgtcagtgggtgaatggctaaaaaaaatggcacatccatactatgaattattatgtgaccattaaaagactgcattaccatcaaacccaagggctttggggggctttctgtaatgtattgtttagcaagaaaagcatgatgaagaaaaatgtgtgtaaagtataatgtctacctttttggttggcaggagacagggtctcactctgtggcccaggctggaatgcagtggtgcaatcatagctcactgcagcctcaacctcctgggctggagcagccctttcacctcagcttcccaagtagctgggactacaggcacacactctcttggtgtgttctgtgaaattgagacagggtcttggtgtgttgcacaagctggtctcgaactcctgtcttggcctcccaaagtgctaggattgcaggcaggagctacatgactggccagtgtcaacgttttatgaaacaaattatgatccctaacgtgtgtgtgtgtgtgtgtgtgtagtatggtataggcagagtggaaaatatgtaggcatgctgggcttcattatagcatggtgatgaagggcaggggagaatctgaagatgggtagaaggagaagctcaagtttaaaaaaagaaaaagactgccacgtaaacagcaggcatgacatcacatgtacacatggatgcagagcaatggaggtgagagtatgtactaagaaagtgtgcatggctcctggcttctggtagaagctctgtccagctataaarcaaamaatttttgttgttgtgaggaaagtgagtgcaacaagtcccctgtggatttctccttgaagtctttgtagcacattgaaatcccagggctgctttccattctgctgtggactgaaggaagagtgtgagagttttactgactctactcaccacacatctgattgcctgctcccaatagacttgggaacagcttcctctggccatatactccatctccaaatagctagtgtgagttcagaattctcgtacagacacacgtccaattcccacaggcctgagagcttgctgggtttgtgggtggggatttgagggacgctcagcagcaagtgacccaggctgtgtgaaccattcccagaaccaagcaggagaaggaccctcagggccaacatgtcctgagttaaaatgacatgtttcttccaagcaccttcttcagctcctgcttgatttttctaatatacaaatgtgagtacaggtgaaagtcacaagtcttgcaaggcaccatctgcccaagaactcattgtcactggagattgtttggtctggtctccttcctatccttgccttacaccgcaccctcagccagccaccatcctgtgtatcttagaaagttcctcgtcctttaaatgacaacaatttaaagatcgaattggcttttattagccattctggaattgggtaacatctcatttcatgaaacagaatgagtgctccgatgagctgagcagaggaggccagctttataggcagaaagggactaaggaaacagaagtagaacaaaaagtgattggttgtttcaaagtggctttctttacagagttcaaacaggggacttctgtatcatgctgcctcaggtaaactgggccctttctggtgcctaggtaaactggttgctgtgaatctcctgttttttgttttttgtttgtttgtttgtttgtttgtttgtttttggaaaactggcctgtttcaaagtttagtttgatgacacagctcttagcacaagtaactccattttggtttggtcaggtctgctggggccgagtgcaggagctcagtccaaacagtggcctcctataaacgttgttcaacacctccaaacaggcatgctgatgtctcagagctttgtaaggggtgcatctctcatgggactccttcctcgcccacatccctgtcatcttgccaaatcatgttggtctaataccttgcaggtcagatactctttggtgcaagaatcctttggtgactctcccttctccttctgcgtcctcccctaacaggtattaatagttttgcagagctccgcgttttgtatatttacctctatgcctgttgccccactgccctccyccacttctgcagtagatggcgttcctggaggtcctaattcctttccttctttcttctgtttgtaaatctctccattcctggtgcttatcacagtatctagcccataatttgtttattgtaaatgtctgttgaatgaataaatggatgaagtacattatgcttcctgaaatttgagtataacgtcagggtggaaagttgtaaattttacgtcagctagcgtgagcagaaaacaaagcaacacttcagacagctaactgtggcatgattccacatcagtcttcgttttacaaaggaaggtagttgctaatttaacaagaaatcttggctaatcagataatgtacgatgtttttagtgttcagtgtattcatttgatagtgattaacgtaaaaatggtctttcatttatttcctttgtttggagggtgtctggggatctgtgaatcatggagtctcaggtttggacttgactggaagtgaagtcatcatttggtagaagggaacaatgaagccgtgtggatccgaagggctgcttttaatggctcattgttctccctgcagattttcaccgctttgccgcccttcactctgggaatctttgagaggtcttgcactcaggagagcatgctcaggtttccccagctctacaaaatcacccagaatggcgaaggcttcaacacaaaggtaaacagagtgtgatctcagaactgtcacctcagaaaggcgtggctgtttgattctagtcatctgcctaggagatagttgaagcttgagaaagaacatttgagaagtgctgaaaacatgatccactcaccccaccaccacacacacacacacacacacacacacacacacacacacacacacacgccacaaacccagtgaattcaasacgccttctcaggygacgggtccatgctgtgtgggctgcaacctccagtcccagcatgctgactccttcccgcttctccccgtcagcccctgacatcagtgtgggcagcagttcccacagcccaggttcaggatccgctgtcagagatcccccttgcgtggtcctgcagccccatgtggaggcctgttggcagcttacctagctgttgctgggtttgtcatttgaaataaaatgygtctttagctagtgcgtaaaattgactagatatgaactcagggatcacatgagttgcaggggatttggttttgtttttctggaccagagaatcagaaaggaaccaaaaaaaaataaaaaaaagaaagatataggtgatcctgacaaacccgcgccaaagctgggtggggtgttaaaggggtcgtgcagtctcagacagcagaggggtctgccacacagatgtcatttgcggctgaatgtggcagagtgcttgggtgaccccatccaaagaaaagggagatgtgtgcctgggcacagaggggcgagatgtgagcatggctgcacggccttgtttctgcctctggtctttgcgcaggggggattcagaagtttagacagaggtctgttgcacagttcacctcctgtgctgtgtgctggtggcggtcatgatttgcgtgcatggttcctgggccgtcagtgagaaggacacagggagtcacctctccaggcctcaaggagagaacagtctcccagggcctttcttctgagccagatgttcctgacgtcccttacagctgcttttttctggggaggctcactagttacatccgaggcagggaagaaacagaagggctccttattggttctaccgtctcccacatccaaagagacccgagggactcattttaccaatccttgttgactgtgattccgttaatgggaaaatatgacccattttcactgcattatttacataaatccattttctacagaatttgaattcaaaggccatttgaggtgggaagtaagtaagagctgagaatgcacggaaacttatctgcaggcactttgaagaattttttttttttttttaagtagagaggtcagagatggtgcaaaatgaacatttaaagcaggggaaaattccattgtcttataacatttttcactattttctgttgtcttaccactacttaggctcaaactatatgataatttccagggacaacttgtagaggtttaaataaatttaatctggctttaatagttaataactcgaggggggcagccaagatggccgaataggaatagctctggtctacagctcccagcgtgagcaacgcagaagacaggtgatttctaatagttaataactctgtcatcacggtggttaaaacaatgattgcgatgtattagtgaaactaaagtttagaataaactaaaccttgtgttcttttttctgacctttaaacattaaaataaagagaattttcaaatatgcatgttatctaaaatcccaaaaataaaagaagaagttgagtgagagggatttgaagtagtaaaacaaaagagtgagaatgccatgtaaaaagttacaagtggaatgttttcagtgcttttaagacatcccatctgccccgacacagtttaattgttaagaagagacacagttttagtctcttcttaacaattttgacctagtaccctttttctggatgtttgtaaaatggtgttgtctctcttacaatgctaaagaaaactgatcagagtgaatttttcacatgtggatagattgtgttggtctgcatacatgtgagtagatatttaggtctttgtaactaaagtaatatgatctggagataatccagtcatttgtatgtaaaaattaaataatcgatttgggtgggttttttttttttcaaattcaagaataatatgctactcctggaaccgtgcagcgcacggccaggatccttcacaatgtggcgtttgttgagagtttcacagaggtcaagcgttttgggcagctcctgactcccttggtttgtttttccttaggttttctggggtcactgcatcaacgccttggtccactccctcatcctcttctggtttcccatgaaagctctggagcatggtaagggctgtgtgatttcacctgtcagcaaggagctttgcagccgctctgctgcctgtgtgttcacaatttttttttccagttctgcagaacaagagatcacaggaacacattttagaggaaaaacatacctaaagcataatgagagctagtcccaggtttatagctgttaggtttcatcagttctggccttgagaacccattttctttccagttgactggatagtttgagtactaggaatactcaactcagttttaaaaactatttgagtcagagatcttcaaggaaagccctgtactgtaatgaaatgttgatgctttttgtccgtggtttgaaattctcttttaattactttgacttttatttctgagcctcccctacccatatgcagaataactcaaatcttataagatttgaatcttattcctagctttctgaaagagtgtcctgtccttgatgtacgccttttgaaattagagtttgagaactaattctccagattggtgtttgtctttacagctagaagaggatgtctgagaactgtggcagactcggcgttttttcacacttcttaacacatccagaacgtggcctcctaaagagacatatttttattctcagaaaatacaaatgtatcatgagaatgctactctttcatccctctcaaatagtaataatccccctgggaaaaattactccaaatgttgactagacaaggccctttattgttcaaagaaccaaagaatataaagtttccaagcgtctttgtttctgtgtcagtgagttttatgcttcaaacagaaatgattcatcctcactgatattctttaacctattaaatactgacagagaaaatgcatgcactgccattttcttatgccacgtgatatagtctttcaatttcatcagaactccttttccttcgagggttcataagtctttaaatcagagaatacaattttatgctttctagccccaccccaaaaaagagcattccagtgaaatcattttcttttaacttgaaacccttcttgtgattcatctttactcagtggatttaatttattttaaaatggttttataaataagagtgtatacgtataagagtttgggatgtgattttgtttcagaggctgtgatattttggtgacagactcagccatcattgtagcaggaaggattagtgatgggaaatggtatgtctgatgagcataagagaaatttgagcaattatcctccatacctgagcccaggctttggtacttaagaagagtctgcaaatagcatgaactagccacaagtactctctgaagaccccttaccacttcttatctagacatcctactgtgttcctaactcagaattgcttgccttttgactctcagaagctttacaagatggtcatttacttacctgcttcaaaaggaactagtgtggctgttctgcagtggagacgatggttttctaatcctggaattatgatcatatacgttcagttggtgccttgtggtttgtggtgaaattgctatagtttaaccagattccattatgtaagtccattcattcacctaccatggtcagtatttaaaaggatgtagactcccagcagttgctaacttacctaagagacagcaccaaatgaattttaaattagtgctatccttatctaattcctccaaatttggcaaattacctggcaggcagccaataggatgcttttttcctctttttattatcaccatcatcatcaatgtcattatttcattgtatttattgagccttcagcataggggttttctttgagttgtgttgcaaacaataatctattgagtgaaactgtgtaaagtgaagtaaattgcaaatattaagtgtatcagaacaacagagggacattggtgttcttggtcattagttgacttcccctaacaaattgaatattttataattaatttctaaattctcactgttagtacagagaaaaaaatcattatattattgttcattaaccttattcctgttatgttcaagacactgtggtagattctaagggtgacagtagatatatcaatgtcggtctcaccttcaaagagtttgtagtatggaaagggagattagattttgtcttagtccattttgtgctgctataagagcaccatagactgggtaatttatagtgaacagaaatgtatttggctcatgattctggaggctgggaagtcccaggtcagggagctggcttcttgttaggacctacttgatgtgtcatcccatggtggaaggatatggggtagagagagaaggaaggaacccatgccagtgacaacagcattaatttattcatgagggtggcgcccccatgacccaaacacctcctatcaggccacagctcccagcaccactgcattggagatcaaactttcaacacatgagctttgcgggctgcattcaaaccagagcagatttgcaaatgaataactccagtacaaggtaaaaaatagctgtttcaagtaaaccatagataaaatgctattagatatcagaggactgagagatgcctttcatttggagttattaatagcttcctaggggaggtaatatttaagtttagccatgaaatccagcagaaggaagaatcaagcaaagtggggaaatcaggacaggtgtggaaaactgagcagctgaaaggtgaaagatggggaaatttaggaaggcagataaaagctgaattacagagggctttgagtatgaggttaagaaactgggatgtggctgggcgtggtgtctcacgcctataatcccaaaactttgggaggcagaggtgggtggatcacctgacatcagttcgagaccagcctggccaacatggtaaaaccccgtctctactaaaaatactaaaattagctgggtgtggtggcaggcacctataatcccagctacatgggaggctgaggcagcagaatcgcttgaacccgggaggtggaggttgcagtgagccaagatcgtgccactgcactccagcctgggccaaaaagcaaaactctgtcaaaaaaaaaaagaaagaaagaaaaagaaaagaaaaggaaagaaggaaggaaggaagggagggaaaggaagaaggaaggaaggaaggaaggttggaaggaaagaaggagggaaagagaagaaagaaggaaagaaactgggacttaactgtttaggcattgaagggtcagtgtagaatttagatctagaattttatgatcagggcaatttgggaaaataaacctgtcatgtcttgtaaggtgagcrgtagaaagaaaactactggcagagattccaggggacaacttagggagggttaaacccaggaatgggatagtgtttggagagggtgttttgaaaggagcttctttgtttgctgagattgtggtgtatctacaaggtaagaggctctctgagggcacagtgaatatagatatcagcaagccaggcactgcctctcctgccctctggaggcttccctcttgaaagaggagtagggggtggtcacatgggacaagggagatgtggggcatggttgggagaaggaacattcctggccaggaccttgcaggtgcacaggacctgagctgctgaggccataggaagtgttttagtgggactgggggtgcctggactctgaactctgtcagcctctggtgagaggctcgggacactgggcattcctgccccagactggaaaaaacagtaacctcctactgtaatctgactgctcatgccccccccgcccaattcatatgtcaaaacctcaaactgtaaggtgatggtatacaacatagggcctctgggaggtgattaggtcgtgagggcggatctctcaggaatgggattagtgtacctataaaaaggaccctagagagctcatttgccccttccactatgtgggaatatagctagaagacatcacctatgaggaatgggccctcacctgacaccacaactgccacttccttgatcttggacttcgcaggctccagaactataagaaatgaatttccaggggttataatccatgcagtttatagtattttgttatagtcagcsgaaagaactaagacactccctctcctcctttccctatccttctggaagtatcaatcaaaacacatctctacatatttctagcatcccccttgtagtggacaaccacccctagtcaagacgactacagcatagagaggaggtaggggctggaaaagggaacaaatacttgagagaggatctgatcactaacacctggcggaggggggkactttttctcagggcagggttggaggtaggagagttttgtgatragattwgcctgtaaagaagattaagactgctctgtagagaaacacataggatctggcaagagtatgccaggaccatgcggttgcacaggacytgagccactgaggccatgggaattattttagtgggactgggggtggcagggatttttttggtagggatgggagtggcagggataaagactgtaagcaccagaggaccaggatatgtcagctgactggaggacttgtttatgtgtgctgatttgctgtcctgagtacaagtgaattcttattacacttttttttttttgagacagagtcccattctgtctcccaggctggagtgcaggagcacgatctcggctcactgaaatctccacctcccatgttcaagtgattctcctgcctcagcctcctgagtagctggaattacaggctcatgccaccatgcccggctaatttttgtatttttagtagagatggggtttcaccctgttggccaggctggtctcgaactcctgacctcgtgatctgcccacctcggcttcccaaagggctgggattacaggtgtgagccaatgcacctggccttattacactcttaattgtcatttaggagaatgtatatcctccccacccccaaagaggcataggaacatggcaccaatttgagacaaactagggcactgtcaaagctgggggcccttggtctaacagaggggtgccttcaggactctcccctcctgcaagagctgcctgaagccatccctcagatggccacccacacccagagccccagaggagttttgtttgaccgggggctgaagtccctagagtagtttcatttcccacttgataccttatggatgatgtcacaaagacaggaggttttactagaaaattctgcctccaccatctatggagagaacctcaggtatatatcaacagtgttcactttgggcaaggcaacagaagcacacttcttcttgggaagaaatattttgagaaggtatatcgttcattccctagaatgcttccaagaattttgctttgcttattttcatgtggttttggagagacttttcaaagcactcctttgctgatggagtttgtgatgattcatttcaaatttcaaaataaatttttccactcaagcaattcagtaaatcagatttcttccaaccatcacagccatacacttactgccatggtctgcctgcagctcctcgcctttgatctggaaagcgatgctaggttagacctaggatgtcaccttcacagggacccaagtccatcaggagccctggtgtcagcccacacccgggtttcctgttggcatgtccagtcggcagagttgagcaaccctccttgaagtgtaatgtggttattggcaaaataatacaaaatcggtcttgattttaaaaaaggaagtattcagatttttcttgatgaaatttaagagggaggtgatgggaaagagactatgcttaacaaaagaaaagagctcctaaaaacatttgttcttgattccccagagtccacaccgtagaaactgctccctcaccgtttaaggagaataccatacggattcttatgtatgggtactaattacgcaactgggcctttcgacatttttggagaagtctattttataatttttaataaatttgctcctgtaagatcagccatgttttgtatactgaaatagtagtgcacgtgtataaaataaaactcagtgtgactctcttttcccctggcattcttgggtcatattagtttaaactatttctgacccttactttattactgaaaacttgagtgtttcataccatataaatcctgagacttgcgttgtttcacattaagctaaatttgggcaagattgccagtgttctctgagactgcaacttcttaaactcaattattcactcatttttgtaaaaagataaaagagtggctgggcacggtggctcatgcctgtaatcccagcactttgggaggccgaggcaggcagatcacctgaggtcaggagttcaagaccagcctgaccaacatggtgaaaccccatctctactaaaaatacaaaaattggctgggcttggtggcgcatgcctgtaaccccagctacttgggaggctgaggcaggagaattgcttgaactgggaggcagaggttgcagtgagccgagatcgtgccattgcactccagcctgggtgacaagagcgaaactcagtcccaaaacaaaacaaaaaaaaagattaaagaatatgttctctatgccaggctcctcctgtgttctggggacacagtagtgcgttaatagaggagttcccaccctcatggaactgacacctagagaaggcaggatttgaacaggaaatgttagcaaagtagaaggtcaagttcagatgggatgtcttccagggaaaactaacctgggctgagctttaaggactgcttcctggaggatgtggcagcagagttgaaggatgagtcggaatgaggtaggagaagaggagagagaggaaagagtttcaggttgcaggaatagaatagttccaagagaaagatgacatgaagcagttggggggagatattgcggggcagattgtgagacacagattgccttgggatggtgagagtggagatagagaagtcagacctttccaggccttttggaataaatgagccttttggaggataagtgtaataaggccattggcaggttttaagcagggagctgtgcagtctgatttattgtaatataaccacacaggccaggataatgattggagtcctgttcctgggctgttgctgatctaatgtagcaatcatggcacttgagaaaagtggatgggttggaggcaaagctagaaggactcagtattgcattaattaataatccccttctccacctggttgcacaatgtcctaaacccgccaggagaatgtgctaatgcagtcataaagagcaacaaaataccatattttacagtaaggtatgtgaaacaatacactgacattttgttcccccataaaagtcaccaacagtgctatgtgcagcatggaaaagatctaaaataaatttaaaagattcagagwcaagcattaaatgctaaatgggagaggaaaagagggtagtaactccatgtggcctctgccatctgggaagacctgcagrgaggacagagtgtggtggaagttcataaaatcctgaagttagtggaacttgctccctaagacctagaaacacagaacattctgggagtctttcagatttgtacaaatgaaactaaaactcataaatctgcataactggttactaacccgatcatagtacattgaaaatataaacaggtttccaaattcaaatgcaagatttttgtttctgttttgttttaaaccgcagttatgaactgcggtaaagctctgactttagctgttttcctgtattgtgacagtgcacctcacacatcctgaaacccagaattgggctggaagggccattgttttcattcagttaaatatttcttatgtttcaatgtctcttttaataaactctgtgttgcgcgtattttagacagttgggtttggtgtaatgttgtaagaagtgtgagccagagttcctagatttcacccttagcaggaagttgaatcaagatggattagccagggaatctcaggggcttaacccagtaaagagttatttctcacccatgtccctatccagtggagaagtgcattgttcgcgggtgtgttgagtatgtttttcttattttccatattcctgatgcactggcattaggggccttgattccggagacactgtcctcccagggctagctaattcctgaagttagcaaatgcctcccctgcctgcatgcctttgacatacaaatcaaccaagcccgagcccacacccccagccacctcctttatcaaactctcacccactgagcaggtgttccctttgcccarcagcaccccagggccaggtacccaacaactagggaccatccttacagccctgagcctgccagaattactcccattatacaatcctaagtgtcctcagtcagcatacctaccctgcctcacctgttcctccctgtaagaaccccagtagaggcctgggccatgctcagcgtctctccaacctcctgagctccgtggcgctacctggcatggccttgccaggcatgctgtgcctcctgcttctagcatctgtgagtacgaacttctgcctccatgacaatcattccatgtctgcctgtcttaccatatctgttaaaactatgcctgcttcatttcaacacagtgaggctccatggagtacaccctcagcctcaacactgggaggggagaggcaagatggtttgcagggcaaggatcatttgctcttacccacatctggcaggaagagatccatcagttctgcccatatctgattggcaagaactagtcacagggcctagcacggcatggggtgctgggggatatcacttagttgtgtacccaggagtaagaaacacgtgtggcctcactgggtgactgcctgggcattggcaatcaagtttactttgcgtcatttttacttcctttttcagatttatttttagtaaacaaaagtgaaaaaagagaaagattgaaatttgagtttcatgtccttaactttatccagcagaaatggcaatagaggagaaaatccagcaataggcttatataaccaggagcttcacccggcagcgctggttgtgaatgtaattgtaatcactaacacttgtataaaccctgctttttataaagcaacctccgatactttatactactttttacggggaggaaaaaaataaattttctcttcatgaattcatagtgtcggaggcagaaagcataattttaattctagttcaggcactataggcatagcaggttaacttctgaaagtttgtaatttagcgtcctggaagttggaatatatcttcactcttgatgtaaatctagaagttgctagttgggatggggtgcgcttcctctgagccactggagtcttgagaggcccagagagtaaggtgggggcgggggctggctcagttaatgttctggaatcccggctgctttgaaacagtgctgctggaagctcctgaagggaaaggaggagagaggaaaagcaggagaaacttggtatctgctcttggacaaaaatgtcttggcagatgtcttggtgttgagggaatggtgccacctctacctcagttctccctcctgagccctgcatgagtgtgatgcctgcattgttcagttcaggtgttccactgattctgactaaatcaaaagtatacatgtaaatccagcccatctgttttcatgattgttaaacgccgtctcttctgaccactatgttataacattgtcttgaaattttgcctttgtcagagccatttctgaatacattttgtggtttagctggatgatgatgtaatgtttttaatgagcatttaattgaaatggcatctttataaaatggcatcaacctagctctttggaatattctgaaataagttccttgatcattttgtctctttagaaaatgagacatgcttttcttataaattgtggcttttcccacaaatattttcaaagagatttttgcagacaacattttcgggctgttactactaatgttggagagctcatgtggttttgtcccagatgttcacagtaggctggtttagtgactatgtttccagacctaatttggctaatcctatgttagttatgtctgttcctgaaccccaaccagatttcatgactgataggagtctggaagaacagactcacctgctgccttgggtcaggggatcctggagccacacataacactgaattgtctctaagagagcatctgggactgtgtttctgtctctctcattttatgacacttttcatgcatgccataagcatcatcattatattaggtttgtatcacatgcaatcacagatcattctaaatgtgacttagtattttatcaaaccaagcacatggagaacttgtgttaccttttctgttgttgttgttgtttaccctgtagaaattgtcctctggatttctgagatgggtaatgccctcctgtctcatctcagccctcaccagtgttggacctgatcctgaatttgcaaaaggcaaactgatctcagtctagttccggtaaatgccagccccactgatgcgatggggaggcgaagccttcttagctttctccttgccctttaggcctttgtgtaccagtgacgggtgtctgcgaggaagagcttggctcttggagaacacaggtttggtgagatcacatctctccatatgcactttggataaatttctttatttatagagacttttttggagcctatacatttgacccctgctgacctcaccgctgtagccccacccccacctcatcagctcacctttccacctccgcgcccaatacaggctggttttctttttgcctgaaatgttcttccccctctcaactgacccccaccccaaatatccatctctgccccccatactactttctctgaaattatgctcttaccatggtttgcacagacggtrgataaatactgttccaaaggctggcttggggaacccaactattcccggtttggggttttgtccccctttgaaaaaattcacttgagattttaaatatctgactaaagtgaaaacaggaaagactctcagagtggtagaattgtaacagagctgttaagatttcactcagtgggaaggaatattttgtcagcaacttgctttaggaataaactggacaatcgaatggggcttttccagcctgcattaacagcaagctgtagcttggaaacacctgcatgacaaacactttcttaggacttcttttttccaggagtagcttattggcaggttttaacaagaaacgacacccacaggtgtttgcctctaaaactgttgaaacagaaccatctagtccccagggtttccctacagggtgtgcagggtgatgactgtgacttgtttgaaggatgctatcttttcagaggctcttggcaagtcccagaatctcaccttggtttgggactttctcctccaagggaataaactatttccagatggtgttagctttgcctagggaaggaagtactctttcctagactgaaaactaaaatgcaatgctgagttacctctccaaaacaaggaactgaaatattaggcttagcccatcttcattaaagtttaatgctcaaattaccttgtgtgttagcattttattgaatgccagtagcattcactgtcatgacaagttagaaattaatgcattgtcagccggatgccgtggctcacgcctgtaatcccagcactttgggaggccaaggcgggcagatcacctgaggtcaagacttcaagaccagcctggccaacttggtgaaacccccgtctctgctaaaaatacaaaagttagccaggcatggtggtgggcacctgtaatcccagctacccgggaggctgaggcaggagaatcgcttgaacccaggaggcagagtttgcagcaagctgagatcgcgccactgcactccagcctgggtgacagagtgtgactctgtctcaaaaaaaaaaaaaaaattaatgcattgtcaaactttagaagctacatttagaaaacatcctttagatttctctgtttctgctgttctgccaaattgccagcctctggtacatagtcttaagggttcccctccatgcaggtgttctcttcataggttaacattcagtcctgaatgatccaagagtttgtctcatgtaaaggccatccagcttcatgaattgcgttgctctgtgcgaatgcctcatgctatttattttattttcttttaaaaatgttttttcttttttagagactaagtctcactctgtcacccaggctggagtgcagtggcatgatcataacctcaaactcttgggctcaagcaaccgtcctgcctcagtttcctgagtagctgggataacaggcacacaccaccatgcctggcttcttcatattggttctctctcctgattgcgtagaggactgtatccgaccccaatgtctcctcctcagtctgacgggagagatgagaattctctctgttagacattctgtcttcagtgtatgttctctgtatttactccacctcctcctatttcttccctctgaggcagtggttctcaaccaggattgatttttgcctcccaggggacatttggcaatgtctgcagttatatttggttgtcacaactaggatgggtgctactggcatctagcgggtggaagccagagatgctaccaagcagtctgcgatgcacaggtcagcccccagacaaagaattatctggcccaaaatgtccgtagtgccacatttaataaactctgggctaatgaaatgtccacaccaactcagaataaaaggtcagatctccaggcgttcctggcactcccggagttgttcactttctgtgcttccttatgtggtataaaatttctgtcatatgagtctaattttctgtccaccgcagttctctcctggatatttcctttccattaggtgtcagtatttcaaatgagtacttcttagtctaattgtttttttctttgaaattatctcctgtcattcttaggagtccatttttctaactcagttaattagtacaaactctcatttacaaaatttacagtttcttggccgggtgcagtggtgtgtgcctgtaatcccagcactttgggaggccgaggcaggtggatcacctgaggtcaggagttcgcggccagcctgactaacatggtaaaggctgagacaggaggatcacttgtacctgggaggtggaggttgcagtgagccaagatcatgctattgcactacagcctgggcaacaagagagaaactcagtctcagaaaaaaaaaaaattacagtttcttactaaccatgtgaccttgaacatatttgacttctctttgctgcaccaagttcctcatgtgaaatatgcacataattatactatttcatgtagttgctaaagtattaaaggagctaatatgtgtaaagtgcttagaactgtgtaaagtgtttatataagatattttttaaacatagaatttcttggtcaggtgcggtggctgtaattccagcactttggggggctgagacaggtggatcacttgaggtcaggagttcgagaccagcctggccaatatggtgaaaccccgcctcttctaaaaatacctcaaaaattaaccgggtatagtgatgcacacctgtagtcccagctactcgggaggctgaggaaggagaattgcttgaacccagaaggtggaggctgcagtgagctgagattgtgccactgcactccagcctggtgacagagcaagactctatctaaaaaaaatatatatatatatgtatatatatatagaatttcttataatgtctaaaaattttgtttattgtgtgtatatccataaaatatgaaacatgttctatgtcctccctattaaacaaatactttgtatgttttagtccctgactcaaccagattggaaatattggtattagaagaaaattcaaaaagttgtcaaaccatagctacaaattttgactttcagcttagtctcccatgcctgctaacccttttgtctgatcagagttttctctagggccccttagggctaatgtaggtgggacttcaagcacatagatcattgctcttctcaattcagatggattaatgagcagatgrgttgagatggagatgaggaaagacatcctaagctatgttgaggagggagaagatctgagactcaagtttctgctgttaaatccatgaggctgatttagcagctaagaatacaggccttagccttttagagttccctatctgataggagccttagagataactcagttgtcatcatttgcatctgatataaaaatctccattttatgggtggagaattgagactcaaaacctaaacttttaaaaaatgaaataatggcagagctggaacagagagcagggctgttattgggttttgtaactcttattacggggactgcctccactaaccctagttcccttctctccacctcatgttttctttgttttggaatatggtcatgtttcattgctgtcttttcttcctctcgtgaacttaaaatatgaatcatttggtaccaagttttcatatgtcttcctgtattcatatgaccagaaccagtcttctccatcccaaacaccgctgtttatctacatactccagccaaaaactttcttgattcctcacattcttttctaccctacatccaaatcataagaaaattttgtttgtttgtttgtttttataagagacagggtcttgctctgtcacccaggctggagtgcagtggtgtgatcatagctcactgcagcttcaacttcctgggcttaaggaatcctcccacatagctggaactacaggcatgcaccagcatacctggctagtttttaaaaaatttgttcatagagatagggttacccaggctggtctcaaactcctgggctcaagcagtcctcctgcctcagcctcctaagtgctgggattgcaggtgtgggccactgtgcctggccaaatgctgtcatttccaccttcaaaatatttccaagtggcttctgtccaagccactctgggcctgcattgttcaatagcactttctgtgaggatggaaatgttctgtatctgtactgcccaatacagtcgccattagccacatgtggctattgtgaatttaaaatgactgaggaactgaagtttttatagcagctttattgggctataactcatataccatctaattcattgaaagtatgcaattctatggtttttaatatattcacagagttgtacagccatcatcacaatacattatagaacatttttatcacccccaaaagaaaccctatattcattaagaatcactcctggccgggcacggtggctcatgcctgtaatcccagcactttgggaggctaaggcaggtggatcacctgaggtcaggagttcgagaccagcctgaccaacatggtgaaaccccgtctctactaaaaatacaaaaatcagctgggtgtggtggcgcatgcctgtaatcccagctacttgggaggctgaagcaagagaatcgcttgaacccaggaggcagagattgcagtgagcagagatcaagccattgcactccagcctgggcgacagagtaagactccatctcaaaaaaaaaaaaaaaaagagtcactccccatttctcccaagcacctccagtacctggaaaccactgatctactgtctgtctctgtagatgtgcccatttctggacattccatagagatggaatatgtggcctttggtgtctggcttcttcacttagcataaggttttcaaggttcatccatgttgtagcatgtatcagtacttcattcctttttattgcctaataatggtgttctatcatattgatataccacattttaccatttcacagtggatggacatttgggttataaataggctattgtgaataatgaataatgctattcattattttaagctattatgaataattataataatggtgctatagyttttaagtacaaggctttgtgggtttcattcatatgttttcatttctcttggatgtgtacctaggagtacaatggctaggtcacatggtaactgtacataacgctctgaggaactgcctcacagttttccagggtttgcaccgttttactttcccaccagcagtgtatgaaagatctaatttctccacatcttgttattgtctgtttttctgtaggcaccccggtgggtgttaagtggtatctcattgtggttttgattttatatttctttgatggctaatgatgttttgctgttcttcatgcacttactggccattttgatatcttctttgcaaaactgtctattcagatcctttgcctatttttaaattttttgggtggcctttttactgttgagttgtaagagctctttgtgcattttggatacaggtttcagatacataatttgcaagtacttttttccatttttcaggttgtctttttactttcctagtgttgtcctttgaagcacaagagtttctaattttgaagaagtccagttcatctacatttttctttcctcactgtgcttttggtgccatatctaagaaaccattgccagatccaaggtgataaagattcatcgctatgttttatcataagagttttatagttttacaactcaaaaacaaaaagtcaaatactgcatggcctcacttataagtggtagctaagtaacgtgtacacatggacatggagtgtggcatgatagacactggagactcagaagggtgagagggtgggaagggaaagggtgatgagaaattctttaatagatacaatgcacattgttcaggtgatggagacactaaaagcctagacttcactcccatatattcatgtaacaaaattgcacttgcaccccttaaatttacatcaattaaaaatgattttatagctttgtttctatgatccatttttaaaaatttttattatgttaaaaacatcatcttttccattttaacattttaagcatacaattcagagacattaattacagaatgttatgcaaccatcaccactatgtttttccaaaaattttcatcaccccaaactgaaactctgtgctcattaagcaataactcctccttctccccttcctccccagccccaggtaggaatgaagtttgtattgtattttattttaattaatttaaatgtaaacaactaaatgcagctggtgattaccatattgggctgcacagttataacacgactagtatcatcctcttagatagactgctacagtcatttctaagctggctttgcatttattattatcctatttatggttatctatggtccattctcccataaaagctggactattcctttaagaatgtaacttattccatttcattcccagctctgaatcttccagtggttacctattacaattaacaaagaaatccaagctctttgytgtggtccacatttgtctgcccctttgactgtctgccttctccttttccttctcccagtgcctgcagccccactggtcttcgtaatgatccttgagctcatcaagtgctgtctgcattcagactctgcacagtttctctcctctgtctggaacactcaccctgtagatccccatttaactctctccctcgtaccattcagatctgctcaaatgtcacctcctcagaaagattgttccagagctccctatctaaaatagccatgctattactctaccttatagctcctgtgttttattcttattttttattaagacagggtcttacactgtcacccaggctggagtgcactgttgcagtcatggctcactgcagcctcaaactccggagctcaagcaatcctcccaccgcaagcctcccaagtagctgggaccacaggcgagcaccaccacacttggctaatatgtttcttttcttttcttttttttccttttttttttttttttttttgaggcagagtctcactctgttgcccaggctggagtgcagtggcatgatcactcactgcaaccttcacctcccaggttcaagtgattctcctgcctcagcctcctgagtagctggcaattcaggcaggtgccatcatgcccagttaatttttgtttttttagtagagacagggtttcaccatgttggccaggctggtcttgaactcctgacctcaggtgatccacccaccttggccttccaaagtgctgggattacaggtgtgagccgccgcacccagcagctaatgtatttcttcatagcacttattacacctgacattttatcgtgtatctgtttaaggttttatgtcctgtctcctcactagaccacaagctgtataaaaacagggaccttctcttcccggttttcataatagtgcctggcataaaataggctgtaagtaaatatttgttgagtacataaaagaagaatcttattcatttcaaggctataatctatgttagaatcaaagagatggtctccatactaaactgaagtatttcttcattgaggcaggcatttaaaagtgttgcacctgttagtaaaacagtcttaaggccagttcctgaaaagtgaactcctacaattttgagtaactatttgctaatacatcagcatgttgccttcttgggattaattcagcctttcttttacttttttaacttgctcccttccttcccttttaatgaagtcatgcctaagctccagtctgtccttgtcccctctcccctaagctttgagaccgttcctttttaagtcagtggccatgtctcgccccgttctcccgatataactcttactttacccagcagcrgggcctccgtttagtgcagcccgtgatgttgctttcctggttcatcttcccttatccacagatttacctggctggaatcgggagactgtgtgtgcccaggggctggattcggagacccatgcttctgcagttccacttatgactccatcattatgctgttttaggaaaataaatagatattgattctctaataagagtgggattgttcaacaagcattgggaaaatctgcgagcccagatatgtatgtatagcagctactggttggaaatttgaacacaagcatccttatctacccagcctgcgggccacagaccagaactgagtataaaaaaagaataaaaccaaatgccacatgttgtctcttataagtcagaactcaacattgagtayacatgaacataaagaagagaacaatagatgccggagaacttgacaagagagggagagaggaaaggcttgaaaaactacccattgggatgccaggcacggtggctcacgcctgtaatcccagcactttgggagcctgaggcgggtggatcatgaggtcaggagttcgagaccagcctggttaagatggtaaaaccctgtctctactaaaaatacaaaaattagccaggcatggtggcgggcacctgtaatcccagctacttgggaggctgaggcagagaattgcttgaatccaggaggcggaggttgcagtgacccgagattgtaccactgcattccagcctgggcgacagaccgagactctgtctcaaaaacaaaacaaaacaaaacaaaacaaaaacaaaaaaaaacactacccattgggtactatgcttactacctgggtgtcagagtcatttgtactccagacctcagcatcacacagtatacctttgtaacaaacctgcgcatgtaccccaaaatctaaaacaaaagttggaagaagttgaaagaaataagaataaaggaaggttggcagtgtcatccaaggaaactaagcctgatattaaaataggctctgaccactcaggataaaaaacagacttctctgtgcaggtgtagcggagatgatgaaacaactctattagcattctgccttagtggttgttatagtcatagccatccttgaaaagaaaaaaaaaaaaaggaaaatataggaaaactgaggcttaaaatccttcttctattttctaaacttctgtcaytggagtgcttgcgttcccccaggtgatagactccggaagctcatacagttgcagatgagaacatgagtaataaatacccccaaaattctttccaagttcagtcatgatgaattggtttaatatgcatgtagttatctttttattggtccataattccaatttagcaaaatgtaaagatgaatcataaagaatacctggaaaaagccccaacatygatggcacttaataaagatagatgagtatgttcttactcctttttttaaaacaaactggacaaagataaattttaatgtttacaaaaatgtaaatttcagtgcagatcaagcgtttggttggttggttggttggaagcttgactttatttgcttcatttggagagaatataagatgaaaaagttcatcattagaaagagaagtaagcattagagtcacaggatgggattttgaaatactctgtgagttgattgatgttcctaaagttccctgtttaatgctctgagttaaatagrtggccatgctcagcttcttggatgttaatagtaacttctttgtttttcagatactgtgttgacaagtggtcatgctaccgactatttatttgttggaaatattgtttacacagtaagtttatctctgtttattaagccattcttaaacagcttatktgtggcttgcacttctctaaacccttaaaaagggccttcctcattattattatttatttcaaatcttcaaaatgtattttatatatccttcaaagttcagaatggttgtgaaatgcttacatcatcgtttctgaaggttatgccaagtgaaggtttctgggcaggtggttaacagatttccccattcttcaaatgaccattttacacctacctgcaaaggaaaacaacactcaggaaggtggtatctcccaagctaagaaaagggcaaaactattatttatgagaaagactgttactagaatgaaagctcttctggaagtgaatctgcctgtatgtcccctgaaaataacccttagagaattagctactgacatggctggtgctttcaaaccggagctgccttggggaagctagttctggagtggagagatgggatttctcatggaaagtgaaaataactcattgagaataatgtgtttccaaactgtsttttattttcacagtatgttgttgttactgtttgtctgaaagctggtttggagaccacagcttggactaargtaagttttctctagaattgtttctctgttcagtatagatatttttcatgctaggatttctttttaagccttggggaaaccataagcaatatctggctatcttctttcagattttctgtgtaaaaattgtgrtttgatcttgatcagggtaaatttgcaatccaaagtctcttggtgattcatttgcttggcacgtaatacagctctaagctattaacagtcatctcacttcaaatgtatttgctcattgtaaaaacaaaaaccatattatacacacacatatatggaaaatatagaaggacaaaaaacatttaatgtccataattttaccaccaagagacagtcactgttaatgctttcctgtggaaccttccggacttcgttctatgtctgcatgtgtgtgtattttttaataagatgatgcattataaaacataggactttgtaatcccttttaatttaaatatatattaggcacattttctgtgacttaaaatacaagtcaacaaagttattgttcttgattaaagagtattacgttttacagatgtcccaccatttacttcatcactctcttattttagacattttggttatttccagcatttaaagattataactaaagcttcatgtgtgtctctcatagtgtcatgacctggctgctgtttaaatgctctgctaagaaaaatggggatggggtggaaggtcagtgaggaatcagggaatcccctaagagacagtggcaattaatccgggtcagaggtgatgatgacttygcttacgatgttagaggaggaggtagtgagaagtggtcggagtctggattcattttatctttctaaaagctaacagagcttgcacatggattagattgtggggtgtgaagagagaaagaagtcaaggatcatcacattaagaggacaaagaagaaaaaatgaacaacgcagtagatgcttaaaggggcattgttaagaggcaatatccatttcagatttaaaaataaaaaactcttggctaaaggaatggaacaaagtcttgaaatgataaataaaaacatcttatttattttgtctgttcagccactctgttaccagattaatgagtccttgttgtatacagccgcaggttggagcaaacacttgctatgaactgagaggggcccgctgttactatgggagaaatcttagagtaaggtcacctgtgacagcaaaagcaccttcatcttcagggtactttggggccattcattacttgaattcattgttaaaaattctgagacatgggaattagaaagattgaacttcccattaactggtgagtcatcaaagtctttccataaggaaaggtagcttggatgcaaggattctgcagcaartggagttggggtgaatctgccaggctggtcgagaagcctgtctgagtgtctrtttccctctgcagttcagtcatctggctgtctggggaagcatgctgacctggctggtgttttttggcatctactcgaccatctggcccaccattcccattgctccagatatgagaggacaggtaagtactcctgattgggagtgtgtcttctgtgtcttgtgacagcaatgtttctccatgggcgggtgagcaggcactgtgtgtcttacagccaygatgagcttcaggagaggctggtccttcctgcttccatcagaatctatcaggagataaaccaaaccaaagcacctggaagaggtcatccagtccacagaaaaggcatttgaagtttcaagtattatgaaaactgtcaacttaaatcctccggcttattggcatgcccacatttccataataaattatgtgttaattacacacagtaccaatatgtacagttggaaaactggagctattttgaatggttcctaatccattgattatgttgattacagttttgatgttgtactctggtttgttgttatactctgctgggtcacctgtgacagatgaatctaacagctctatgaaccagatcattgataaaccagaatctctcattgttcatctctttgaactagagaggctgagattgaagacctttacactcatttgaatgttttttattttttccttcatattatctttgtccagtgcataagattgagccatcaacagtgacaaactgtatcctagaatcccacagtattgggtgtggagaggaatgagctgacagtcctctggtacacacctcctcagtttaccaaggaagctgtgcaggcccaggtctccaagcccaccccagagaccccaccctggagttgcccacatccagcactgcccttaaaccccaagaggctgctgggccctgtactttaaggacctctgctctggccttctgtggctgggtgtgttcctcggcacggagtgaaaagctatgatgcacagagtccatcttcccacttgtaatctattctctgggctcccaggaccccttgtttccttcccaaacagccaaaagcctcctgcccaggcctgcctggtcctctctccatatctaggccagtgtgcacactgggccaaaggggcagctgttttcaagggtgtgcactgagtagatgatgtttgcaccgatgttcccgcccacatttgcaggatgcttgtgcaggggcacagaacccagggtgggatgggaactgtgggtcaggctttcattggtgttcctgccccaggatacatactttagggccaggcctgttcatggcacacctggctgctatctctgctttacttactctgtagaaatgagcaaaacctcctgggtctatccaagtctggaccatgtctagcarctgtttctcgtgagatagcccagggtagcattacttgccatttcacctggtagctctgtcagctaatagcccaggtcgtctgagacctccactgagtgtgggtgctgagcaggacggacctgtcctataggagtgggcttgcatgtcctctagtgcatctttgctttctgtgaggaaagaggacaaacatataacatgcttttcagtttttttccaaatccagacagtagaggaaattagagggcgttcagtgaacccagaagattgttgtgtagcaaaatgagcattttccaacaaagatattttgtgtttaaataaatcagttctattttaaagcaatgtgattgatccccacaaaaagcaaaccaagaaaaktatccactacaagacaacgatccattggtaaggcattggtgcttagaatatctgctttgtgttctcttccttctggttcaggatggatctgctgtgatgaatatttcatttggggaattttgtggtgatggacaatagatggggcctcagccaatggccatagacagtgttctaaattagagagtgacagctgacaggacggggtcgcttggcatgtgactgacagacaaagcccattcctttgaaagctcctcctgagtcctaaacagagagctgtgccagggaaccacatgtacttcagtaactccaaatgtgcgtgaattaggctgcttgccaactctcactcccatcgagataccgactttccaactgcagaaggaccaggctgatcatgcagctactaaggtgccgacattttcactgtaccagtcacataagcatgatggtctgtatggttataaggctcagattaatggtgacattcacatgtttaaggactcttccagcagaactttagtgagttgtttctaccatccgaaagcaaagaagtgatcatattcaaccacattgcatttttctgtaaaagcttatttttctttaaaacatgtcattttaatcactttattggttggttcccatgaagcagatgataatgatgtgaaatagatgatagctgggtgaaaccgaggttttcattaagcagtacatgagaggattaatgtggttctctagtggccggacttccgagtaggtactctgctgtctgagtctaaagaactgtgtatcatctctagccttcctccagggcagggggctcctgagtgggtaaagggggccaggaaatgtgtaactttagtgtcacagccaacttttacactgtttcacctgcagtctgccactctgtattttgactcagtgctttgttcattctttgaaaaatggcagggaagtattacaaaacatttttttaaacacctttgaaggattgcttgggtggatagtggcttacactagcctgaagtctcagaaagccttcctcctggctcaggaggacttatatgctgtcataaaaaagaggaactgggttcaggtgtagtcagtaaaaggaattggctcttttggggaattactaaaaacatgcccacgccctgttcattcctgggggtctaggttggtaactgcttaggagtaaagggtattctaggaaaaggccactttttaaaatgactgtttgaagaatgcttctagtgatttttataaaccactttttgtagttcactaaacagtaggtttttggcaagtgaacctggttatgtgaagttctagaattaaactagtgcctaatagcaaacagcatttctcactcagaagccagaaagagatttgacacacaaaacattctgtctattcataacatcttcagccattgaaaagatgcattgtttctgctgggggtttcctaaactaatttgattaaatatttctttgtcttgtccattatatttggagtttttctcacggagaagaatatgggttttcccttgagggcaaaggaaaggaagggctatagaattgaattattctacactatcaaagagtctttatcttccctaaatcacctcatgacatggtatgtgaaacccagccagacaacatgtcaggaagtcccagtggaagtttctgaaatcaaagaagtcatctgcatccttcccctcctgaaaatacgccacatttgtgggattttaaggggcatcctgtttttccgtttttctcttttgaagcttggatttatagtaataaaaacttaggttgtgtctatcctggggaatgccagtcctcggytatggaaaatacatgatgatgttttttttccgtgggggaccaggtgtttttcttttccccagtagaataaccatgagataaaatgggtccccaaagcaaatacttgaaaatggaaaatgacaaaatcccttaggtcaccaccttccccaaagttgcctgctgaagtagaactttgcattggaaagatgatggaaacttgatcctagaccaggtcaggaaatgtgtttctgttttcttcatgcatttcccagcacttctgactttagtagtgctggagggaatgccatcttacttgacctctgttcaaaagtccggagacctggctctgttcatgccccagctatgatagttacgtaaccattggcaaatcattttacttgcattaatctcctaatcagcaaagtcagaataatgccacccaacctaattactttagagaattgtgatgaagatataataggctaacctgtgggaaatctmaaacatggatgctcttctttttcctggagtgatgaattgtttttgaaccttcatcaataagaatattgctgtgatttgaactccaaattcttttagccaaagaatttgaacattttataggttctaaatgggatgtttttgagtaaggtctattgaccacctgcatccaaatcatctgggttgcttgtcaaaatgacaacccccaccccccaaaaatatgtgcaggcaatcacgtacacacacagagacacacaatgcacacacacagagagacacacacacagacacacatatacacagacacacatagtgaattgcaaactctgggtgtggagccccagcatgtgagcttcagtaaatctccaggtgattcttccctttaaagtgtgagaaccactgctttaaaacacctaaaatatgactctattagaatgttttagctcctgctgggtgttacaggagaagatggtacactgaagatacagctgagtgattgctcatgttaagtggttaygtaggatgccagctggtgacggtgaccaccgtaagggcagctagctttcaaagtagggaattacaccacgagacatgaaatcgttaaccatggaaaaattctcctcactaacttttgctgcttttcctttaaagttcttttcattgctagtaagagaggggagaaaaccttttgacttcaaagcatacaatctgcaactctgcctgcagtgacaagctcctgactccagccagtttctggactgggacaggcttttttttttttttttcattctaaatacaggaatgggtttactcttgagttttatgtacacacttgtgtacacacaatgcaaatcccagtggactgtaagtaaacagagggaggaatggttctgtcatcagtgaatcagtgattaattcctcatcttctccaattgtctcccctggatttgtagcaggcctaggtatgttccatgtgaaatttgcaaagactgatgtttgtttaccagttgtatgtgctctaggaggtaagctgagaagttggggtgatgtcaagtaggtggccatctttgctcagctaccattccaggatgtctgtggaggatgggagcttaacggtaggaatccacccgagggtcaggagaggacttgttttcaggttaaggtctgtgtggggcatgtttggttgtcccacatccatcctccttcaccctttcctaagggtgcctagtgtgtattcactgatgtgctgtgacttccacccctaagtccaggtgaaagcttcatcccatcccccctgccacagtgagcgggtcaggaagcctgaaggagacacagggagacacttgctgggggcttccaggatagcagcgagtttgctcctaaaacaaatccatgaaagagctggctttcccatctgaaccatgtgggtgctgctgtgatgctgggaatgggtcagccacaggaggaaaaccaccctcagaatcctactatagcctgaaagatagactaggaagacaaaaagacaaacaaaaacaaaagtgtcttttttttattgttttattactttttatttgacaagtaaaggactccaaaagtctctatgcaatygttgagacactgtatgaagccagcctcgaagcccatcccaggtggggcgctcagtgagaatttcctgtgtgctgcccggccttgtgggtagccccggccaaggaatcctctcttcacccaagtgcgggtgttgggatgttcccttagcttcctcagccaaggaaataaacgcttgttaaaaacaagcttaggactttagcatatttaaactgttttattatactcaaagttacagattggtttaaggagctggtaaaaattactttagcactgcaattattagttttttagataacattccagaaaacactgaatgagcatatcttaaggttactggaattaatctttaatgcaatattgaatagactcggtccagttttcctcaagtatcgtattttagaaacccgtggcatggctggtgaggagcggtcagcctcgtcaaggaggaagtcctatcagcagagattcacctttcggtttggaataacatcgtgasatctttttgtacagttttcttgagtattgaaattggcccaattattcattgaagtccaattcacattctggcttttcaactcrtacattttgtggaatagtgagactcatttgcaagaagtaacacactgtgtttctggatgacattctcatctgaatgcaaagcacaatgagcraagttaagacagtaccgacttcctggcttctgctgcacctrtgactgttgtcgcctgcaccccagggtcccccatccgtgtgcatttccttcctagaaggctcccaacaccagtccctttctgaggcaatccctagaaccaaaaacaaaactatagcaacaacaacaaaagcactttgggaggcctgggtgggcggatcacaagttcaggagatagagaccacyctggctaacacagtgaaaccccgtctctactaaaaatagaaaaaattatccaggcatggtggcgggcgcctgtagtcccagctactcggaaggctgaggcaggtgaatggcatgaacccaggaggcggagcttgcagtgagccgagatcgcgccactgcactccagcctgggcgacacagcgagactccgtctcaaaaaaaaaaaaaaaaaaaaaaaccttttaattggtaataaagaaaaatcagaaacattcagttgagcagtgctagctaagtgagttctcacagcctgtaaatatttggattctaaaatcagaaaactcaggcatccatcagacaacagttctgtcagaattggcttttgtcatggttacacataatgccaacttgtttttgtttttctcctcctgcttaaaaacaaaggagaaagttttttaagttggaagctccttaaagtggtttcagattctttctacaggcggtgatgggaacagaactcccgttatcctaattgcctctggattctctggaatcctcctggattaaagtgacccgaatccgatttctttcttatttagtgcaaattgtaactgtgaaagtaggatttgaactaaattaagctaatgcctaagacatttatgaagctaattctattgtctgtaatatccatacttgcgttatttctgagcttgtttttcaggtatatgaaggagataatatctatcttaggatttaatagggaaattaaggaaaataagacatgtcagtaacagtaggtaatgtttattgaacaattgagatgagaaaagttctcttgtccccctggcagggcgtgtgagaggggagtggctcgcttcttcagcgccccgctgctcagacctctaggggagcatacagatgggcaggctgtggggttctgaccccacggtagtgtctaggggtgaatgtttacagctcctgaaccccagtgggcatgtgttacagggtactctttcagtttagctgtccgtaggcagcttgtgtaaaccagctcagttagaccctctactttgtcacaaggacagagggctttgtgtatcccaggttcttgccttggtttaccggaagaatcagatcacacgtgggcttggagaatgagtgcaaggtgttattgagtggaagtatctctcagcagatgggggagccagaagggagatgacttttccctggagttgagccacttgacagcccggctgtcctccaattgttctggccaaactctgtgtcattctggcgataggtggcctgacggcgcgcgggtgcctgtccgtgcattcctctagacatcyggctttccagtgttcctctgctgatgtgtttctctcaacgtccagccacctctgtgtctgctggctagggtctcgatttttgtataggcacaggataggggcgtggcaggtcagggtggttttgggaaatgcaacatttgggcaggaaaataaaaatgcctgtcctcacctaggtccctggacacaggcctgggggtggagccctagccagggaccatgcccttcccccattctgtatcatttaaagggaccactcccttcccttcccagcacttcccttccatatcacaattactacatatcagacaaaacatattcatgaaaatatgtttaatatatgcagttacatgtgtaatgaagtaagcattggctcattcagtaatctgcaaccacatgaggaaactgaggcttagagagaaaggatcagtctcttgaccaggcagggagtagagtggctgggattcttctggagtcggttggactccaagctgggtcttctcactttgtgactatggaaagcagctacagtgatgatgaaccaggtgtttgagaaatgttgctcaattctccttaacgttttgcttttaataaattttatctgaagtgacttaccccgcaatgcaatagaatttttaaaatatgaatgttgagttagaaggaataagcagactttgtgtttgagctgcaatcttctgtccacgagcccaatcttttttaaagtaaagcaggtttcaaacaacaggatttattttttacgttcattatagaaagccctcatttttttagtccttgtcctcccttcccccrtatacaatttcctccattttggcagtttattttctttttggcctctcatttcaaggatgctgtgtgttaattagaggccccgcggctttgattgagtggtttttttttttcttcagaggttttgttgtggtgttggcatttgtcattcattctgatgttaatttttaaaatatctgtcagcaaattaaagtacacattacatgctgattttgtttgtttgtaatatttatgctcagtggtcacagtgtacgtctgatgtggttttgaacttttcctttcttgaaacatgtggaaatgtgtatgtgggccactcttattaagagtctgcacaggggttttcttctccaacatcttcagagggaggtggccttgtctgatgactggaggttatcatcatcacagttcccccacccagagatggcagggatcttcaggtttatccaatttaaaaggtataaaagtgccagagaaaggccaccaagtccggttatgcaagaaaacatgaccacggtaggttagagaagagagaaaagagaagcatagcatgctattaggcatgtaccaagaagtttctgtttcatataaatgatgatgcaaaagctattgtggacagtatctgagaggcccaaaatactgaacagacttaaaagtaggggatattttcagtgactattgcttacatcatcattgtaacatatcgaagcatccactgagtaaattggatgctttctgaactttgattagccagctgtcataagtgttggcattcctttggctaaagacaagaaagagaaatctaggtcgcttgtgtctgtgcttgtatgtatacttcgattcgcaatacttttttagtgactgaaacctgatttcaatgcaggatggaaactgaaagacaggcatatttaaatgtgcagagtgctttctactgtgctctgaagacaaaccctatccactttgctcagcaggagcaaagacatctctcatgcagggtacagtgacatcttgccatcttccgcctgccctgcgtccattcccctcacccccccgccctctttcggaatgcgcattcaaatggtgctgcttctgcctctttgccacctctagggtctggatctgtgacccaaactggtcagccgggtcctctgcctcactgaccatggcagttgattcaggaatgcacatggtgccccaggctggagtatcacctagagasagttyaaggattttttacagaaactaattgggggatggagctcttttgctgctgggtctcttataggaggacggtgtcagcctggagcggctaggacaccctgcagaaggtggctggctgaggatgaattgagcacagaggaagggtgcactgagagccatcagcattgagcacacccctggatccagctctgcctgaagctagagccatctctgacctgttagatattgtcgttctatagcagaaacacagttggttccattttcctaccatgcatctaccaagttggagtaggaagggactttgtctactttttatagacttcagtatgtccttcccccagcttctttacccaaggaaaagaagacagcgttgggtagaagcgaattgtttgaaatagagagggaaggaaataggagcttttctaagcgaggcctctttctcttggcagccaacaattctaactggcttagagtccaatagtcctgagcagtgctgtccaatagaaatataatgggagacttatgtataattttacattttctagtggccctattaaaagaccaaaaagaaattcattttattgatatattttatttagctcaatatttccaaaatattatcactttgagatgtagccaacataaaaagaagttagtgaaatagtttgtgttcctttttttttttgtactaaatctctgaagtccagtgtgtgtgttgtaactaccgcacatcttaagccaggctagacgtatttcaagtactcagtagcatctggccagtggctgctgtgttggacagcacagctcttgaccaacgcagatctggaaatgcagattcactccccaamgctaaatttagtgcaggcaagatcaagaggtaggaaactcagcctcagcccagatcctccaggttcctcccacacacttggggtgtgcactgcctgacttctattttagtcactcatcattgaaagggttttggctcttaggcaagactttccctaaaaataaaacttggggacaactgagctcttaatctatgggcttattaattgctttaagtggagtttataaatcaagatttataaagtgtggatctgactcaagtcatttttccacaatgttggctaatcattttctcctgaatgttggaaggaagaggtcacgacttgggtcatacttgtgtcacactgcaaccagctgagcaaaaagaatccgtgccactgaaaataggttaggtctgttccttctaaatggttcctttattatgtaagtgacaatttctaagcaagattattatttaatgtctaagattgtgggaacctctcacctttgtgtcctttttgagtttcagtcctctcccctcttattatgatgaatccaggctctgttatttttaccccctaagtatctcttttttttttttttttgagatggagtctcgctctgtcacccaggctggagtgcagtggcgcaatctcagctcactgcaagctccrcctcccaggttcacaccattctcctgcctcagcctcccgagtagctgggactacaggcgcccaccaccacacctggctaattttttgtatatttagtttcaccgtgttagccaggatgttgttgatctcctgacctcatgatccacccccatcagcctcccaaagtgctgggattacaggcgtgagccaccgcacccagcctttaccccataagtatctcttaaatatatctgtttccacccagtttcatmccatccagttagtttgygcagcatcatttcttgcgtggacaattgcagtagtctcatgactagttcttagcatctgatctgcctggacccattcctctaccggagccagagtgatcttgccaaatgtaagtctgatgtcattgttccctggcttcctgttgccctcaggataaagcctggggacatttacctggcccctgaggccctgcraggcytaccactgctccctttatgctctccctcacctcatccacactggtggcttcccacttcctggtgtgaggagcgagctcctacagggcgtttgtgcctgctcctctcacttcctgactgcactggtctccgcctcctaccaagttaatgcttacacgatgtttagatctcagatgcttgatcacttcccaagggaagcctttcctcacatcctggacctaygtgctcctattgtatgttctcttaacacagtttacctttcgcttgttgtataatactcaccacaactaaaactctacatactaatgtatgaggtgtcatctcacacccattgggatggccactcttagaaacacaagaacagaaaacagaaaataagtagttggtgaggatgtggagagatcgaaacgcttgtgacctgtcaatggaagtgcaaaatggtgcagctaatatggaaaacagcacggaggtggctcaagaaattaaaaatagaactaccatataatttggttaccccacttctgggtatatacccaaaaggattgaaaacagggcctcaaaaagataattgcacactcatatttataacagcgttattcaaaacaggaggtagacacacaattcaaatgcccgttagaagatacatggatgaacaaaatacaatatatacacacaatgggatgttattcaacctcacaaaagaaggaaatcctgtcaccattctacaacatggttaaagttgaggacattatgtaaagtgaaatattctaacatggttaattaagaattgaggacattatgcaaagtgaataagccagtcacaaaaggcaaatactctatggttctgcttgtatayagtgagtactcgtagagacaggaagtgccatggcagttgccggggctgggggaggggaaatgaagagctgctgtttaatagmcagagttgcagttttgccacatgaaaacgttttagagagccgttgcacaacagtgtgacttcggttaaccatactgaactttccttaaaatggctaagatagtaaatcttaagtttttatcacaattttaaaaatgtacgtttgtgtgatttactgattcatatcagcttctctctgtaaactggaagctctgtgagtgaagtgaatattctcaaatatatccttagtacctagtacccatctttttttggtattcagtaaatatttaaatgaaggaattcataacattgaacaacctctcgtgtacaattgggtgggtctgtagttggctctgtgcagttagtgcctggtatctgtttgctgcattaacacaaacagatgccaagtatttcagcatttatacaattataattgtataaattacacacaggatctgcacctaagaagtgattaatagattaatgaatttagcatttttcttaagagaagtgtgtgcaaaaagtcagtaccacaaaccatatatttttttcacccaaagaatgatagacacttccatttaaaatttcagcccaactgttttagccacataggtgatgtctgtggcatgatattcattgatattggcgtytggaaacagttaatagtcacacttaattacttcatggaaaatgtttgttttggagatgatattaaaggagaggcataaatgaaattaagatgggtatttttgagcacctaattccaggaagtactacgctaatcattctccgatagttttatgataagagattaaaactgaggaagacagtgggccacagatggcactagcagaagtttatgtaccctaaaccaacacatggttgggcagcattgtcattatgatgttcaagggactgccatttccaaagtcataaatataagcgtgtagttggagacaggttttggttgagaaaaatgtgacgcatagatagcagccagcctccaataaatctgggatgatttcacggaagaaatagaacttctctggggcattgttcctcagcagatcagggggtgggtgctccaaggcccgctgccttggaagaggctgaaagtgaagggtggatctggccctgccagctcagttgaggcgtaggatttcagtggcaagtaaagctgtattacaagagaagaaaagtttaggatttggaaagtctatccccagcacagcatcttaattaaaggaaagagtaaggaaaagcagagagtaaagtggctgtgagtgcagtaaagaagcagaactggggaaaggagagcragggaggaaacagtgattgataacgggaggacgaggagcctgactgtgatggggaaggccaggtggagccatgaaacctggaaggagaagctttaaaaatttcaccgcaggaaattacaggcctgttgagaaactttactacgtatggcatcaaaacagagtaagactgaccatgaaaaaagatcctttaacatagtaactcggaattttgcctttttatgattaatgtgggaaaagtaattcttagaaataaaaggaaatggagggaatatcaacatatgaattttattttgtgctctttttctgaatgctaaatcgtttaaaatgaatccttaataagaaaaaggaataagcctttgtctggaatgtaaagaaagaaagaatttttccactattcaaatagaattaaatattgcattggggcattgtaatagttttctataatataaactaattgattctaagtgagattttaaaatctaagatgagcatgattttggaaaatagctcattattgctgaaattgtttcgaacaggaaatataaaatcaagaagcaactttaaataattaacaaacttgtctacttggggatttatttttatttaaaaaaaaaaactaatccttttttcccctcaatgttttcagtggttcaaacttagtggaataaacctaatgaagtaatattctcatacatgatatgaaagtaaatttgattcaagcttttatgtagttcttctgacataggtcatcttagtgacagattgccacctaccagatgccattttaggccactttctcccccaaaaactttttttaaaaaaggaaagtaattctctttattcttcagtatcactatgctagagttaggagttgtccagaaagttacagtttgggtccagatggtctacagagctcacctctttgtttttaaaaattcgatagggtgaaatgagcttccaacacttaaagctccaatcatggaacatctgactcataaagcgatgtttgaagctgtattttttgtgacttctccatgttgttttactttgtttcattgagttgtttatattcattcgtgttgtatgtctcttgccttctttaagttagttcttagttgtctttccttttgatgtccttggcaccgacctggtcctcccsccgaccccacaattctgtttccagttcagtagtagttacttaagggtgtctcctcccatgttccttagagcaagtgcctttctaaactttcatactagccatgtggcataagtgtctgtttagtttatctttcccaatttttgcctagagactcctcttaagctgtttactgccaaaatcaccattgcagttaattctaaagccattgtataagcccccaagcccttcagacatgtcaaggaaagtagctgtgttcattaaggacaatacttagtgctttcaattgctgacaaagggaacatgctgcatttccagcgacttcctaacagtgtcacytgtgtatacagagaaccctcaaagacctgatatgtgtatgtcagactcagaagattgcccaagaaaataactagtttgctaaatggattgtaaacaaaatgttatcagtttaacccctcacttccactcagctctagagaagaatgggggttcacttacgccctttagatgagaaactttttgaggacagcatgttctgtagcgtgaagaagacaactcgggaagtgtctaaggaatggaagacaagaaggaggggagggccagaagagaaaccacaggagcccccttctcagtcaccgccagttaggctccttcagacaaccctgtgacttgctttataaggtatgtcgaaacaaatgaacctagatcattttgagtaattccatgtcatccacacacattggcctcccagtgttacaggaaagaggtcccgatccagacccaagagagggttcttggatcttgcacaagaaagaattcagggcgagtccatagagtaaagtgaaagcaagttttttaagaaagtagaggaataaaagaatgactattccataggcagagctggtgggagtgtagcagtgagaatgaacagaggtcgtacctgtcaccatcttggtttggtgggttttggctggcttctttattgcaacctgttttatcagcaaggtctttatgacctgtattttgtgccaaccttgtatctcatcctgtgacttagaatgccttaattgtctgggaatgcaagcccagtaggtctcagcttcattttacccagcccctattcaagatggagttgctgtggttcaaacgcctctgacaaccagtacctcaggctctcaactctctgaagcacagttcctgccttcccatcgccccagcaccttccactcactctgtctccactcacgtccatcaccacttccccaggcacaggagcttaaaaccatcagcygccttcccactctctctccctcatccctcacatccagagcagggtcatgagtgttcactcctgcagctgtgtcgtttgtgtgtcccagcatttatagcattctaccaccggtctccttgcagatcaccatgcgatttgctcccagagggcacaagccatgtgcacacatacttggtctatggggcatgtggacggggcaggagagcagagggcatttggctctgaggacaagaatttaagtcaactcaaagaatcaggactttgtgtatcttcttttgttgtggtttattcccacaaaagcgtatcttaaactctcattctctgctagtgactctttttgagaaatgctttatcgagcacctgggacaatatctccagtggtgtcactaattgaaggtggctactgagagggacagcaggaggctctcttggccactggccttgaccttagaagttcagggctgtaacctaaacatgctaaactttattaaatatgccagccaggatctttggttacaatgaaggaaaaaaatggacgttacttaataaacagaaaaagaatgcatagacagttatcatgcaatccatagaatatatgaaaaagccgaagaaccaggctgagaaagctggtagaagccaaggaggctacttcggaccacctgatcaagacccaaccctagcactgccaccactggatgtgcacctctgctggcgatggattctggactccaccctccaagtaatctttgaggtggccagtgctggcaggcgcatctgatggacaagcccaggtctcccactgtgcaccagctgtttcctttctgcagtggttcttcaagcagatttatgcaaacagccccaaatgtgttttaggacagtcctggcgatacccacattctcctgcaaataataggaggaaaatgtctttttcatttggcttccataggggaaagagttaggaggaaaatcctagactttttcttgaatatcttctcccagtgagaagacatatttgcctaactcaatcgataattgattaagtttaagaaattaaacttttttgaaaattcagtaatgcacacagacaaagcaagagtttttcccgtgagaaaaataaggcagacctgagcttgatacactttaaaaaggtaggtggtgaagaagaggtggcctcctagacaaagccacagcggcgtaggcctgtccatggagtggcctgtccatggggtactgttttgggcacagtgacagcaaggaataatcagttatcagataatcctaagatcagaaattgactacatgtaatcatacataattcgtcagtgtctaaagcaatttgaataacaattttcctttccctcacgcttccaagaaaatccagcggctaatccatagatggctatctcttggcaaactttgctttttgtgaagtagccacatgtcccatcagattaaaaagtgtaatttctttgttttcacaggatactgtccagtcaggaacaacaaaaaaaaaaaaaaaaaaggaagaggggaaaaatgtgattagtattatgtcattttattaatgaaggcactggtagtttcacacttaagtaaatcagttattacaagcaaggaaagttgctctccagccataatcctgacaggcctcaggggtattgaaaggttccagatgacttttgtttttgcagcagaatttaggcattgtgaacttctttctagaacacaggtcagttcatataaatctgctggaagaacctttacaataaggaaatggtattgataagctaccatttttccattcccaggagctactatttattgttacaagttacgttcccctaaatgaaaaaggcaacctcacctatcccttcatgcccccaaagctattcagcataagttaatcttttcaacagaagcagccaacttttctagcaaaggaatttgcagtctttgtggtttgggtaaaaaggtggctcattttaccagtttcttgatgaaatatgtttcatgataaattcaatctttcctcagaaaaattccccaaatctacttttctgtgcaaaattcagcatgaaagcctttctctgttgaagcagccaaagattgagtttgtgtagacctgggcaaacagtttcaggtccaaggttaaggatatttattgctggaggtattacatgtattcgtatccaggaagaacaaaattcaacaccttgacactggttttcaaatatattaatttactttcttttgtttggggggcatttttttttctccctgccctccttttaatccttttccacacttggtagaatgtggaaggatttttgccaggggtaactagcaaagctatacaatgtgttaatacacaggagatctgctggtttcttgcacagacttcagagaaagctgcttgcactctgactttggcataacatgcaggaaattcctcattggtctgcccaatgcaataaacagacctcctgcatctaaccacatccatgctgaagtttctcatgtggggttgcttttgctttttctgtaaaagttaagggtcccagcattcccattccacactttctttagctccttggctttggaatttgtgtaggactgtgcttgagagttaataggacttgtggctttattttttaatgttcgttatgtatacaaaaaggatagactaggtaaacgtgtcctccatggagagagagagagagaaagagagagagagagagaaagagagagagagaatagatgctcttgatataccttacagcttgataagaaagccagaagtcaccatttgcctgtgggtactctttagggacattgcttgctctattcactgcaggtgtttccctcagtaacccctgctactcaaagtgtggtccccaaggcagcaacatcagcctcatcagagggcttgtagaaatgctgagtctcaggccccagcccagaactactggactagagtctacattttaactaagccccaggtaattcaaagaacctaaaaggcagagaggtcctgggtgatacgccatgccaccagagtgcctgagtccatttcagtaaggacgccatgggagggtgtgaggggaaagcaggctgaccactggggcaaagagaaaaaagagcctggaaggactcgcctgagttcaattatgctcattaattcaatttgaggcaggaatgtgtgtaaataaacgctggcagctgcagcggctctgtttcccgcagggctcaggcaggaatgcaggggccattggacgtaaaaacctgactcggcattgggtggatgtttctgcaaccacgagataatgacggaaaagatggtattatcattatcgtattaggaaagtcttaatgcagagttaagtgccaaaccaagtggaactggagaggctgtgttagcatagataaaatcttcattatttgaaaagattaagcttacttgactgctccctcttctattttttaagtcaatacagatcggatttccagggggttacaatgagtaggacagcgccatggtcagasgcagcctgtcagtgtttccaagtaaataacctgttcgcatccactttttctcatacaaaaaagactaagttcgtgagaaacaggaaagagaaaattgaattatgtaggttaagaacaactccattgtaccataaacctgtgatatgtttattgtttaatttttggctcacagtgtgttcattcattgttttgagggctaggcagtgatcaccagttagccagttaatgtttgttaaaccccatgcggcatgctgggcaaagacacttgctcacttaaccattggaagatggctcttgtttgtactgtcatttttagaagctcaytgaatattatgaattctaaagagatgtctgttttgcagcttaaaaattagccacaaatcccaagcgtctactcactgatggaggggcgctataaatgaagagagttgtgttcttcttaaactgggcatgttgtccttaaagcccctgtgcctgagatgatgatgatgatgatgatgatgatgatgatgatgatgatgatgrtgatggtgatggtgatgatggtgatggtgatgatgatggcagcagctacccacaagctgggcactttattcaagctatatatatttaattcacactgtacctattctctatgagaaaccgaaaccaagtcctagtgaagttaacagccctgctcaagatcacacagccaggagtggggctgggctctgacctcaggctgtctccagggcttctaacagcagccattcaccctcagctcccctgctgtctcactctctagctctccctctccagtgtgtggcatgctttctctgcactctcagagctcgctgcatactcttatgaaaaaatacaaattagctgggcgtggtggtgggtgcctgtaattccagtactcaggaggctgaggcaggagaattgcttgaacccaggaggcggaggttgcactgaactgaaattgcaccttgcactccagcctgggcaacaagagtgaaactccatctcaaaaaaaggaaaaaaaggagaaaatacttgtgttatgattacaaactggggtgtgtgcaagtctctcacccactggactgtcaggagttttagagacgggactggcatggaataagccctaggttcacagcaattccttcctccttcatgcggacaggcccgtgtcttcactcctgtgccttgcactggtcctgtgggatgactagagagacagtctggcattgccaacatgtagtggacatctggggaagagtggagaacgcttgtcccctggcttctcccagcttcttgtcacagccagagaaagacctcccctatcagccactgcaggtaaaaccagagaaaacctcaccacctcccagtctgctgcactgcctgaagcatgtgtggatgttgatgtggcctgcgtgtgcaagtcagggtcatgcaggaaaaccttgcaagttcctgagaccttgagcgaccttcttggtggagacactgcttttaccttaggagaggtgatttaaaatctggctgagaatgacaggaagcagagcaaggagtatgggtctctggttattttatcccttttgtgcacatggccttttccctttaggagaaatggagttcagggggccagaaagatgagaaatggggttcttcagacttacstgtctaggccaccctcagtgytactcccttgtaccgacatggtgggagaatggttaatggaaggacagtggggcctttcactcctgcctcctgaacctccacctttgggagggtcagtggcccttagcaaaccaggacaagttggagttacatgggtctctgttcccttctccatcacagcagctttgggaaggattcaacaagtttatgtcagtccttggggattggggatgatggctgcacagtgttggaggaaggaaatcatgtcgggacctcattccctgccactcaccacccacacgccccactcccaagtattcaagggccaatttgtttgtggataaagcagatcccccgcttctgctcccacttctcrcgggtgccttctagcttcctttgctcattagcaggctcttagaaggcaggctgcagaaggaggcaagagatcactccaaaatcagaagtgctttggctggcacttcccagcagcttccttgggaagatagaggatgttgtgatcgcctggtctgggacagtgatgagctttctccctcctgatcctctgtcagatgcaggcagtccccgctgctctgagctcttcaactgttactctaaccttggcctgagactctcctaagcatgctttgaaaagtaaaattcgtgagaatggggcccaaacatgagagcacctgggtgaacagagtttgatttcattgcccctgcggcttctcctgccccactcaggcacttgccctcctcccacgagccatcccagatccctggggcccttctgcatcacctctgacgagtccactcttgtcccctctcctggcctctgccgactgttgactctgcagggaacacaggaactctctacagagatgtaaggggcttgatgctgtgcccttgcctgcatggccttcctgttactttgtggcagggcccactatcctgagctggcctccatgtcctggtctgcccagggctcgcttcctctctccagcctgagagtcagtctcctttctccgcttgcttttttttttttttttttttttttgaggtggagtcttgctcttgtcacccaggctggagtgcagtggtgcgatcttagctcactgcaacctccgcctcctgggttcaagcaattctcttgcctcagtaccccaagtagctgggactacaggtgcccaccagcatgcctggctaatttttgtatcattagtagagatggcgtttcaccatgttggccaggctggtctcgaactcctgacctcaggtgatccatcygcctcggcctcccaaagtgctgggattacaggcatgagccaccgcaccaagcccgcttgcttcttttctctaatgtctcttttcctgaccctggccctctctccttcttttggggtggctggcatgcttctcacagaggccatcgtaaaggctggggaggagggctggagcctgctggggtaatagtgcctgtcctgcccagctcatctgcagagcccccggggttggcgactgcagcagtctcagcacatcagtcccgaaccagagaaattgcagtgtcctgctgtttttcattatgctattttcttcctatttattctatggtcttgtttctcttagaattaaacaatcagaaactgatatgargggaattcaatcagagcagggtatttgtggagccagggcatttctcctctttgacacagccacatggcttgttttcatgcattactccttaataatgtgtttatttatctagactcacacgattctctcttgccctgggtaatccactattaaccgttaataaccaggatccctagtgaaggaagggatttttcaaagaaaagcaaagggaattgcaggtttgaaattctagagagaatttcggtgggggtgagaatacaccctcactgaagagaatgtgggaaaataactgagagtgctcttcaagaggcagatgttgtacttctgctgatgctccactgtattcaagctgcattttgtttgaaagaagcttttcctccaagaatattacagtagttagttctgaaattgacaagcaatgttatatcacgtcttggataaagtatatatatttatgtatctgtaactaatgaatactgacattaagctttccaaattacttaataggacacctgtccctcccaaaagaaaagttggaatgtcggggtggtgatggtggaatagcgtatttgttgctgggatgaggtcataaagctaacttaactcttgttctgaaagagtctcagtgtggaaacggtggcacttgccctggctgggtttgactgtgtgagttttgtgttttgtaattagaagggaggtgtgcctctgctttatggacaatgcctggcaaatgctgccctccctatttttgtcgcatctgcaagtgtggtatgcatcttgtaaacaggtcactaattccaggctaggggctggaaggcagctataatctcgctcacgtggtttcacccgctccatgtgcgctggatgccgacagcacgaggggaagcctctgagagcgcggcttcrtggggcagagcatctcccaggcccactccatggaaatctcttccaagtggcagcccagagcctcttcgtgccatctgatagctgttccatagcgtataggaaaacagctgagactcagggccttctccagagggagcgccagagattactgccaggagagtgggaaatggtgagaaaaacatgaggtggcttccactctgcaagcccttagtactacataggctttatttacatggtattgctggttgctcattgtagggtcaaatttatgaagaaaggggtaatcagctcaggcacattgacaacagctggtctgctagctgacccagaacacttttccatataccagccaacaatgcataatgtctaagtaggctctataaacatccatkctgtgtgactcatttgtgtaaagttccagagcttgcaaaactaatttatggtgttggaggtcaggagcgtgggtatgcctgggtggaacagaggatgagtaagaaatggaagaggtgtgaggaggcttctgctaagtgtctggggttttttcaaatctaagttctgtccatgggtattcattttgtgaaaatggaaagtcacttgagatgcacacatgtgatctgtgcactttatgtatgaatattctacttctataaaaagtttacactaaaggtatgacatcagatcataaggaaaaacttccttcctcagtccaactctttttttttttaagacagagttttgctgttgttgcccagactgaagtgcagtggcgcgatcttggctcactgaaacctctgcctcctgggttcaagcgattctcttgcctcagcctctcaagtagctgggattacaggcgtcggccaccatgcccggctaatttttgtgtttttagtagagacgggtttcaccatcttggccaggctggtcttgagctcctgacttcgtgatcttcccgcctcggcctcccaaagtgttgggattacaggcgtgagccacagcgccaggcccctcagtccaacttttattattaataaattcagacaagagaggaaaggaagacaacaaatgttaatactatgtgtcttctacatgcaggccctgagccaggtgctttctttacatccaccctgtgagccatttagcttttaatcacttcttattaagttttgatttgtctattgaggattcccagtttgtttgtgtttttttttagtttgattcttttaacagaccaatgatcatatcaatatgtttttgaatctcaatggaatacttttgaataaatgcttctgtgggctgcttatccaatgaataatctagaaattcatttcaacacactaacatggatatcaccaccatttgagtgacttttgaggtcgtggaagttgatggcactgcccatggagagtaggcaaggaggcagaaaggaaagaacccagaccccccccccgccccacccccagagaacactggcatttgcaggacgaataaacagccttctgcttaacaagggtagcacagcacaggccagctagacagaggttcatgatcgctctgtaaggatgcttggataattcaatcttgttttcactttataaaagtgaaatagctttgggctgttgtgaaattctctgtctgaaattttaggttaggacccaaacaataacctgatgtgaatttagtagcactgcacttgtcctccttaaacaactttatctaaaagatgcctataaatattttgtataaaacttccggaattggctgataaggggactttcctttttcttctgcgtcaagttcagaaaaagctaaaagcaaaaaaggaagcaaccaaatatgggcagtatgcagtaactaatgaagtgagtgatgtggcttggaatatacaatgtgctcaaatgttttaccgctgggttcaacccagttagtatatagaagtttgtagagttcagccgggtgtggtggctcacacctgtaatcccagcattttgggaggccaaggtgggctatcacctgaggtcaggagttagagaccagcctgaccaacatggagaaaccccatctctactaaaaattcaaaattagccaagcatggtggcgcatgtctgtaattccagctacttgggaggctgaggcagcagaatcatttgaacctgggaggcggaggttgcgatgagtcaagatcgcaccattgcgctccagcctgggcgacaagacggaaactcttgtctcaagaaataaaactgtagagttcatggggtcatttgtatagaaggaaattttattgaaatcactagttttttttcttttatgtatgtgaaaatactatttctgaagttctcttctcttcgtcacctaaatatggcaattttttcctacaatctgtcaacgactatgccaagaagcaaacaatgtgagttctaccacataagagaaacttcctttatacattctccacaaaagatttcaatgttatttcgtataccatcttcagacagtaatttatttgttttactatttttgctgttgttgcttcaggcctgatcattttccccatttcctaataggaaccaatttcctgttaattgctattaaatttgtttgctcatcctttgtcatatatatatatatatatatatatatatatatatatatataaaatttaaatgattttaaaaaataatatatggtcaaaaatccttgtattgaaaggattgaaaatcccctaggtgaaggtttgtattaatactttttgtttaaatcaccttcttttttatctatttctgagctatagaactcttgaagaaataatttcactgttcttaagaaaaactcagagatgtggtttggtcataaccctattcacacttgcttgaggcccattggtggattaatgctctccttaagaagcatgattatctgaggcttggtataggttttcaggcaccttagctcttttcctgttagatgtcagtatcatggctgcatcctccttccccagtgcatgaccactccttgaccttcacggtggtcagtctccagcagcacttacctcctgcctatttgttccttctagaaattcttgctgttttttgcttctgaagcataattccttcctagctcccttgactgtgactttgccactatttcattgcttcattctcctccatggcccattccttaaatgtaattggtctgaaggttttttttcctcagatacttttttaaattttttaacactttttaaactttaaaaacaaatttggccgggcgcggtggttcacgcctgtaatcccagcactttggaaggccaacgcaggcagatcacgaggttaggagatcgagaccatcctggctgacatggtgaaaccctgtctctaataaaaatacaaaaaattagccaggcgtggtggcacgtgcctgtaatcccagctgctcaggaggctgaggtaggagaatcacttgaacctgggaggtggaggttgcagtgagccgagatcgctccactgccctccagcctgggtgacggcgcgagactctgtctcaaaaaaaagaaaagaaaaaaaattttaccgtctctctgggttacattatatataccaaggtttcaattccagctgaaaactarcagcttccaaatatatatctttagcacaacactttatagttgctaacaactcagtttcctttgaaagtggagacagatctttttcatcttttgtatctctttaaatacctaacagaacgcctggtacacaaatattagatagaagaaaaatgtacatcagttaaaagttcttaatttctatatcaattttagaattgtgttctaatgaaatatattgtactagaagatgtactggaagcatgaacgtagatatttccttccctgatacgtatttgtacttctgtcttcatgaccagcagaccagcctcacaattagtccatttgtaactaaagtctctatcagacagaagtgcatactggggttttagatgacattttacacaataattgttttcttcatttttctgggacagactgattttgagcataagtctgtgtagtagaaatacgaaaatatttgggaattcttttttctttagtgggagccttttattgctagaaatgaatatcccatagagctaaagaaagacctatgaaatttagcttttaaaaacaaagctgtgtttaagttctttggaaacagaaggtattgcttaaaaatgacacagcagatgttatgaaatttgttttaaagcattactctcaggttaagtcatgtttgccaagttacaacccagaacacgtttttacaactcagcagtgctctgaaattgagggtctgtgatgataaaagggtactcatgttgtgcagtggaccacgagtgctctgtcaagctgtgggtgaggaaatgaacctcacatcaccttagaagagtcgagcatctcttcctgagttgactgagtgaagccaaagtaaagttgaaaatgcaagctacattgtcccctaagatttacttttgttttaatagatgctgtgtgttgctctcactcagttttggagttatctgtgggttttcttcaatgtgtatttgatgtttctttagggcaaagttacgccactcgaaaacgatcgtgttgaaagtgtgtcatattcagaatgggatagaaatcaggttgcttgttagacctgagccttttgttttgttttgttttgtttgagacacagtctcgctctgtcgcccaggctggagtgcaatggtgcgatctcggctcactgcaacctccccctcccaggttcaagcaattctcccacctcagcctcccaaacagctgggattacaggcacccaccatcatgcccgcctgatttttgtatttttggtagagacggggtttcaccaggttggccaggctggtctcgaactccctgacctcaggtgatctgcctaccttggcctcccaaagtgctgcgattacaggtgcgagccactgtgcccggccagatctgagccatttgatccctgccttcatccctattaactgataatttatctattcattagggggctctgtgaggtgggttctgactgatgttggaggggatgcrctataattcctgcctctgcatttaagtgtatgagtgtttcaccagggatgtccaaactgtcccaytttgggtaaaggacaaaaagcaggccaaacaagattttcttttgtctgacacaatttaaaaaaatattgcaaggtaaaatatttaacagaatgattgtactgggttggtagtgtgtgcgtgtgtgtggtttgcttgattytgaggcttcataatcttttaaaaagatggagatgtatgaccttcaaagcctttttctttttttttttttggagatggagtctggcyctgttgcccaggctggagtgcaggggcgcgatcttggctcactgcaagctccacctcccattctcctgcctcagcctcccgagtaactgggactacaggcgcccsccaccacacctggctaatcttttgtacttttttagtagaggtgrggtttcactgtgttagccaggatggtcttgatctcctgacctcatgatccacccgcctcagcctccaaagtgctgggattacaggygtgagccactgcgcctggcacctttttctcatttttattagtaggtagtgtcagcttgggttcttactgtgcacagcctatcttggcacagggtggcatctctttagttatgagacattcaatttggctttatgggtggaatttacttgatgcctrtgaaaaataagttaaaaggcaatggaaacaacaaatggaaacatttctctctctctctgtctctctgtctctctctctctctctctctctctccttccacctgtgttatgcagatgtactgggaatgaaaaataagtcaaaaggcaatggaaacaacaaatggaaacacctctctctctctctctctctccctcctcctctccttcccctttcttccacctgtgtcatgcaggtgtactgggacacagcatacagtgcgatgctctcctttgtgcctgggagatgctccctccatccccctcctctgccatagcctatttgatgacgtctgtgactgtatggggccacagtttgggtctcaactttgtgtgaagcacagacttttttttagtctgttttttttttttcgcatcaaaatgaggaccaaatatttgatgactcctgatagaaaatattcttcaaagaatacccagggctgaaaacattaaaagttagcacaaagtgttaagtggttggtaatattagtattagataggctcaggtttgggactgtttctatcaaacataggacatatcaatcaaatgttgttgtagcgtaagtccagagaagatttttttttcttttagaaaattttcttttttttattattattatacttttaagttttagggtacatgtgcacaacgtgcaggtttgttacatatgtatacatgtgccatattggtgtgctgcacccattaactcgtcatttagcattaggtatatctcctaatgctatccctcccccctccccccaccccacaacagtccccggartgtgatgttccccttcctgtgtccatgtgttctcattgttcaattcccacctatgagtgagaacatgcggtgtttggttttttgtccttgtggtagtttgctgagaatgatggtttccagcttcatccatgtccctacaaaggacatgaactcatcattttttatggctgcatagtattccatggtgtatatgtgccacattttcttaatccagtctatcattgtgggacatttgggttggttccaagtctttgctattgtgaatagtgccacaataaacatacgtgtgcatgtgtctttatagcagcatgatttataatcctttgggtatatacccagtaatgggatkgctgggtcaaatggtatttctagttctagatccctgaggaatcgccacaccaacttccacaatggttgaactagtttacagtcccgccaacagtgtaaaagtgttcctatttctccacatcctctccagcacctgttgtttcctgacttttgaatgatcaccattctaactggtgtgagatggtatctcattgtggttttgatttgcatttctctgatggccagtgatgatgagcattttttcatgtgttttttggctgcataaatgtcttcttttgagaagtgtstgttcatatcctttgcccactttttgatggggttgtttgttcttttcttgtaaatttgtttgagttcattgtagattctggatgagtatgttgcaaaaagtttctcccattctgtaggatgcctgttcactctgatggtggtttcttttgctgtgcagaagctctttagtttaattagatcccatttgtcaactttggcttttgttaccattgcttttggtgttttagacatgaagtccttgcccatgcctatgtcccgaatggtattgcctargttttcttctagggtttttatggttttaggtctaacatgtaagtctttaatccatcttgaattaatttttgtataaggtgtaaggaagggatccagtttcagctttctacatatggctagccagttttcccagcaccatttattaaatagggaatcctttccccatttcttctttttgtcaggtttatcaaagatcagatagttgtagatatgcagcattatttctgagggctctgttctgttccattgatctatatttctgttttggtaccagtaccattgctgttttggttactgtagccttgtagtatagtttgaagtcaggtagcatgatgcctccagctttgttcttttggcttaggattgacttggcaatatgggctcttttttggttccatatgaactttaaagtagttttttccaattctgtgaagaaagtcattggtagcttgatggggatggcattgaatctataaattaccttgggcagtgcggccattttcatgatattgattcttcctacccatgagcatggaatgttctccatttctttgtatcctcttttatttccttgagcagtggtttgtagttctccttgaagaggtccttcacatcccttgtaagttggattcctaggtattttattctcttcgaagcaattgtgaatgggagttcactcatgatttggctctctgtttgtctgttattggtgtataagaatgcttgtgatttttgcacattgattttgtatcctgagactttgctgaagttgcttatcagcttaaggagattttgggctgagacaatggggttttctagatatacaatcatgtcatctgcaaacagggagaatttgacttcctcttttcctaattgaatgccctttattcccttctcctgcctgattgccctggccagaacttccaacactatgttgaataggagtggtgagagagggcatccctgtcttgtgccatttttcaaaaagaatgcttccagtttttgtccattcagtatgatattggctgtgggtttgtcatagatagctcttattattttgagatatgtcccatcaatacctaatttattgagagtttttagcatgaaggttgttgaattttgtcaaaggccttttctgcatctattgagataatcatgtggtttttgtctttggttctgtttatatgctggattatgttattgattttcgtatgttgaaccagccttgcatcccaggaatgaagcccacttgatcatggtggataagctttttgatgtgttgctggattcggtttgccagtattttattgaggatttttgcatcaatgttcatcaaggatattggtctaaaattctctttttttgttgtgtctctgcccggctttggtatcaggatgatgctggcctcataaaatgagttagggaggattccctctttttctattgattggaatagtttcagaaggaatggtaccagctcctccttgtacctctggtagaattcggctgtgaatccatctggtcctggactttttttggttggtaagctattaattattgcctcaatttcagagcctgttattggtctattcagagattcaacttattcctggtttagtcttgggagagggtatgtatcgaggaatttatccatttcttctagattttctagtttatttgcatagaggtgtttatagtattctctgatggtagtttgtatttctgtgagatcggtggtgatatcccctttgtcattttttattgcatccatttgattcttctctctcttcttctttattagtcttgctagcggtctatcaattttgttgatcttttcaaaaaaccagctcctggattcattgattttttgaagggttttttgtgtctctatttccttcagttctgctctgatcttagttatttcttgccttatgctagcttttgaatgtgttttccttgcttctctagttcttttaattgtaatgttagggtgtcaattttagatctttcctgctttctcttgtgggcatttagtgctataaatttccctctacacactactttgaatgtgtcccagagattctggtatgctctgtctttgttctcattggtttcaaagaacatctttatttctgccttcatttcgttatgtacccagtagtcattcaggagcaggttgttcagtttccatgtagttgagcggttttcagtgagtttcttaatcctgagttccagtttgattgcactgtggtstgagagacagtttgttataatttctgttcttttacatttgctgaggagtgctttacttccaactatgtggtcaattttggaataagtgtaatgtggtgctgagaataacgtatattctgttgatttggggtggagagttctgtagatgtctattaggtctgcttggtgcagagctgagttcaattcctggatatgcttgttaaccttctgtctcgttgatctgtctaaygttgacagtggggtgttaaagtctcccattattattgtgtgggagtctaagtctctttgtagttctctaaggacttgctttatgaatctgggtgctcctgtattgggtgcatatatatttaggatagttagttcttcttgttgaattgatccctttaccattatgtaatggccttctttgtctcttttgatctttgttggtttaaagtctgttttatcagagactaggattgcaacccctgcctttttttgttttccatttgcttggtagatctttctccatccctttattttgagcctatgtgtgtctctgcacgtgagatgggtttcctgaatacagcacactgatgggtcttgactctttatccaatttgccagtctgtgccttttaattggagcatttagcccatttacgtttaaggttagtattgttatgtgtgaatttgatcctgtcattatgatgttagctggttattttgctcgttagttgatgcagtttcttcctagccttgatggtctttacagtttggcatgtttttgcagtggctggtactggttgttcctttctatgtttagtgcttccttcaggagctcttttagggcaggcctggtgtgacaaaatctctcagcatttgcttgtctgtaaagtattttatttctccttcacttacgaagcttagtttggctggatatgaaattctgggttgaaaattcttttctttaagaatgttgaatattggcccccactctcttctggcttgtagagtttctgccgagacatcagctgttagtctgatgggcttccctttgtgggcaacccgacctttctctctggctgcccttaacattttttccttcatttcaacttttggtgaatgtgacaattatgtgtcttgaagttgctcttctcaaggagtatctttgtggcgttctctgtatttcctgaatttgaatgttggcctgccttgctggatttggggaagttctcctggataatatcctgcagagtgttttccaacttagttccattctccccgtcactttcaggtccaccaattagacatagatttggtcttttcacatagtcccatatttcttggaggctttgttcgtttctttttattcttttttctctaaacttctcttcacgcttcatttcattcatttcatcttccatcgctgataccctttcctccagttgattgcatcggttactgaggcttgtgcattcatcgygtagttcttgtgccgtggttttcagctccatcagctccttcaaggacttctctgcattgattattttagttatccattcgtctaattttttttcaaagtttttaacttctttgccattggttcaaacttcctcctttagctcggagaagtttgatcttctgaagccttcctctctcaactcgtcaaagtcattctctgtccagttttgttctgttgctggtgaggagctgcattcctttggaggtgctctgatttttagagtttccagtttttctgctctgttttttccccatcttttggttttatctacctttggtctttgatgatggtgacctacagatgggattttggtgtggatgtcctttctatttgttagttttccttctaacagtcaggaccctcagctgcaggtctgttggaatttactggaggtccactccagaccctgtttgcctaggtatcagcagcggtggctgcagaacagcggatactggtgaactgctaatgctgctgtctgattgttcttctggaagttttgtctcagaggagtacccagccgtgtgaggtgtcagtccgcccctactggggggtgcctccaagttaggctactcgggggtcagggacccacttgaggaggcggtctgcctgttctcagatctcaagctgcgtgctcggagaaccactcctctcttcaaagctgtcagacagggacatttaagtctgcagaggttattgctgtcttttgtttgtctgtgccctgcccccagaggtggagcctacagaggcaggcaggcctccttgagctgtggtgggctccacccagttccagcttcccagctggccaccttgtttacctactcaagcctgagcaatggtgggcgcccctccaccagcctcgctgccgccttgcagtttgatctcagactrctgtactagcaatgaacgaggctccgtgggcatagaaccctccgagctaggtgccrgatataatctcctggtgtgccatttgtgaagccygttggaaaagcgcagtattagggtgggagtgacccgattttccaggtgctgtttgtcacccctttctttgactaggaaagggaattccytgaccccttgcgcttcccgggtgaggttatgccttgccctgcttcagctcacgcatggtgccctgcacccactgtcttgcacccactgtccrgcactcccctgtgagatgaacccagtacctcagttggaaatgcagaaatcacccgtcttctgtgtcgctcactctgggaactgtagactggagctgttcctattcggccatgttggctccaccccaagtccagagaagcttattgctggcgagcgtggaaacatgcatgcatgggtttctgtctgagtgctggagctctgtagagcaarggcagcttgggatggcctgccagtatgccctggcaattctgtgttacaggtgctgtcctttctgctccttgtggtgtgacatgccacaactcatttaaccccctgcctgggtatgtctgacaaattgagaatatagaacctgatttatctagagttttgccagataatgcatacgggtgtctggtatactctcctgaaaatatactatggttatacagagaattacaatagcaagtgactgggtacttcctgcagatggcagggataatagaggcctcccaggagggccactatctcgactgagattgagatctgagtgaggagcagagccggtggtgtccgcaccaggggaggcaaagctgagcggaggacacagagcatggtgtgttctgaggacagggccacagtcagacaggcaggaaggaaggggttggtgcaggggagggtgcaggaagaagagcagaggggtgcacggtagccagaccacggaggtctttgtaaaggacagagcaagaaacttgattttcctgcagatgggatggagagtctttggagagctttaataggaaaatgacatgctctgatgtctatttccaaagctcaccctgcctctctatggggaaaaaataggtggtacaggggaaagagtggaggcagggagtccagctgggtgatggggacttggagttgggagtcaggtggacatgaggcacacagctgtgttcgaggatgctgggacctgcccagggactggagtagaagctgtcaactgaagaataaccaggatcakacatttggaagagctttatttctcataaagggttatagcctgcaggctggccattcctcctgctgggaggcagagctgagagggagggaggataagacaggaatttatgctgaaatttctgggtggctggaaatacatatttaatgagctataggaggagtcatgaatatttatgagaggagaaacatgtacaggcacaattgagttccatgcctcttcatggattacatgttcaaaaaatggcagtgttagcatgatctgaggtggagttttcagccctctgacatgaaaaggtgcagtggaggacaccagaacctcactgcatcctctgagagtcrgccaaaacgtgtcccaaggtggtcgtcagtgtttacgaagggatgtgttgtgagacaggtgagctgtcacgtggaagaagtgaagaggraggggcatctggtcgcagtttcagatgattggctaaggtgataaaggaatgagttgtccatttctcattttccagagctgatttctgcttactccttagaaagagttttggctaaaggttaataaggaaggggcacactgaggcgtgttcaaccttatgtctgatgtggtcaaaaactccgtttttaaggtttctccaaggtctccttggccaagagggggtctgttcagttgcttgggggcttaagattttatttttatttctcaaagacctgggagagagaagtgtccaaggcacctgctagagttttacctaagcaaaggggtgggaaggtattagcgctgttgactaagatggaaaacacgggagaagaggggcttgtggagaaaccacacctccattctagccacgtccactgcgaatgcaggtgacacatggaagcagcaggaacacccctgagcatcttcatggagtttggatcaagatggaagaaaagcccatgcgttgtctaaggctgcctcatctcagaagccaatgggcggtgtaattagtgctgaaaggtgggctgggggatgactgcattgctctagcaaggaaggaggagcagggagmtgaagggagacaggtggaggaggccaagcaactggctaagcccatgagggctaagggaggcctaaaatgcgggacattggagaggaaatgttctggaagcttctacaggcaaactgcatkgtactggaaggggccgatgaatagtgctgggtcaagggtttttaagtggaattgagaataagggaagcagaaaggtggtttgaagaggcgaaaaaaggaaaatggactgaaccgaaagggccttgggagtgttatgggattggagaacttttcctaaataatttaggagctccagtagaatttatgtttatgtgaaagaaaaaaaaaaaaccacatgttacttagaattgggaagttttgtgcacccatgtctaggaattaaattttatatgaattcatatattatatattatatatacataatttaaattgtgatttttaagaagaaatcaaatcaaccagcaagggcaaaataaaaattttaattatctatttgtttttccattatttttatacacaaatcttagaagcaggaacagagtagtttcaaaggccagtttctgagacatgcttaaaattggcgctgataacaaagaaactactatgaatggctgaggtttcaaagttagattagagttcactctagatcgtatttgctaagctagtaaagccgtgtaggcttgttctagcctgttggctgggaaactatctctaaacaggatgtggtgattatttgtgaatgatcattactcattctgacaacagatcctcactgcatgcccaaggggacatccccttttaaacatgcgtataaagatgactcaagtacgaatatcatatgtacagcgtatcaatattagctgacctaccaaatctgaaaatgcttaagtaaagataatacacaataatctagttatattaagctatattcgggatccattaagtagcctcatagttatagaaaaggataacaaaaaaattttttggcaatctagtggaataggggtatggggtttaaaaaggacaatgaaaaagttcactgagcaggaaaggaatggaagattgctcaacagatctacaggaaaccattcccccgccatcacctctgcatttcaaaaagcaaatgcaattccrgtcagaagacattrtctacttcggagtgatatgcttataatctatctgtgtgtgttttttaactcttacagtgaagcttcaattatatcttcttaaccccttcccaaagccttgggaaacactggacatttttctatataagcagattgggttatttgtccaaatgacgggtgtttttgaactaggacatctagcttctatccataggaaaccccatatctggtgggcaaagaatagagtataaatattatgtatctgatatttacactttgggccataagtgtttgaaacagttatatctattcatgtgaaatttctgttcacattatagcaacaacatcaatttaaaaaaaaraaaacaaaaaagaattccccaagactgtccattctgcgtgtgtgtatgcacgtgtgtgtgcatgtgcaggcattttgcaccatgctgcaaaacagctcctcttcctacatttgcccttgactgttcatctcccaagactcaggtcttcattctcctctgcacgttcctgtgctttcaacccgtcttatagtgaccccaattctatgtgttcagcccagacctcttcctgaaccacaggcccacgctggttgagtgaatttccagttttcagtacgacatttcctcctaaatgtctgtggtctttcggtccctgaaaatcaactgtcaaactattaactgactttatacatcctcagcatgcacacacacacacacacacacacacacacacacgtaaatgcacatggcaggggttggggcacaaagtagataaaaactcctgtctcgaatcacttgaacctgggaggcggaggttgcagtgagccaagaccatgccgttgcactctagcctgggcaagaagaacgaaactccgtctcaaaaacaaaacaaaacgaaacaaaacaaaaaaaattccggtctcctgccatagctcctgtcttggtttcaggttactcatactaggaacgcagagacttattcttgacttttctctctcccacagtctccatacgcaaacagcccccagatatggctgctttaaccctgccgttgcatttgaatctttcctttccttcctgctgcccctccaccacagaccctgctaggtctgactgccatggctctcttctttcccttcacctcaatctcacatgtcacttcccactaaccccacctggtctcccatcctccatcctgtcccctctaagtctgttcttcattggaatgatcctttcagaacctgaatcactcatgtcattcattcctctgttcagaaacttgccgtggcttctggcctcattaagagagtaagtctaagtccttgcaatgatccagaccactgttgattatccctgccactgctgtccttgctcattgctctctgccacggtggtctcgttattcaacgtccctgggtagattttgtctttaggttctgaacttgctgttccctttgccctcagccctctcgaggggtcactcagatcctcagcactgccctcctcagtggaccgacatcgacaccttaccctgtttccaagtcacttttcacctctggacacactgtgggatttacttatttctttggcttgttttcccacacacattcacacaatgtataagctctatgaggctgcagtttttgtctgttctgcagttgatttctcagcttctaacaggaagtaaataagtagtttttaagtaaatgaatgtgaatcttctggggagcatttaaaaaaaaactgttgtacraactctgcagattgaggatcccttatccacaatacttggaatcactggtgtttcggattttgattttttcagatttttgaatatttgcattggacttaccagttgatcatccctggtctgaaaacctgagatccaaagtgctctagcaagcgtttcctctgagcgtcatagcacactcaaaaagttctgggttttgaagcatttcagatttcacatttttggattcgtgatgctcaacctataccttggacctgtcaaatcagaaaccttggggagtctgatccaagagatgatactttttcaaggttccccggtaatccactgcccagctcaggctgagcgccattgctgccagacagatttcctaaaccgtggacatcatcccaccttcatgcccttcgacattctccgtttcctcatagaatcatgcccagactcaaagtgacagtcacaaacccgcacccgttgccccaggggccttttggcctcgtgtcctgcccctcaccatgcgcctcttcctgcctgccggaagcgctgttgtcttcccttgggtgtgttgctgcctcgtgccctcccttgcctttgcctgtgctgttgctctgctgaaaatactttctttccattctctgatgggtgagttgctcaaggataaagtttggattcaaatgtcagtgttatagttttccctaatgctctctctttttcctcacatctccccccggtaattaatggttgcttatataacacattgtgtgtcatatccatatcctacaccattggagttcctcattctctcatcagactctgagcacctgaaggataagaacatttcattgatttatcctcaacattcagcgaataatcacatatagttcttttaccctcagtgtctgccaaattgycaaatatggttgtttagtgtgccaaaacaaaagttatgttattgatgtgaggtatctctttatcaagtttttccgagtattcagtagtcagatacctgcatgcgcatggctgtaagcatgtgtacgccccacccccgccaccgccccgaggagaagagtgtgtgcccagcctgggcccttggtcctgaagggagagcacgtcacccattgtcatgttattatccattaacgtgacattgtatcttctctctacccagagacatcacccatcttctcctcattcctgaagacctaactttagcctctactactctctctttccgcagataacctccttaggtactttacttacttaaaaaaaaaatttttaagggatgctttctaagtgacatctcttatacactcatttctaaaacgataagtttttctcttcctctccgaatttagtttcctattatcctgatctatcacttcttaacggacactgattctgctctaagcctctttcacttatttttatatgctctctctctctctctctcttacttccctgttggtctttcagttttctggtttctcctagcattaaataaaaacaagagcagtagccgtcctgcctggtatcccgtgctatccctgtgctccctcctccacagtttcgccaacagcggttggtgcgtgttgagtttctgttcacacctccggcccctctccatgccctctgcaggccgctgccatctgggtttctctggaagtgcagaggccacaggttgcaatctacwctccagcctcggtgcctgtctctgccctggttctcctctgccagctgacctcttgccttctgattcccagaaggacagggcgttggttcctgtgattttccactctcctggggccccttcctgcctctagagtggccatgcccatctcagcccttcctcgccctgagggctatcaaaccataaatgagagaacttgccagaaagcctgaggccacggaaacattccacacactgtgttttccttcccaagtcttggttatttcctctttgttctttgkctatactcctcaagcaaacctctttcttgaaatattacacttctcccaactctctctgcagttttttttctagcaccagtctrtatttgcctgcatgatgaggccttaccttaaactttacatgtctaaaacacatcttttgtcttcctcatcctttttaaaataagtccttccagatttctatctttttgtcattcatcttctgactctagtgccccaagtctctgatcatctctgtattcctccccctttatttgcccttcatggccagccagtctttgcatcctttcactaccctccccgccccccgcccaatcctagcataaactttcatatcctgtattacttcctgtcttcaatctcttcttttgtattacagctacaaacttgacctttctgaaagcctgttttcattgtgtcactctgctcagaatctgcagtgatgcccttatttctcttccaggattaggtaactctacccagtcttcaagggtttccacagcatgccccaccttagcaattcccagcaccccgaggcctgagcagcggtggggtctcctgtctcctctcctctctgccttttgatgaatgctcttgttcttcctgtatgaaacgctcccccgccttctctctccccctcttgccgtatatctcctttctttctcttcttgttcttctgtgagtacatctgtcacaggcccttggttttctgtcactgcttctacttaactattgagatgacagaatgagagccttcagatgggaaatcctggtttccaatgttgcttaaagtcttaccactttattaagcaagcctaaagctcagtggcagagtccctgagtaagccatgtcttcgtctctttctccctggtgatcaactctgtacttggagcatggatccttaataagtatgttttgttaatgaacagtcaaacagatagaaaagactcacgaaactgtttattgtattccaacaaatgatagctttgaaaagaagctaacctggtggctcacgcctgtaatcccagcactttgggaggctgaagcgggcggatcacttgaggtcaggagtttgagaccagcctggtcaacatggtgaaaccccgtctctaccaaaaatgcaaaaaactagccggcgtggtagtgcacacctgtagtcccagctactccggaggctgaggcaggagaatcacttgaacctgggaggcagaggctgcggtgagtaaccactgtgctacccgtgtggagatcgcgccactgcactccagcctgggcgacagagcgagactccatgtggagatcacgccactgcactccagcttgggcaacaaagcaagactccatgtggagatcacgccagtgcactccagcctggcaggagagcgagactccatctcaaaaataaataaaaaaataaaataaaaggagctaagttaaagttgaatgctcagttggataatcgtttactaacaattgataggagcttggcctctggtgagtttctagatgacagtggtcttagacctgtctctatcccttgctgttttcattcatacagtaaagaggtttattgactgagccactcaacaaccatttcgtaatatctatgatggggatacgttgatctttaagggtcctttcaactgtaaaacagcgttgatgacrttttctgaagacaaacaaacactcaaaagccttacttcttaacaggcctgttgaagattttctttttcccatctttgccatcacaggctttctttacactccctccactccactccacccctgctttttcttgtcctaactctatgtctacaccaaggctaggcccttgtgcttttagctgccaaacaccrtatactcttaaataaaaacagtagaatttgagtaaaaagagattttcttagagttctgtgatggaccaagcatgaaatgatacagccaactctacgaggaaataggaaataggaccttgaaggttcttttcagagttaaactgtcctgttggatygcttgttcattttaagactttgacttattttagatatttttttcagataaaagttcggtgatgacaaatgaactctacagtctggcatctaccctagcagactatcaaaattgaaatgattaatataacattcgtcatttgagataaataccttagaaatctcatttaaagatagtcatgtaacgccccatggttttctaccgaggcgtgctttctttgctcctatgtctgtagggcagttttctaatgcagtggtgtcagtagttaccgtaagtcagcagtcattgtgtgcagctctagtccgagcactttaggtctgtggtaacagtgacttaggtgtgttgaacatagtttcacccttcaagttgtcttgtccagctgggattacagaggaaatgagaatttcctaattagtcagttagactgatcttggatactttcatctttgcaacgtcttgtcttacaagaaagtaatgaagccgagattgttcttcctatttagaatagaccagggtgtccacaaggcctcaggtccttccgaggtgtcttgtaacagcattccacaacagctgttctgttttaaggctcagtgcactccacaaattccagacgccccatggctgctacagttgctgaatggtgacttcaggcttcacttggttcaagcctcaagggggctgagccaaagctggcatgacttgctcttcagcaacaagttccaaatagagaaaacatttcaaataccaactgactgctgctttcttcaaaagaaactgccttcagaggagaagctcttccctgtgctcatgatcctggttccatgacttccacagcattttcatttcccagcccttctgtggtggggacagtcgatctagtgattgtgaataattttagtgtgcaatgcttaacttttacaaaacaagccaacaaagctgaaaatattatttggatgataagaggagcaaacaaccttaaggaatatttttaaagtgtggatttaaattgaatcgtaatattaaatttttaggtttggtaccatgtaccttgaacttcaaggattgttatttaccagtaatatctacatattaaatctttatttaaacctgatatcaggaggaggagggtggggagagaatggtcaatgggtacagaattccaattagaaaggaacagtaaatgctggtgttctattgcaaagtagagtgacatactagtcccccaaaatgatcttagtacctgctactctagtcaacaaggtattatatatctcaaaatacctagaggaaaggattttgtacgttcccacctcaaataaatgataaaatatttgcagtgatgaatgtgctcattagacttatttgataactacacaatgtaaatatgtaccaaaacatcacatcgtaccccataaatatgtataattatgtttcaattaaaaataactttttaaaaagctgatatattttagctgagtgtgaaagctctgcaaatacagtagagttgttgattaatttttcgtattattatgcattttaggttggtgcaaaagtcaaccgcaattacttttataccaacctaaaatacgtaatacaatatttacttccttgaaaaggaaatccttaatgcacrtttaaattatgagttcccagaataatgtggctggtaaaataatacattttaaccatttttaagtgtacaattcaatggcattaagaacattcataatgttttgcaaccatcaccaccatccatttccagaaccttttcatcttcccaaacagatcccgttacacagtaattccccacaggaattcccgccgccctcccccaactcagccggttatatccactgttctacttcctgtctctgtgaatttacctattctaggaaccccatacaggtgcaatcatacaatattttcctttgtgtctggctcatttcactgactgtgttttctaggttcattatgttgtagcaggtgtgcaatttccattcctttttcaagctgaataatgctccgtctygtattggcctattttgcctgtcccgtcatctgctgcgggatggtggtagtgttcgcgcctgtggcttttgtgaagaataccgcagtgaaaagggatgcacaagtttctgttttggcattgattaattttgaaatgtgcctcactctttttcctataataggtaatactttttgacaagaaatattaaatatttttccaaaagtggtgcagaattggcatttttgctgttttcataatggaataatacttgaatgggtataggcccttattggaagttctgggttctaggttggctggttacagatttgtgtaagtcctcatgcctcactgtaaataccatcttcacgcagtagcgagccctttcacggcacctgtaaatgattaagtcaatgtaaagagaagactcattatccctctttagataaggccaggagatttgtgagagaggtttttgcaagttctgtgcagaactgcagtatggtcaaagctgagctgttaccttatcagctgtgtgtgagccctgcaggtgttatgtggacagcagtagagagaagtcaacagattggattttttttcttaatttctgtattggaaaaacatgggacaacgggtgtctcctatatttaatttgtgcttagatgtctactagaacctgatgaaagtgtttttgttttccagttaggaaaacacgctgtttcgctcacaaggttgaatgaagatggtggtctttgcgcaatatccatgtattaatacattaataacaattgagcttataataaagaattgtgccctttcaaattatctgaactgtctgctgtatgtcacattttacctttttagagaagtgctaattcatgttaagtccgcctgagagatttgtttaatgagcagattaaatggatgattatccctctcaattttttttttttttttttaaggaagggcttcttgtgatgctcctctgttatttggcgcaggaacacagaggggtctttttaaaattacccctgcagggtcaccaggacccaagctgtttgcttcattaaaccctggtggcttctttagagccagcccctccaaacagccctgacacaattgtatctaaattagcatctgactgacccctttctctcctcttttcaagcccctgctgacagggattggcaaaagatgttaattggttgggcctggcttggaacaatagacttgccaagatgacaaaagaactaatgtttctttcaatatgcatccagattcacataagtacctcttttaattcctgggaattattgtaatgcctggtcaatgggataattgaccctcagcagctagctcttactccataatacagcatggcacaggcctatcagagtagcaggtactagggtgatttgcaggggactaaaaagagattttctcagccagcgttctgtgatgtaccaaggcagcccagtgggagtcccagagaggggactaatttgagcttaacagggggaaaatgtgctaagagccactaaaacttatcctcagaatcataaaggagttgcataaaggaatgagttaggagtttgaaagaagtgagttagtagcttggcagcttcgaactcatatggtgaaggataggacctgggcccaacaactctagacaggtggagacgccgcagaatgttgacttccacacaggaaaacacaaggtttatttccagcacataccttcgctgctcgttttatagaagaggcatttccagttcagatgttaggctaaatgagcccccaaaccttttcttatctcactctttactatcccaacttgctagaaatcttacagatcgttttgcctggtactgaggctctagaatttgttttaaaaaattaactgtggagaaaagggaacccttgtacactgtagtttggaatgtgaattaatacaaccattatggaaaactatatggaggttccttaaaaagaataactagaattgtcatatgatccaacaatcccacttctgggcatttacccaaagatttcaaatcagtatgtcaaaaagatgtttacactcccaaattaattgcaacactattcacaatagcagagttatggaatcaacctaagtgtcaatcaatggatgaatggataaagaaaatgtgagacacacacacacacacacacacacacacacacacacacastggaatagtcttcagccttaaaaaagagatttagtcatttgcaaaaatatggttggaattggaaaacattatgctaagtgaaataagccaagtacagaaagacaggtgctgcatgttgtcacttacatgtgaaatctaaaacaatcaaactgaaagatgcagggagtagaatggaggttatcagaggctggggatgggggatggagagatgatggtcagagggtacagagcctcagtgagacaggaggaatatgtttttttctttgagatatattatacagagtagtgaatatagtaaataataatgtatcatacacttaaaaatcactaaaagtaaatttcaaaagttctctccacaaaaagatgcgtatttgatgtgagggatatattaatttgcttgatttaattattccacattgtattcgtgaatcatggcatcactttgcaccccataaatacatgtaacttgaatctgtgaatttacaacctaaattttttttaattaactgtgtaagtatggtatagtatgcactacagagtagtcttactttgaggtttgggttgtaattccaatcaaggttaatgtttaaaactagctgtctccgacctccattacggtaacaattggcactacatggtgctgagtgggagcttcattttgtggttatgacagcccaatctgagaaggaggtgtttgtggaagcactaaatgcagcagtgcgttggtcaactgagtagcctttgaggtcagatagccctgcgtctccctcccaacttgtcacctgtgtgacttttagcaagttactatcatccctacgtgtaggttcctgctttcaaaaagggataaagagttaaaaatagcaattttctaaagaatcgcagagcaaagtgagctgatctcatgttattccatacagtgccagatatagagtagtactggataggccatctgttgtcatcattgccccaggatcgcatagccaggaaggaatagagatgcaattcacactgactgctgtttgactctgaagcctacactgtttcaggatgctgcgttggcagttcattcctaaaatttaagggaaaatatccaaacacctcaaaaatggtgaaaaaatagaaatgcttgtttccatcttttaaaagagcaagtgagaaaaaaatatatccattaaatataacaaaattcagatacatcattctgaccttctttgccagaaaattattttcctttcataaaactataatatacttttttctagtgcatgtctgccatggaaggagaccatttaagcaagatattgattgttagttctcaagtttattagtttctcacaaagaaaaaggtctgatttatacaccagagcgtggggtkcatgccactgcctgaagctggtgtagagcatcctttaggcttcaagggtctcaatcagaaatcatgttgtgtttgttcagatgcttgatctggcgaataagttcagtctttagaaattaagttatcttaggttaatgtgaatcaaatttaaaaaatggtgaaaagcagcattttttgaagtgatttgagttaggaaattagtatagtgtacaaagtctttctgagcttctctgggagcagctctggtttttatcccagaaagtgtatcctttagcaggagggcttctagctgaccatggaagtcaaagttctagtccagcttcattactaagcagctctgagcccttgggtggttttgtccatcactccaggatgtttgttccctgagcagtaaaatgaagggacacaaccaggtgacctcatatgactcctcagcattagaccaaaagacactctcgtcatcatctcacttgatgtttgtgccattagatacttatggctacctctgcttcctgaaactcttctttgtggacatccaaattatttcttgcctagttccctcttatccatctctttccatctcatttgccagttcttccttccctggcttccatttaagtgtgtttttccttagagttcagcccttcctggatttcctgtgttttcctatggtatcacttccattcccatgacaatctgcaatgtgtatgtgtgtattaaatattaatataaatatcaagtataaatatccagcccttacctctttcttaagtgccagacttggcttttctaggaacctctcccactttacacctgtgtgtttacttggccacctaaacatcaacatacttgaaaataaaatctattttctacaacctgtgtactgatgagcacccttatccatctcmatgctcagaagtggaatgtggaaggtktttttatgctcttactattccctaacctacacatccatctgtttccatccctcctctccttcaccagtatgtcttcaaatccacattctcaatgctgatgtactggtgtggccctgtcatcttctgctcaactacagcagttactccaaaccataatccccttcccgccatgctttaccttatggtacacccctgtcactgcacagacaattgttaagggtcacagctacctacagagcaaaccccagtctccttagaggggcttcgcagtgctcccccatggggcttctgtctgcccgcctcagccaccctttctttaactccacctcttgactccaagcctggaaccaagccatggctttcacatgccgtgcatccctctgtggaacgcccttcttcccccttcccgatttgttaggatttggctcacctttcaagcaccaaactctcatcatttgttaaggtttcgccatgaaaggtgttactgcctgtgtggaatcttctccaaacttcctagcagaattcatctctttctgtgccgacccacagctcttaagcatttctgttctaaagtgcttctgttctaaaattatgttgcactctaccagtgcattggtccatttatcataatgttgaaacaaaaacatgaaacatttctgtgaaattcttctttatagaaatcatagaatttgtgtaattatgtacttaaacccacgctagtggagcatctgtcatactgtgttaccatcaacgggttgtgtatcagtcagggtctaactggggacagagaagccaggctaattatttaaaagattgtcatttaattaaaggaattcattgcagatgtcatagaggggactgagagagaacctgggggtgaacaacagcagaaaatcgccaccaccctgtgatgaaaggaccaagacaagaagcaataaatataccaaagctcagtagctgggtcgctgggctcattagctcaggagctggagccctagtgggccagtccagcaggggcgggagcaataagtgaawcatggccaattttggaaacctccaggcacagggggagaagtcctggcttctcccttcttctctaacctcttgccagcgcttcccactgggaggacccagttggaaggtgctagaaaatgcagcctgcatgagttggcccctgcaggggtgaggcagaactgactccagtcctagagacccagcacagacccaggctgtatctgtctccctcatgtgttttcttaaacacaagaacctcatcttacttgcttttgcaactgcagtgcctagcaccaagtaaggtttaataagtatttagtgaattgcaatgaactctaaggtttccttccaagactaaaattatgttgttctctaccagtgcgttggtccatttatcataatgttgaaacaaaaacatgaaacatttaccaagaaatttttctttttttctatcgtagagtttgtgtaattatttacttaaacccatgcgttagtgcagtctcaatcctattcctttattaacatgaagccagtgctatttatcagctcttggttggttttgaaaacattttccaccaactgtgcgtcagattaaatacaggaagggaaatggagacattgatttaataaacactaacaatgtgacagaaagggaaaaaattatgttgcagaccattttcacataactcatcctaaatatgcctttgaacaggctcctgctggtctgtggccaggccctctgcgccactcagcacaaaccttctgcagtacagcccacaaggccgtgggcacagcacaccgggtctgagccagagaactgtgtcgacggtaccagccttcctttttaaattgtcttgcattcccttggtggggacattccaaagaagacagacagtccccgcagcaggtgcatgtggtgctggtgttcagctgcgtgcattttcacaggttgctgtcttgcaggcgagtcaacctttagcctcacccttctgtcaccagcccgctgcagaatcttgtcgattgcactgatcagacataaagttatcgcgtcggctgtgccatgggatccaatgtttgatgtacgtggtccagcgaggttggaggaaatcttagaaaacaccccaagttctttgtttccaaatgaggaaatcgaagcccagaaaagggtcactttttgtagcttttggcctgtaactcatgtcactcctaacccatcatcatttttgttttgctgcacaagctctggaagttgttttaaaccttaactctgaacagagtgttacactgtggttgtatttgtaaattagtttgcttctcttctttctgcctcctcttatctctatttatgtttttctatatacctcttcttattaccttgagacttgaactcaaaaatcacatgttgggcacttgctgagtcctagataatatccagggtccatataacttggggtttttttctggcaccaacatccttatcatcagtccaattgctctcacttcaaagtccttaaatcttgcacttattttcacttcttagtgcgttaacagattgtacacaactcagaaggattgactctagccgcccatgcctggtagtaacctctcttcatgtcagtagaattttagagtctttgtctttgaagtcatcctccaacccaggccagggcagggatctctcctgtcctagatatcttcatggatacagttagcaaagttgacaccaaatgttaagcataatgagattagcctggttttcttccttcccttgtcttcccttcccttccttctttttgtccccccatttaaagactttctaaatctgcagagaaccagttttaacttactccgcagctgaaattaccagatgcaaagtcaaggcaaatatgatacagtagtagttgttttgcattgattatatctgctcctcatagtaaccctgaaggggtttttatagtctgcatcttatgaagaaattgagaaagacagagaagaggtaatctacccagtgtcacagagatgttaagctgcaaagctaggctatagtcttgggcctcatggatttcacacctgcccattacactgtgtcactcactctactgcattaggaagtacagcatcagctggtggctataacaattacaattcatacaaataagtgtaatttcaagaccaatcactcattaatgttgacataaataatttactagaaaattctattttggtgaagttttaaaatagcatggctttcactgtgctaataaatatttaaagaaagatgtatttgttttttcccagcaagtataaaaataatttcttcaaaattcgatgtattattttaaattagttaatagatgtatcacagccatggactgcagaagttgtaaaaccttatttaattctaaaatttcttaaatatcagagaatacatttttgttctttgaatattggaagccccaaaagatagttgaccatgaagaagaagatgagggaaatatgagaaggcagatgtttgaagagaataattatctgtagagggacatgtttttagattcaatgaattcatcacttgtaaagtggaaatcctggccaaaccacataaatggatttgagctgactgccagataaggagcatttcagaaataaaagggcaatggtgcagcttgaaggataggcttccaaaagcattctgataaaaataaaatgcctcaagatgctcaaggttcctgggtgatagataggagcttttcctgggaagagcatcagttattaaaataggaaggagggaaatttgtaacaagaaatgaagaggccaaagtgtgatagttgttgattgggctgcatatgctttcaactatgtgatagtccagttacaaggttacttgttgatggtggctccgttgttgcccaaagagccagatccatgattaaacaagaaaaaagccaacgtggtatattaacatccaacagtgaaaaaccaatgtctgttacccaggacaccaaagggaacccttcagtccaaaggggctcttaatttggaagggaataagcagcagtttatgttataatatattataattgcttattttaaagataatttgtcctagtttgtgaaagcctcccccccgcaacaataaattttctatgaattgcacaagtcaacacatagaaaatttggatgcagtgaaaccaaggataagatgatttggtgtttgattggcacttgtctcccatccctcccagcagccgatcctggttatttcatttcattttggaccccacttgtaacatgatgttagaggactgctgtattggttactgtgattattttaaataacttattgtgtattcctcataaaaattattaaagggtgcaaattgcaccctgggggttggtgttcaaatgggagctaaacagcaagaaaaggtagtttaaaatactattcctcataggcagagatacaacacatgtgatccccaaaagtagatatgagcaactgtgttgcatgaaaaccatagataatgaattctcttttttaaacctgaactaagtaatacctggaaagtaagtgaaattcacatgtaaaggaatgtatatttttccagatatgaagctacccatcctttaatatgttcttttccaaaagtatacrttgtcctttttactcaaaatgttcaggtaagcccacagttaagactcagacctgagggaagacaacatcagttcatctggggaaaatatagacaaggcctccgctaaagcatccagcatatggcagatgatgtcagccagggatagccacttacaacatttagrattggtgtgattcttatctgagcgtaccctctcctttataactgtattcagatctccacatctgagagactggagggatttgggttttgcatttttggtttcgggatgtgaaagaatgtatatctttctgctgaggagggctgtctgagctctgagtttgtagaaggtgctgcgaggtgggctgcgggagcctcaggattctctacccctcctccagctcctgccctaagagactacagtgtcactttaagggaagtttaccctccctcaacccacttccctacttccaggtcagcccttacctgtcagagcccatcactgcccctcatactctgaaactagtctcacctgagtcggcagctggcttttaattccaattccaaagattttctgtatctttcttatagacctctctgtacttttgtcagttttgggagattttcttgagacagagtcttgctctgttgctcaggctggagtgcggtggtgctgtcatagctcactataacctcgatcatagctcccataaccttgaactcccacgctcaggcagtgcccccacctcagcctcccaagtagctgggaccacagacatgtactacaaggcctggctaatttttcaactgtttatacaaacaggggtctcgctatgtcgtccaggctggtctcgaacttctgggctcaagcaatcctcccacctcagcctcccaaagtgccaggactacaggtgtgaaccactgcgaccagcgttgttttgtcttgaactcacttcctttggttcttwaaaacccttcttcagattctttttgtgttccagctagcccaactccttctcggccttttccctcttctgtaacttacaggtttgggttctacacctcagcattgagcccgtagatactggctcattcttcctgaatggtccttgtactcttctggcttccattcatacctgcacgtgtatgacctccaaatctaaatctctgaaaagttaggtcacccttcctggtgctggactcagtgacccagtgccctccagatgtatcaatctacacacattattaacacacacacacacatcctaagctcggcacttgtgaaaaagatgtctttgtgttcccctgcccacttcctcctctgcctgtgtttctgccttagtaaatggctccaccatccaccagctcacagagccaaaagccgaagtcctccctcttaccagactcatcagtcaccaggcctggtaatttgccaagtctccttgcaggctaccctgcccagcctcacaagaacctcacggtctctggccaggatgcccatggaggcccatcctgcagcttctggtgctctgaggctcccatgcccttcctctgcctttgacagactccttttcctaaatactgtcaacatttctttattttgcttttacttatttatgatctgagaaaaactgttcgcatccagagggcaggctgggcctgcctgtaaccccagcacttgggaggccgaggtgggtgaatcrcttgagcccaggagttcgagaccagcctggtgaaaacctgtctctactaaaaatacaaaaaaattagccaggtgtggtggtgctcgcctatagttctggctactcgggaggctgaggtgggagaatctcctgagcctgggaggtcgaggctgcagtgagccaagatcatgccactgcactccagcttgggcaacagggtgagaktctgtctcaaaacataaaccacaaaacaaaacaaaagcagagggcagaaactgtatcttccttccttgtagcctgagaagccatacagtcctcttttcctcactcccaytgcgttgtaaaagcaatgactcaggaatgagatcttagcaaaatttaacagtgaggctaaaagacttttcctacaaaacagtatgctaatattagagtacatatcatggactctttttcctcaaattatctgaaaaattatcagacatcagaaaaactgagttgaggccaggcrcggtggctcacacctgtaatcccagcaatttgggaggctgaggcgggtggatcacgaggtcagaagttcaagaccagcctggccaggttggtgaaaccctgtctctgctaaaaatacaaaaaaaaaaaaatagccaggtgtggtggcgggcacctgtagtcctagatacttgggaggctgaggcaggaaaattgcttgaacctgggaggcggaggttgcagtgagccaagattgcrccattgcactccagcctggcaacagagctagactctgtctcaaaaaaaaaaaaaaaagaaaaaaactgagttgaagttcatattttgttctacgtgtaatttatttacttgtgaaatcttgtactgtcatgaaagacttaggtctaaagctgaatatgctattttgattgattaggtgatatgttgtagaaccgtataatatttatggtttgaagtatagtttatggtatttatttgatcgaatgtgtattaaagtgaaaagtatattgaaatattaatatagttctaaaccagattaagtaaataacgtattgaggtagtgaatctttttccttctatagtttatttgttagatttttgtaaaaccattgttagattttgtaaaaccatttgttagattttgyaaaaccattggcacttttgtgaagtttgggaaataagaattaactacatttttggggttttagaatagagcaggaaaattctggtgttaatgattgcctataacctcaatatagaagaataaggacgtggaattgtaccacatcatcaataaaagttctccttaccctaaaattctgcaggtgggtccatcatcctaatcagtaacacgcaatttcaaaaaatctctgtggtcagtttattatgcttgttaagagtttttcttctaaagtaacatacagaatttggatgatctgagtgagtctgagcagggccccaggtggatttataggtgtttagaataaaaggatgcttttacataaatcagtacaattagttttattattgcaaccttgttttaggcatttatgttagctggtgacawgacgatgaaatcttcagatcctgatgtttcagtgaaccacaaatagaaggaagttgacaactatcacactatggaattgcaacaatttgcagagatgacagaaagggacatctgtttccagtcagtgggcagggagttggtttcccgtaggcagctgcctgcaccttctgtagaaggccaccaagtgctcagaggttatacactcgcattcccggagctcttcggagagcacaaggcaggagggtcagtgacgttctcgcattctttttctggctggccattagaattagtaggccacatctaatacgtccacacaggtccagatatcctacacaggggtgtgggttcccaaagaagsggggatyggtaggccctacacatttgttgctcatctgtttgcatctcaggcaactgtgagctggctgggcttcctgactgtgacagacacaaattctaatccttgtagcctcattcctgcaattgtacccagacccttgcctgctaggaagcccaggagatgccttctcttacagggaaccagtcttggaccctgcgccatgttgatccagaactgatgtggactcttttccgttgattttcaatgtgaagggaaagggacaagtggggttaaatagaaccagacctggccaccctgtttactttagaaagcaaaggaacaacctagaaacacatgtcttagtaggaacacaaattaagaaatagtggccctcctcacaccagaaaaggattgcaattatcatatttagcctaacaataccagtcaagtttccccttcccagatccaccagtgtagccctgccaagagcagcagcaatttacttgccagttcatgaagtctttctaaaattgtattttattaaagtcttttatttcactttcagcgaacatttattatttgcctcctacaagccagcacaccgcaagacatttgggacagaaagggtaagctgcagtccacagctgtagagggccaggctaagtgctaagagcctgaaacgcacargttgtgaaatccttatctgctttttcctaccacctttttcaacttaagaaaaatgacgctattaatattgatgtccagcaggccaacatttctttttgtaaattgtcaagactgaagttaacagtgaacaagtccagatcccatcctgccatgtagatccagtgtagcctggggataattcaacccttagcctccattttttttttttctgtaaaataggcatgatcataagtccctctgtcccctagaagacatcaaaataataaaaaaaaatggacatgaaagatgtccattattctcataaaagatgctacctagatccagcgtaggaatattttatgatggctttgatcttcatctttctgtagacatggggtttaacaatttaaattctttctggctttgtttttctaagattgccacataggtagattatgtaatcctagcatcttctgtgtggttgttctctggctgcataagacattgcaggaaaatgatagtatagttacagtgtctggtttgttaaatgatggactttcatcattatcaaaggataattcttttccaaatagctgagatggatggggaaaccagtactagccaggaagctacccttcagcctgcttcccccatctgcaaaagaactgaatggatggatgatgtcctacagcacagtccctcctccttccacgttgtctgctgtgcctctcccactcagaacagagtcactaaaggcttaacaagaacaattaatgcagtggtcacagacctgacctcctgtagatatctggattcatttcctagggctgctggtagaaaatgccacagaccgggctgctttaaccatagaaatgattgccttgcatttctggaggctggaagtcaaagatcaaggtgttgacagggttggttccctctcagagcagtgagagaaaatctgttccaggtctctcctaacttctgtttttttggcaatcttctgcattccttggcttatagaagcatcaccctgatttttctttcctcttcacgtgcgggccttcctgtgtctgtgtctgtgtccaaatttgccctttttataaggacatgagtcatactggattagggctcaccctatttacctcatttcaacctaattgtatctgcaatgaccctatttccaaataaggtcatattcagagatactaagggctagggcttcaacatttgattggggggggaatacttaatgtataatgatatttttttcattgaggtatgatatggtttggctgtgtccccacccaaatctcaccttgaattgtagttcccataatccccatgtgtcatgggaggacccggtgggaggtaattgaatcatgggggtaggtttttcccatgctgttctcataatagtgaataagtctcacaatatctgatggttttaaaaagggtagctcccctgcacacactctcttgmctgctgccacgtaagacatgcctttgctcctcctttgccttctgccatgattgtgaggctcctcagccatgcgtaactgtgagtccgttaaacctctttttctttatagattaaccagtctcagatacgtctttattagcagcatgagaacagactaatgctaggtgttctgggttccttctgtataaaattctcagtaataactaaccagataaaagactgaattgcctttttcttttttttaataagtgatgtggtacttttattccctgaaaaaaatcctctctcagctgggtttgtgaagtcacagtgactttcaggtgcttactgtttttattcagactaaaaaaattattaggtgggggcwgggcgctgtggctcaacgcctgtaatcccagcactttgggaggccaaggcaggcagaccacaaggtcaggagatcgagaccatcctggctaacatggtgaaaccccatctctactaaaaatacaaaaaagtagccgggtgtggtggcaggcgcctgtagtcccagctactcgggaggctgaggcaggagaatggcgtgagctctggaaggcagagcttgcagtgagttgagatcgcgccactacactccagcctgggcgacagagtgagtctctgtctcaaaaaaaaaaaaaacaaaattgtagatgggtctccttcttgacaggcattgaactagttgctgagaatgtaatgaaatgcttggccattgtcctcaaagaactagtaaagggaacaaacatgtaaaatatgtttcatgtaatgattgaaatatatacacagaacaaaaaaattaacttggctaaagttgtcaatcttttttttttttttgagacggagtttgctcttgttgcccaggcaggagtgcaatggcatgatctcggctcactgcaacctccacctctcaggttcaagcaattctcctgtctcagcctcccaagtagctgggactacaggcgcgccaccatgcctgcctaatttttgtatttttagtagagacgaggtttctccatattggccaggctggtcttaaactcctgacctcaggtgattcacctgcctcggcctcccaaagtgccaggattacaggcatgagccaccgcacccagtcagttctcaattttcatagtaaatttccataattaaattgtcttaaatgtggatctgagtgtatttttatgctgtttaaacccttcaataagcttcagcttgacattatgaaatagtccatgattcctaacaagacttaaagactctccacaatctaacttgtttccatggcaactttcccttgtactctgtgctccaccatggtagctcctggaatgttcctggccctctccagcatctggggccttgcctatacctagagcagggtcgtctatttttcccattccatggcccctcccctgtcaccacatcaackcctacacatctttcaggcatccaggatctttcctgatcactctccactcctcccctacctaccatcaactcccagagcactgactgtaacttttatgccatttatcattcatttaatatatttgttttccaatacatggacggggactctggggagcaggaactgggtctcccttatagtccatggtatctgctgcatggaatactgtgtctggcatgtaataggtgttcaatggctgttttgctaaatgaatgaatgaaacatgcaacagatcatggggatttggggatcatgtccccaaaataagcttaaaatttgaaaataaaaataratgatttattaccagtcacaaaaaacttaaattttaaattatcgtaggctaggcatagtgattcacgcctgtaatctcagcactttgggaggccaaggctggaggatcatgtgaggccaggagtttgagaccagcctgggcaatatagcaagagcccatctctacagaaattctacaatttttaaaaattttaaattattgcagagctctyggaaatgtttgaaagcatgaacaaatagattgaaaatgacttggtagtgacttctattggtgcccagagagccctgggagggccacaggcagataagcaaggcactttccctgcatcctgctgtgcctcccgctccttctccttgccactctctcctgtgtgattgttttgtgtttgatttgcctcctacccagtcttcattcattyaccttcttccctttcctgtagctcacatgcatggtttgtcctgatacgagcacacaaacactagctggatattgccctccgtgctgcacggcgggtccctgtgccccggagccccactcctcctcggctgctccacacactggaaactgcatctgacagaaagattaaacgtctgcattttatcacctttgttgaacaaaagtccatggcttcttcatttcaggagtgagttcagtgtttggtttttttctttgaaaataaatcaggtttgacttttgggggcccccaaatgattcccaatctcaaaataggctggtagctgcctgtgtcagaattctgagcttttctgggtcataatgccagttagcatttctcaaaccatggcgctgcttttgggccagcagagtccgaaaagaaataataggatgtatgttgtagttagatgagttcatgctgagaaatacgtgtctccacacgcagagatttaaaaggcctgaatattcatacggtcttatcaaagccactcactggttattagttcttcatagcaagtgaaagatatgtaaatcctcagaggttcatggtatatccaggctgaataaatctgaaccttaaaaaagaattggcacattgaatttttcgtagatgttcatccatctctgctgttcactcatataacaaggtgtttctttctcaggctgctgtcctgcctagagtatggcaaaagcccagatgaaattgcgattgctttgtctccaaactgtatttgatttagctttatgttgataccatttatcttcttttgcttcaaacattttacattgccgaagatggctttgaaagcagaacacccacatttggtatcactgcattcatttctcttatgttttggcttcaattcagtgcttttaatattcatgaaggttgaaaaaataaacatcctagactatttcctctgaatggaaatgttatggtttcaaaccctagagaaaacaactggtaagttctacaaacccacatcttctccccgtcagttggaaagtggccccagcttggcagaagtcacagcccccttgacactctggggctttccagagcagatggccagggggcctgtgttagggaagaggagagagtcagcagacatgaatatttaaagactccctttggaatcatagatactagaaccttttcagttgattcagaattatattatttctgtcacgaagaatatagaggaatcatttattccgttgacttctctgtgttcaaatgaacatcattgaaattttttcttagtcctctctccttcatttacattgagcctgtattgattttcatcctctctaaaattagctcagccagtcccttctatatagagaagaattcctatggaatatcagagcagggaatagagagcaagaactccacgcaaattcgaaagccaacctttaaagagaaagaaaatgattactctaaataattaaaagaaaactgatactcagaagtggtgtttcaataatagaacagttgtaggattcctgtgccgtggtaactccgtggattacccatcttgttgactttccgtcactattgtccaagatgacattcccagactcaccagctctcttcttccctcccttgcattcagagggtggtcccatgcctcaggctgatggctgcactgtttcataaatggcagtgaaagttctcccttattcttccacagtacaaggtgagcctccctaatgtgaaaatacgaaatctgaagtgcccccaaatcggaaacgttctgagacctgacaggatgccacgggtgaacagttcgacccctgagctcatgtgctgagtcgcagtcaaaacacagatgcctctctttttcaaaacttctctgtatcatctatcttctctgtcttttttgggaatccctgcaatttttctatgtgcttaaggctaacaacctcttcccgaggttatgttctgcatctctgtggctgactcacaagccgctaacaacctctttcattcctaccacttcccactgaggatgctgaagagacaaatatgggcatccccagcctccatcgtaaatgtgcgtgaccatgtgagccagagtgggcyggagagcaccagggaagtcaccggacgtccagcacgcaggcagagctggtgggggctgccttctctcccttccctgaaggcagatgggatgcccgttgccatagtgaccatcctggaacggtgaggctgcaagcaagaggaaaggtggcccacatgagggtggcggtgctaaagcactgaaagtcctgggcacctgagagcaccaagaaggcagatatatccttcagaattacattgggtcacaaatcaaccactgtttgtttgagccactgtttgccgaatttttagttacatacaaacacaacctgatactcccctccatgctacccctgaacaaaatgaagattttcaaaaaaccttgccagcggccgggctcagtggctcatgccagtaatcccagtgctttgggaggccgagatgggaggatcccttgagcccaggagtttgagaccagcctggcaacacagtgagacctcgtctctacaaaaaataaaaaattagatgtggtggcgctgcacctcgacaatggctggagcccatgagtttgaggttgcagtgagctgtgatcatgccagtgcactcaaacctgggcaacagagcgagaccctgtctctaaaaaaaacccaaaatccaaaccttgcctaatcctgtgactacttgtacatttttaattcccctatccccatgggcttttccctaatgtcactgaacttcccgaacgtgaactcccaaaatgctttaaatgactgtgctctgttgctccacggttctctccagcttgtaggtagggcagccccacgtgctcctgtgctgccccacgtgcctttgctccttgcacaacgtggggcttttctctcatgggtcatgagggtctttctagtctctgagacccataggtctttgccwgtctgccccttagcctgcctgcagcatttaatgctgttctcctctccctccacgctgacactctcccctcacttctgcactgcacctggaatgatcttttaacaatgtgaatcaaaccatgttccttctctctttcaaacsctttaatgatgtagaattatacttagaacccagatacctgctaacaagtcccagtctggcctggccctgtcctgttagcttccccgtaaagcactatctgcccacctccgcccccatcccccaccccgcccagttcctcctgtgcattaggccttgcactcagggcctttgtgtgggctattgcctctgtgtgcagctccccaaactctcttgccaatttctgcaccttctgggggactcagctcaaatactacctcgtgagggaatccctaagccctctctgcaatggcatcaaaatgctttctttcattgccatttatgacaagaatgttaattgtgttatttgtttcgtgttaacatgtttccccttccccagaatgtaagcatcttcagatgaggaaccttatgtggtttttttttcgtcattgtgtgcccagcaagtggctcagtgtctcacacataacatgggctcaaaagtattttttggttggataacaaatgaaggctcagtgccatctcactgtctgtcagatagaatctcagccacccagctgccatgcatgggccttagggtctggctgcagccgacctgtcacgcctcctccacatcccccacatgggaggaactactcagccttgccgccggtgttcctttcgtcctgctggtcctgcctctccagctccctcctgttgctattttaatatgaaaactgcacccactttgacaagaccagttcatgacacattttggatttgtccccaaccagaagtgacctctgcctcccttgttcttccacagtacagggtgagcctccctaatgtgaaaatccaaaatctgaagtgcccccagatcagaaactttctgagacctgacaggacgccacgggtggacaattccacacctgggctgatgtgctgagtcgcagccaaaacacagatgcatagaacacggttcatttaacgtccctaagggaaaaagaaaatcaccttcaggttatgtctgtgaggtatatatgaaatgtaaatgaatttcgtgtttagacctgggtcctatctccaggatacctcatgatgtatatgcaattattccaaaattcaagaaaatctgagctccaaaatacytctggccccaagcttttcaattaagggatattcaacctgtatattgctttatcttcattatggctcctgtcctatgctaagcagttcgaatgtaagatgccacagaagtgactgtgccccatgggctctggtgtcatcccccacccccctcgactgacgagtgcagaaccttgtttgacaggcatgctggataagcagtgggctgtgatggtgggtgctctgcccrtcgtgaggctgagagcactgaacagtctgcaatacctgaaccaaatggaagtaaattagaagsagcttgagctgggggaagaatcttgaagcccrtggccaacgttgaaaagagccttcatcagagtgtgaagtggcatccaagacagggaaaagccagggccaggtgcggtggctcacacctrtaatcccagcactttgggaggccgaggcgggcgtttcacctgaagtcaggagttcgagaccagcctggccaacatggagaaacccccgtctctactaaaaatacaaaaattagctgggtgtggtggcgggtgcctgtaatctcagctacttgggaggccgaggcaggagaatcacttgaaccagggaggtgtaggttgcagcaagccgagatcacgccattggactccagcctgggtgacaagagtgaaactccatctcaaaaaaaaaaaaaagaaagaaagaaaggggaaagctggagagttgaggtttggggacctgttatawacttacccacacagtgatggatgctccccgtacagtagaaaaaatgtagcacggaagcacgtcagcttagctggctgagcagatgttgtgctgaatgtggatctcagaggggaacagaaaggaaaaaggcctctggtgtggtcctcagaaaacagcacctacctccagtctcttgggattagccagagaagaaacgccagggagcattttgcttggggattccttggtgtctgttttktcgcagcttcccgcaagaaagaacccttttcatcacttgagtaaccattgccccctccccacaaaggaaaataaacaggaaaatttccctctggggtggctctcgagcatcagctgtagctgctgtagcaaaagatcaaacccaaatacttgcaccttgtggtcattggcatcaaaggctgcaggttttctttccacctaattttaatatgcttgtgagccttgggaggcttaattaaaactgcaggggagccaaagtaagcacacaaaggaactgttttgatgcttcaaaaacccaagcaaacagaatctggattattcaattaggtatgcttatgggatttgtcctgggtgttttgattgctcaaagcctgctggggaagtcagttatgaggtttagacctgaaaggaaccatagttaatgccccccaaatttcacttttcatcttcttagttaggcttcccgttaccagtgcattgttgtgagctgtgcatgaacttttctttttttttgagacggagtctcactctgtcacccaggctggggtgcagtggcgtgatctcggctcactgcaacctccgcctcccaggttcaagtgattctcccacctcagcctccccagtagctgggagtacaggtgcatgccaccacacctcgctaatttttgtatattttggtagggacarggctttgccatgttggccaggctggtctcaaactcctgatctcaggtgatccgtccaccttggcctcccaaagtaatccccaaagggattacaggcatgagccactgcacctgccctgtgtgtggatttttattccaacttctgtttcctcagctgcttcttctacagatgccagataacatggcagggycagctcagtttcccatcttaattttctgcctcgcttggyggggatgttcttggattcccttcctattttccctgatggttttggctatgcaggatagcctggcagttctgagcacaggatctctaagctagaccgcttctgtctgcttggccccagacatatcacctaatctctttatgcctcttaataccatctgcaaaatgaaattcaagatcacagggtttcctctgttaattcagtttcttttttttctttttaawttcatgttaaagtgcttagcacaatgcctggctcaggatgagtgttgagtaaatgacagcagtgatcgtgattacactaggacgtaggtaggtgcctatcagtcaggtgtagccagtggttatgggaagactgggagggtgcacacctaggccttcccaagggcatgggggtagacccagcttcartgctgcactcaagcccagtctaaggcagcctcaaaggccacgtgacagatactcacacaagctgaagttggtggagtgtctgtccacgggactggcttacccagagtacatttcaagtgacaaggactcttgcagtgagcttggctgcagctaatttgtcattacatcatgaaactctccctctgaaaatggaactcagagtccaattcacagaggaatttattgscaagatcacagccacagcaagacctggagscaggcagctctgtctcttggggctgagtcagtctgggctgatggtgagtaccatgcaggmccctcctagaatgtatgcttgtagctaaccagctccaaataaactcatatgcaaaggcctaggaggaaaactacccaaaagaaaaggtttacctgatgctaacttaagaatccaaatgaaaatacttagtgtcagttgctaacagtttatgaagtggtgttacctgtgctgggccttaacttcttttccagatgtttctaccccaacaaagcagcctgtataggatttctagtatgtacgggtaggctgtgtagaaaacagcttccctttcattgtctctagtgaatccattaggtaagtgtctgcctgtgacagagcagccactgagaatacagggatgtagagaacgtgtacctcacactaggaggctgtcagtctagtgacgaagtgagtacacataggcatggcattgagctgatacagatcgcaaggcacagtggcaggaacacgctctgcagggtctgcagccttgattccaatggtggcttttacctccggtcagcagtgtgaccttaggaagattatttgacatttctgaacaaaccatcctcatctaccaaatgaaggataacgctcttgtggtaaggccaccatatgtattaaatgaagggaaggccagtgaccagcacagtgcctgacaaatggtcatcatacaacaaatggtggctctagaactgttaccatcatagaggaacacgggagggagcagaccattctacctggagaagctcaggcagtgttctttcagctgtgtcttgaaggaggaagaggaattctaaaggccagaacagtggtggaggggcactgccagctgagtgaagacgggaaaagacaaagaaaaaaaacaacgttgaggatttgaagaaattcatacagttcggtgtggctgaagtgcaggctgctggtgactaagggccaggagctgggtcctgaatgaaggggcaagaccaggagtggactcagataccattctggagagttcgatttgccaactttagcaagaatgtgccaaaaatcccagctactgttactaagtgctaaggatgctactaagctaagctatatatatatgtaaaacattggatgtccagcaaacaccctacaaagatgacactctgttttacaaatgagtaaactcaggcttatggaaattaagttacttaatcattaaactcaccctattaaattatggtggatttgggcagctgcctccctgaaggacatgttgtctcagttgatatttcatgtaaattctgttgtcttgtttttcggattcataatcactcattgtttttctaccttggtacagcaagcaaataaactctccaccattgtcagacttgaatgagtttagtcaacttcccctgctgggcagttgattagatagaaggagaagtggctcrctattatagtgtaattttctgatacaaagattcatttttacttggtgtcagtccatttgcattgctgtaaaggaatacctgaggctgggtagtttataaagaaaagaggtattttggctcacagttgtgcactctgaacaagaagcatggtaccagcatctgctcctggtgagggcctcagaaagcttccagtaatggttgaaggcaaagcgggagctggtatatcacatgcaagggagagaacaaggggtaggggaagcatcacactcctttaagcaacgagatctcctgcaaactccttaccatggagagggcaccaagccattagtgagggatctgcccccatggtccaaacacctcccatgagaccccaccttcaacgtgggggatcacatctcaacatgagatatggtggaggcaaacatccaaactatatcactccccaaatcaagcattatattaaaaactgcacrctatattttaatttttcatgatagatattaggcttgagttgcaggtaatatgagacctttrgtggaggttaagcctaaggatttcataaaattttgaatgtyaccataaacaagattcaaactaactttagatgaatcatcctcagtcaaaagatgggaaagtaggtgttagcatcagccttagaaatggggtatgtcattcatcaagtacccagagtcctataatctgaattcctgctgtcactcccacccttcaaagtacccaactcacattgatttgggatgagttctaaacaggtgtttcctctgtgttgcaaatggtttgaactggagccttgcatacctctggcatgttcatccagacccagctgatgctcatgagcatgtatgctcatctgacggccagtccttgctgattcccacgttggtcagcactggacacagaacagatgttggggattatagggaaggattcgggaggccatgggcctgagtgtctgyggaagtcattcattgtggagacgcagacaggccctgcagagtcttcagtgagaagttygattaaataagcctcaatgggcctgcgtatcaggacgcaaaacaaatgttttccaggtatcccttaattgaaagaaaaataataaatcatcatcttcaagtcaggctaaatgaggaagggaaataatcccaatcccacaagttttcatctgacttctaatctaggagttcattagtgggatcatggcacgtaagcatccgagtagaatcctctgattaattaattccatgaggaatcatcggaagacagtttgcagagcagagggaggctgactgcccccgtgggaaaactcttttaaggttgggcccaattttccccaatatgacacaggactctttcttcctggtctgttctggttgtcctggagtttctttgtcaagctgctccactgatggtattgtctacacctcagctmcctgtccaagacactctcagaggtctgaggcgtggaactctgtgggctatgaaagggttttactttttgctgaaccacccacctacagccctccgcttattgaagcagcagaaagctcaccagaggtggcttcttgtttccttcagtgtttccaagttactctgtagacttagtgaacctaagctttgcactcctcatagctgtgtatgagtctttttctgcgataagcatagaaatgtttcatctcaggagaaagcaagttggtaataaggaaaacaaagcaactgacaatagttgattaatattttttaaagaagaggggataaaggacacatacaactgtatgtcattgacattaaatgccatacaaaaacgcaagtaaaactataagggaaaacaaaatgtacccttgtagtaaatattctgtgaaccaaaatctcaagtgcagtcatagaagtcattcactcaacttttgtggcattttattttttttgctttgkctttctactttctttctttctttttttttttttttttgaacagcccaatgtaactccattggttgtgtttggaaraatgaaagaaaaggctaattattgtcctttgcttttcttgctctgaaaacagcttccattctccacaattaatggagaaatataagaagacagttctatataagcaaaagaaatacctcggggcctttaacaattaaaaggaacaaagacaggcgggagcggtggctcacacctgtaatcccagcactttgggaggctgaggctggcggatcacgaggtcaggaaatcaagaccatcctggttaacacggtgaaaccctgtctctactaaaaatacaaaaaattagccaggcatggtggcaggcgcctgtagtcctagctacttgggaggctgaggcaggagaatrgcatgaacccgggaggcggagcttgtagtgagccgagatsgcrmcactgcactccagcctgggggacagagcgagactccgtctcaaaaaaaaaaaaaaaaaaaaaaagaccaaagacataggaaaggaggtctagatgatttttatgaagagtatatatcaaatattatttatatattaatccagctttaagatgggaaaatgctataaacgtrggaagttctccatagaagaatcagtcaaaagtattcctgtttgctcatgtctaagaattctgaaactagggaaactgtattgaaaagataaattgaaatatattggaacgggaaatgtagctaaagtgtttccattagggtacaatgagaaaaactggatctgttttatgtaaattttcaacagtgacctggttaaaaaaaaaaaaaaagttgaagtacattaattaaatttacagagccagaaaaggtgaagacccaggaggttaaacatagaaaatacagatggactgaaagagatgagaggaaacggacrgacttttacagcatgatattcagcttggaaatatgcgggagaatacgacagggaataccagccaaaagtcagatagctagtttaaagaaaaagttaataaaacgttgaagtctgaaaaactgtacagaccaaagccaggaaattacaaagttatggatcccgcagtaactgtaaattaaccccattgcacatatgtagtatttcacattaccgtctgtggtgttaactttcatgcctaaacatgcatgtgtgtgtgtgtttcacctgaattatggttgtaaagggaacaaaggtgctaacaggacacggaatggatcgccagctcctttcatgggtctcccaggagcctctaggcccaagctgctcatccaccatggaatagagcaagcagggagacatgctttgattcaaagagtgttctccagaggggctaggaagagacacctgtttcttgacaattattaaggaagtcgtgagtgtcgtgggtagatggaaggatgtctgcaacacgttccagagacaatgcattggatttccatcatcccttctcctttcctttttttttttttgaaatgaagtctcactctatcccccaggctggagtgcaaaagcttgatcttggcttactgcaacctctgcctgcctggttcaagcgattctcttgcctcagcctccctagtagctgggattgcaggcacgcaccaccacgcccggctaattgttgtatttttagtagagatggggtttcgccatgttggccaagctggtcttgaactcctgacctcaggtgatccatccgccttggcctcccaaagtgctgggattataggcatgagccaccacgccaggccttctcctttcctttgattgcctcatgggaactactctctctttcaccagcgtgctccttttacccccattttttgcctccataccacagtttgtcctctrcatacccctttgtcttggagggctcgttccaggtgctaagaggcagtgctttccttttagagcttccaatctatggatctggttatttgtttgcccgttttggttgatttttgtaaacattttttagtcaacttacatggtgtgctttccaacacatctctcacttcaggcacaggaccaggacggaggagtccgcagcctccctgaatcattgctcaggcctctcttctggttcatgtgtctgcttctagcgtcttccaccttttctcatcacagcaatgcggtggtttgccactcttcttcctgactttcgccatattggggatgtttgtgccaatgtggagactcctctgttaccatgtcttcatactcttttgacttccctggctcctgggaggtccatgtccacaattcattcccatcccttggcagggctggccctccacaacctggaatctgtgtcatcctcaagatcttagcatccgattccccgactcacagccatccctggttcggctgcctcctgccaccatccccactgaaactgctctgaactttcactgccattgccaacctctctgccttgcagttgacgtccactcctaccagttctcccagscttcgcctttcttcttccagtggggctccaaaaccacttgtgtaggtgggacatttcttcttgtccttaactcccctgcccttcttggttctgggtttctgccctgtcgtccccaccatctgcttgactccgtgcactcaggctgctccacgtttggcgaaacgtgaaaggatgtggatcctgccctcagtcctcgggagcgtgaagggctgtggmtcctgccctcagtcctcgagtggcrctggcagktgggctctcctttgctgacttcccgtgcctgtcacagcagcttccaggggctggactcctstgctcttcatgccgaacttgactccgccttctgctcaccacagagagtgaggccccttcccggtggctcttcagcgtcctcctcgccaccctggaagcctcttcccagagtcctctgctgatgctgatgcctcccatctccgagttaagacctggccttggccttcagagctgccgctttcaactccattcctgaagctgttcctctcctcaccccagggcctccctgcaccactttccctcttgaggttttacatttcaagaccttctccctcctgcccgcttcctgctgccttcccgtcctctgggcaggccccaccggcctttcctccacactgactcatgcatattaccgccccyggttcccctccctcactgtcctcccagaatttccttcaccttcacagcacaggtcccactgacgaggacttcatggagggctggctgttcttcttcctccacctcctagcatagctgtcacccaggttctggtcacaagcctttgcccrccgtgtgctcctttcctytgtgatcacatgcatctccatgggttcacccctcagcaggtgcaggcggccctccccacagaggactagcctggcctctgagagaggctgagagcttgggctctagggccttgttggatgctggctctgccacgatcctggmcaagctccgtgacccatcgtgcctgagtgacctcacctgtgagaggagaatcaacagcaacgtgggttgtcaggagggtgagctgagctgattcacagagagggctgggcacgtgccatggtgtgcggtagcagagtccacgtggctctttcctcactgtcacagccgcccttctccggccacatggatccatctttgtggagcactccacacccacaattcctcagcctctctccagatcgagaactttctgactcctccaggaagggagatccacggagcctcagagccgctagttccacctcccccgagtactgctcctgcttccctgggggacacttccccctcccatctggctcttgcttgacttgtcccctccactacttcaggggcctcctcctatgcctcccagatcctgtctgcccttcagttgctctcatagctgctgccttggtgactgttccctgtttgaaacgatcccatggctttctgttgtgtcctgaaggaaatctgagctcctcagttcagcagccctctttcctcacaggcttccctcccctccatgcatgscctaaacccaagcacactgttctcctgcaggaagcacctctgtaggaggcagsgtgtctggccgtcttctggctgcaatgctcttcttacctgcgcygaaatggatcctcaatgaaccccacacaggcgtctcttccagaacccgtgtgactctgctctgccctagaagtatctcstcacccgtcccatcctgaccaattgctgcttgaggacaaccactgtccctcttgttccccatatagtcctggcagcagcacacactgaatccaactgtggtgacttcatgcctgtgtccattctttaaaccagcatctcaggcctcacaccaagcaccagggcagagagtggaatgtatcaaaattgtggcaaattttgcaccaagagacaaaagtccaggaattaaataagtggcctattcaaatattaacatgccatttgcttcatatctttttgaaaataaataaaatgctgaccacattatatgagtctccttcgttgtcctcccagtctcactccccttgagatagaaatgctctcgttactttactgttgactgttttcatgcatgtattctgcgtgcataaacctatagaaaatattaacaatacacagtgctaatcatgcagggttttgaaactttaaatagattgtattayatgtactcttcctcaacactgggtttaaaaaaawacaactgtttttgaagtttatcatagtgatataattgtagcacattccttttaatgctgttttccattatataaattkgccaaattttttttattctcccattgataaacatttgagtttcctttttttccctacagttgccagaaatgccatagtgaacactcctgaacatatctatttgtggacatgaatgaatttcccaagagggcataatctggaatgraatgcacattgcaaatttctcagtctgtggcttttctytaactttttttatggtgtcttttagtacaaaagttttccattgttaatgtaggcaagcttatcgattttctttttttttgagatgaagtctcgctcttgtaccctaggctggagtgcagtggcatgatcttggctcactgccacatctgcctcccgggctcaagcgattctcctgcctcarcctctcgagtagctgggattacaggtgcgtaccaccacacccagctaattttttgtgttttaagtacagatggggtttcaccatgttggccaggctggtctcaaatccctgtcctcgggtgatccacgcacctcggcctcccgaagtgctgggattacaggcgtgagccaccgtgcccagccaacttatcgattttctttcatggtttctgctgtttgtatgttctctaaaaactaatcaaggtcataaagatgttctcctatgttttcttctaaaaatgttgaatgcttttcactgtgagctctgtgctctacctggaagtaacatctgcctgtggtacaaagtaggtcctgatgttttccatttggacgagtagtattgcctttttgccagaactccctcccctgtccatggacagggcatttgctagatttcaagcattgtccagtgaggtttttcatgtccccgctgagagtcttgggcattgcacagaagggaggggtctgagctggagcccttgtgctgctctgtgtgctccattagaggaacgagagcatgcgcctccagggtttgaacctagggagcatctgagatggtccagagtgggccatctggagaggcatcctctctccagagattctcagaacaataataatacctccaggatagttcagccgttgcaagcttgaaatccctggagaactgctatgctgtcaactggaggcttcctctcctcactcaaattacttcccttttataaaaatgattctagtcatgcacgatgtaacaacgtttcagtcaacagcagaccacacatatgaccaggatggtcccctaagatgataatgccatatttgtactgtaccttttatatgttcagatgcatagatacttagcattgtgttacagttgcctacaaaattcagtacaggaacatgctgtacagcttgtagtctacaagcaatgggctataaaagatagcctaggtgtctagtgtgcaatcccatctaggtttgtgtcagtacactccaggatgctcccacaacaacgcactcacctaactatgcatttcccaaaatgtgtctctattgttaagcaataygcatctgtattttgtaacctgtcgatctctgcctgtatgatttgaaaacgaatgttattttcgcttcatagatcccaactttaatgggacttgtactactaaggaatagtgaggaaccgtgaaatccaatcaaacctggctgcctgtgtagactcccagccttctattcayggataagctgcatgttgcttattaactgagcaccaagatgtagcagctttgctttattgcgtaatgatgcatgactgcttgctcagttagcacaactgctgtgtgctggaggaatagagaaatcctgtggaaacagtccagttattacgtttattgttttaaactgttacattttaagcaaaatagaaaaagacaagggtcagaaatatagtaaaataattaatttatgtatggtaaagtcagactaggattactgggctaaaaattgaagctggactatacaaatttaaaggcttgcagttgattaaaatgaaagttatttaaatgctagcaaatcatgatatagaaaatattagtaaatgatgaagtattcagtaaagccattgtctgttaggcatataggcctrtaagagctgggcgggtggctcacgcccataatcccagcactttgggaggctgaggtgggcggatcacctgaggtcaggagtttgagaccagccaggccaacatggtgaaaccccgtctctactaaaaatacaaaacatagccagatgtggtggcatatgcctgtaatcccagctacttgggaagccgaggcaggagaatcacttgaagccgggaggcagaagttgcagtgagccgagactgcaccactgcactccagcctgggcaacattcgtctcaaaaaaaaagaaaagaatacaggcctgtagaaggattgcttaagcccaggagttctgtagtgtgtcataccagtagggaatctgcactaatttggcatcaatatggtgacctcctgggagcaggggaccaccaggttgcctaaggagtgatgaacaagcccaggtcagaaacaggtcaggtcaaaactactgtgctgatcagtagtggactcacaamrgtgaatagccactgccctccagcctgggcagcataatgtgagtgtatttatcrctaataaaaaaattatttaaaaaatatgtatctctgacaccatgggacaggcactgactcttgaattggagagacctggattcaaatcctgaggtagtctcttactgtatgaccttggactgtccattcaactcctgarctttatttcctttatctgtaaaatgggaataattagtatctcccctacaagggtttttgaaataatgtatataggcatacccaggaaagaagggtttgatagaagagaggggagcctgaaaccaagacctgcctctcacttatgcctgaggccagtgtgtcattgatgaaaacaggaaatactagggacggggtgggaggaagtgagggttggttttaggcaaaacatatacatatttatgatttgggataaccttgttggaagtcggaatgattgcagggtgtgctggtgaatctgcctgtgcccccagcagtgtgtatgtatgtgtgtgaatcgttagcctgcaatgtgcacctcattctgtcaaatgcgtggctacttattgatgaggtctgggggagtgtgctttcttcatctttgtgtctctcagaagtaaccaaataagttctcaaaaactgctggcagaaggaaggcacgttaatggtggatgtaacrttattcatttcatgaaagaaagaaatcaacattaaaattagaaagcattgttttaatttctgaattgggtacttggaatggacrttcttcacaattttcactgggttatcataaaatctttattaattcaagtcttttctcccccaagaacattttyctattaaaaaataacaaccaccaccatgaactttggtgtggaggggcagtgaaaagagtaatagtgagagggagagagagaaagaagaatccctgtgggggtgcaacaagctgctgctaaatttcagttgcagttgtcagagttaaagaaaacattggagaaaatgtctcatcaaggggtccccggatttttctgctccgggaaggctgcctgagggatggatcgcggccagctggcaggggctcagacgcctggtacygtgctgcagccactgagctcattggctccacctaagtcattttacagtcagagctgtttcaagatcagcacacggcactgtacagatgtttggggtcggggaggagtagaatttgtggaaggaagaagtatatgcttagttttaaaggtttcattctaggacctctcagggttctggtgaaatggatcatgtgagagtgggagcacagctgaccaggctaggcaggacagccctgtgaggcagtcttgattttacagaggaggaaaatgaggcacggagaggttaattaaycttttgagtgtcgcagtctaaggctcagaggcacagttccatcccaggtctgtctgaatcccgagtcctcactcccgattcaccaccttactccactgctgagaccatccctgtgagtccggccactcagtgagttaaggaggccaatggccatgtccccacggggacatctctctcctcctgagagtctctctcatacatctcaaatctgagatacagattgagaaacaccccaggaaatccactgcatggaaggcaaaacaaccttgagccacagcagtgaccacaagcaagagaagcctggctatgagcacagtcatgatgtagttcaaggttggggaattcaaggcctccatgtccatcccaacatcttcagctcctcctcacgtcgccagtggatgtcctctgcaagctgatataaattattttcaaacccagatatacattcctracttaattccactctcctcaaactcgcccacggaatgcctctaacagaggggagcgagggcacaccctgggaggcccgagtatgtatcctgtggcattacatctcaaaaatgatatttactcaaagatgctagttttaggtaaaaataaattattcaaatgtattgtgaaaatgttattggttttttgtttgtttgttttgtttttttgagacagagtcttactctgttgcccaggctggagggcagtggcacgatcttggctcactgcaatctctgcctcctgggttggagcaattctcctgcctcagcctcccaagtagctgggattacagccatgcaccaccacgcctggccagtttttgtatttttagtagagacggggtttcgccatgcttgccaggctggtcttgaacttctggcctcaggtgatccacccacctcggcctcctagagtgctgggattacaggcgtgagccaccgcccccggccatgttattggttttaatatgaaaggatctgttttccaaatctttgggtgagattgaagatccaggaggatatatcttgttgatcatatggcttgacataagtacccacgcagtactctgatttaggatccaggggtcttccaggtcgaattagcattttcaggggtattctgaatgcccaaaggagtgactgacagggacttttcggtaaaatgaaatatctcatattcagggtatgttcgtgcatgtactctttctgttatgtgatttccattgtctacatcttcattaattctaagtaggaaaatagaggctggggaccatgtccttcctggcatcactcttgtcaggccctgtgggtgactgcttgcctttagcactggtgaggcccgctgtggggtgggagaagtctttaccgtcatcagtgacaatgactagagtcttcagtgtatgattcctgccatctgggagtctccataaaagcctcaaggccaagagggtctccaggacttccagctcagaagtcccctttcattcagtgataaggagaagataaagataaacatgtggcctgggcagtttcactctgtgtgatggaggcagcttcactccttccccatccctgtggaagcagctgaggctctggagcacaacttgggctgagaatcaccctcttcttcctggggccgtgactcaagcagacaccgtggtcagccttttgatrtgcagctacgtggacaacacttttcctgagcaatcatcccctcttttctcatctgtttgggcacagaattattggtgaacatccttcatcatcaaagagcgacatctgagtgcgtcttcagtggtgttctctggagataagagcagataagagaacatcatgcttgccactgcctgatgaggggacgttcacctgcacctattaattaaaatagaagacacccaatgggcattgggcaccaggggctgatgtttgtattggaatataaaaaagagacttagacttagctttctcttggcaccagcatcactattaacacttactgtctgtcaccaatcagcaacctattcccagtataatctgggacttctatagcacagctcaacccttccacctctctgagaggagtggtggggtagcccttctcctgacagcaggagcagatcgtactccctgggacccagttccccctcaaaactcattcaggaatcatcacacatcatcgctggccacatctaggatgtctgaataattgtggttataatcgatagtgtaaaaaatcattagttataggtaacatgtatggcatttaccatgtgccaagcaccttttatagtactttacacttagtaattcacttaagcctcacagtagccctacaaggtatattttcctcattttacagaggacaaaactgagccacagtagttaagtaacgagtcaatggcagagctgggattggagccccggcagcctgctcatgcttgctatggactgaatgtgtcttgcttcaaatcccagagttgcagccctaacctccaatgtgatggctgcatcatggggccttgagcagataactagggttagctgtggtcaggagggtggagctcttgtgttgggattagtgcccttctaagggacagcagagagcttgatcacactctctattcatacacaaaaaggagcacatagtgagatgggaggtctctgcaagccaggaagaggtgcttgccagaacccaagcatgctggctccctgatcacagacttccaacctccaggactgcaagcagatacatatctgtggtttaagtcacccggtctatggtgttttgttgtggcagcccaaggggacgcagatgatgcttttcaagactgtgcagcccctcctggaagcttyagctccttggccttgcaagaaacacttgctggtcactgtctttggtcctttcagaggcccttcctcagcggtgcctccaccaggctcctgacttcatccccctctgtgggaggaggggtgagcaaagtaccttctccctctgctgtgggaagcatgagtaactcrcagatggtgtcagagggcgtgtgttcaggtagtgcagccagcagtgagtgaatgaaatgaaatggtgtctgtctgttccaaggctgggctctgcaggggcaggagaacagctttagtctctgcatccctgcaccttccacctgcagatgccagcgggccattgcaggtgggaggggacccatctcagggctcctcattcagatggtgacaaggtgaggtggccgtccaccctatctttatcagtatctgtcctaaatactgcgcgttgacattgacgctaatagtctgaattatcaggggtttggcaatcgttaggcatccaatttttctctcctggacgggcatacctttgctatgtcagcacagtgcctctcttggctttctatgtaaccacaggaagattgcaatctagaaatagtgattgttaaaattgcctataagtacacaatataaacaatatgccagagacacacaggcccccagcataattcctggaagctgcagtctcacctctgccagagaagagccccagcaaggattgaggctgggcatccaggtgcctctgcagcccttcccgtggctccagctggacaattgcccctgagacacrgaagatagagactgcacgtgtgtcttcagtgaacgttgctttatttatgttgttgttaaaagtgaaagagagtacaaactgccttttttttctgagacagggtctcgctctgtcacccaggctggagtgcagtggcaagatcatagttcactgccgcctccgcctcccagaatcaagcaattctcctgcctcagccccccagatagctgagactataggcacacaccaccacgcctggctaatttttgtacttttagtagggacagggtttcaccatgttggccaggctgatctcgaactcttgacctcaggtgatccacctgcctctgcctcccaaagtgcagggattacaggtgtgagccaccgctcccagcccagactgcttatttttaaaccacacagtactcgttttaaacctgtcccatttttaccttggaaataaaagtcgcgtatctcaggggcgatatactgtttctctgcctggtttcccacgtcacgacctgtggagaatggcctaggaaccacctgtctttacatccagataacagcttcaggaagatacagcagagtaggacaggggtcgttctgggtgatgtaaagtagctatttggttagaccaacattttggtctctaaaattgggtcctaaggagaaaaataggaaattaaaatgatcactacctgaaaaagaaaaatcaggtaataatttgagggagtcaagggcctcacctttctctcaaataagtaggcaaagaacagtaacagcactccccctcctcacaccctgtttaggaaaattgggaaatgtcttcttctcactgcctgcctgtttatttaacaatgaacaagagtttaaatgttaccaccaattcaaaccaaacacaccccattctctatgtcctgaatggagagggagtctagagttcttgtttgcttcagggtttcctttctggagctttatttatttattttttattttgtttaactagtcaagggcaagggcagtagtgagaagtggggaaagagaagaaggggcagttggatctgtacctgactgtgaataaacagtggaggtaactcgctgcctccagaccagcctcctctgtagagcttgtaaccttgggccatcctgcaaatcagtggagagcagttgcttcggtcctgaatagctcacagggtggtgggaaggtttgccagagttgtcccacctcatgcacactccctttcccccatgagccactggagtggaaacagacaccataccaagtgctgctgaggatgtggagcaaccggaatgcgcctgcacttgctttattcagacagccactttggagatctctttggctgtgtctaataaagctaatcacactcttcctgtatgatagagcaaccccactcccaggtgttgacccaaaagaactggaaacatatgtccacacgcaaaaaaagacttgtagaagcttgtaaatagcagccttattcttaataataggcccaaactggaaataacccaaacatccatcaacaagagaccggataaacaaattgtgatctattcgtgcaatggaatacgattccaaaactaaaaagaatgaattacaggtatgtgcaacagcatggatccatctcagagacatcatgttgagtgaaagaagccagattcaacagaactgtactctgtcatttcattcatatgaagtttgagaacaggcaaaacttagctatagtgatagcaggcagggcaggaactgcctattgagggtggagattgaatgaaaaaggcacgggagggctttctgggataatggaaatgttctatattttgttttgggtggtaggtagacaggtgtagacagttgtgttaatggctgaagatctgtgcattttagcatatttaaattataacccccaggaagcattgcctcatcttcctgggggatgtatawgcttgttaagagcatactgggggtgcttttgagaaccccttaccatgttattatgttaatgaaccaccactaatttttgtggtttcaaaatagcaaggttcattgataaaactcccttgtgccttggtgacaaaaaacactgatacmrcccactgtcaaagtaagtgtgtttgttatttttgtttttaatgacactaaatttgtaggaatgatatttttaggtggttgctcaatctcacccgccatcagttgcaggtgacagggatgttaagttggcagatttttgtgctagaagctgtgggtttacatctcctttgtgcaggtgtcctagacataccagtggcttgttatttaaacatygggatcgggtgtgtgggtggtttttaagttatagtagggatgcaggtgctgtgggatcgcttcattgtttaacaattcctttgcattcacacagggcttctgaaatgagtgctagtagaatcatcttcagaggatgtcccaatacgttgaactgagatgccttcctgtttgctgtggaattaagcttaaaattgacaccaagctctaggcatttcgtacagggagagagtgggcatgaatgatttcgggaaatgaagaactagatttcagcctggaatttgcttcctccctcctgtggcaaattagcgtgggctcactaagcacttcatctggccatggtattttctttttcttcttttttttttttgctcccagatagggtcactctgtcacctaaactggagtgcagtggcacaatcatagctcacttcaaccttgaactcttgagcccaagcgatccccccaccttagcctcccaaatttctgggactacaagcgcactaccacacccagctatttttattttttgtagaaacagggtctcacgatgtcctggctgatctgaaactcctgacctcaaaccgtccttcacctcagcatcccaaagcgctggaatgacacgcgtgagccaccacgcctagccagttttcttttctgttgcattgcagagttagggccaatttcattcatcctgcactgatatttgccttcccagcagatgatgggtgagctcagcacacctgcatctcagccaagcctttagaggggagcacagctctttattgtgtcagcgccacacagccaccctgagcaaataggtttggaatgtacattgccatccttcctaaaaaggttcatagtaaaaagagaaggagatttaccttttgacatgcacgctcatgaaaaccaaggttttcagaaagccaaacctcaaaaacaatacaaagaagctcccttgacgtttgaatggaaagaaattttaggaggcaacactgaggggcaaggagggctgagaagagaaggtggcaatggcaactgcaagggttcttccaaatccgattgtcctgacaggttttgttttattttgttgttgtgttgtcgatgctgggtgggaatggattggaaaaattgtcccctcctgtgtttcttttcgtcttttaactttacaagtgctcctcattttcttttacttacaatttgaagttggcactggtgttkctgggccaaccagcatcttgaggactcaactctctggctgcaggtgctgtggggaaggggcagacttaaattttcttctgtaaaatggggacgggggggattaaataaaatgctttatgggaagttctggcacagagtgaygcacgaagaaatttgagcttccttctcctcacaggtgaactgttgctgctccacctttattacatcttttcaaatccacgccacattggggaacacaaactgaccttatgtagccctggttactccagcctttttaaaaaaaaaaaaaaaaaaaaaaaagcaagggaaataggcaagacggccaaataggaacagctccagtctgtagctcccagggagatcaaggcagacagcgagtgatttctgcatttccagctgaggaacctggttcatctcactgggactggttagatagtgggtgcagcccacggagggcaagccgaagcagggtggggcgttgcctcacccgggaagcacaggggattgaggaactccctcccctagccgagggaagccgtgagggactgtgctgtaaggaaccatgcattccgtcccagatactatgcttttcccatggtcttcgcaaactgcagaccaggagattccctccggtgcctacatcaccagggccctgggtttcaagcacaaaactgcatggctgtttcagcagacaccgagctagctgcaggagtttttttttttcataccccagtggcacctggaatgccagcaagacagaaccgttcacttccctggaaagggagctgaagccagggagccaagtagtctagctcagtggatcccaccccgacggagcccaacaagctaagatccactggcttgaaattcttgctgacagcacagctgtctgaagttgacctgggacactcgagcttggttaggggaggtgcgtccaccattactaaggcttgagtaggtggttttcccctcacagtgtaaacaaagccaccaggaagtttgaactgggtggagcccactgcagctctgcaaagccacagtagccagactgcctctctagattccccctctctgggcagggcatctctgaaagaaaggcagcagccccagtcagggtcttatagataaaactcccatctccctgggacagagcacctgggggaaggggcagctgtgagcacagcttcagcagacttaaacgttcttgcctgccggctctgaacagagcagcggacctcccagcagagcactagagctctgctaagggacagactgcctcctcaagtggattcctgacccctatgcctcctgactgggagacaccacctctcaacaggggttgacagacacctcatacaagagagctctgactggcatctggcgggtgcccctctgggatgaagcttctggaggaaggaacaggcagcaattcttgctgttttgcagcctctgctgttgatacccagacaaacacctccagcaaactccagcagacctgcagcagagggacctgactgttagaaggaaaactaacaaacagaaaggaatttcatcaacatcaacaaaaaggatgtccactcaaaaacyccatctgaaggtcaccaacatcaaagaccaaaggtagataaatccacaaagatgaggaaaaaacagcacaaaaaggctgaaaatttcaaaaacgagaatgcctcttctcctccaaaggatcaccattcctcaccagcaagggaacaaaattggatagagaatgagtttgacgaatggacagaagtaggtttcagaaggtgggtaataacaaactcctctgagctaaaggagcatgttctaatccaatgcaaggaagctaagaaccttgaaaaaaggttataggaattggtaactggaataaccagtttggagaacaacataaagcaggaaagatccaaaattgacacccaaacatcacaataaaagattacattaaaagatctagagaagcaagagcaaacaaattcaaatactaggagaagacaagaaataagtaagatcagagcagaactgaaggaaatggagacatgaaaaacccttcaaaaaaatcagttaatccaggagctggttttttgaaaagataaacaaaataaatagactgctagccagactattaaagaagaaaagagagaagaatcaaatagacacaatgaaaaatgatcaaggrgatatcaccactgatcccatagaaatacaaactaccgtcagagaatactataaacacctctatgcaaataaactagaaaatctagaagaaatggataaattcctggacacatacaccctcccaagactaaactgggaagaagtcaaatccctgaataggccaataacaagttctgaaattgaggcaatagttaatagcctaccacccaaaaaatgcccaggaccagacggattcacagctgaattccaccagaggtacacagaggagctggtaccattccttctggaactattccaaacaatagaaaaagagggacgcctccctaaatcattttatgaggccagcatcatcctgataccaaaacctggcagagacacaacaaaacaaaaaatttcaggccaatatccctgatgaacatcagtgtgaaaatcctcagtaaaatactggcaaaccgaatccagcagcgcatcaaaaaacttatctattaccatcaagtcagcttcatccctggatgcaaggctggttcaacatacgcaaatcaatgaacataatccatcacataactagaaccaatgacaaaaactacatgagtatctcactagatgcagaaaaggccttcaataaaattcaacacctcttcttgctaaaaactctcaataaactaggtattgatggaacgtatctcaataagagctatttatgacagtcccacagccaatatcatactgaatgggcaaaagctggaagcattccctttgaaaacaggcacaagacaaggatgccctctctcaccactcctatttgacrtagtattggaagttctggccagggcaatcaggcaagagaaagaaataaagggtattcaaataggaagagaagaagtcagattgtctctgtttgcacatgacatgattgtatatttagaaaaccccatcatctcagcccaaaatctccttaagctgataagcaacttcagcaaagtctcaggatacaaaatcaatgtgcaaaaatcacaagcattcctatacacccataacagacaaacagagaaccaaatcataagcgaacttccattcacaattgctacaaagagaataaaatacctgggaatacaacttacaagggacgtgaaggacctcttcaagaagaactacaaaccactgctcaaggaaaaaagagaggacacaaacaaatggaaaaacattccatgctcatggataggaagaatcaatatcatgaaaatggccatactgccaaagtaatttatagattcartgctctccccatcaagctaccattgactttcttcacagaattagaaaaaaactactttaaatttcatatggaatcaaaaaagagcccatatagccaagacaatcctaagcaaaaagaacaaagctggaggcatcacactacctgacttcaaactatattacaaggctacagtaaccaaaacagcatggtactgataccaaaacagatgtgtagactgatggaacagaacagaggcctcagaaataattccacacatctacaactgtctggtctttgacaaacctgacaaaagcaagtaatgtggaaaggagtccctatttaataaatggtgttgggaaaactggctagccatatgcagaaaactgaaactggaccccttcctcacaccttatacaaaaaattaacttaagatggattaaagacttaaacataagacctaaaatcataaaaaccctagaagaaaacctaggcaatgccattcaagcatagacatgggtaaagactttatgactaaaacaccaaaagcaatggcaacaaaagccaaaattgacaaatggatctaattaaactaaagagcatcagcaaaagaaactatcatcagagtgaacaggcgacctacagaatgggagagaatgtttgcaatctatccatctgacaaaggaccaatatccagtatctacaaggaacttaaacaaatttacaaggaaaaaacaaccccatcaaaaagtggctgaaggatatgaacaaacatttctcaaaagaagacatttatgcggccaacaaacgtatgaaacaaagtttctcatcatcactggtcattagagaaatgcaagtcaaaaccaccatgagataccatttgacgccagttagaattgtgattattaaaaagtcaggaaacaaaagatgctggagaggatgtggagaaataggaacgcttttacactgttggtgggagtgtaaatgagttcagccattgtgaaagacagtgtggtgattcctcagggatctagaaccagaaataccatgtgacccagcaattccattcctgggtatatacccaaaggattataaatcattctactataaagacacatgtacacgcttgtttattgcagcactcttcacaatagcaaagacttggaaccawcccaaatgcccatcaatgatagactggataaagaaaatgtggcacatataaaccatggaatactatgcagccataaaaaaggatgagttcatgtcctttgcagggacatggttgaagctggaaaccatcattctcaggaatgatggttagttagcaaactaacacaggaatagaaaaccaaacactgcatgttctcactcatgagtgagagttgaacaatgagaacacatggacacagggaggggaacatcacacaccaggacctgttgtggggtggggggctaggggaaggatagcattaggagaaatacctaatgctaggtatttctaatgtaggtgatgggttgatgggtgcagcaaaccaccatggcacgtgtatacctatataacaaacctgcatatgttctgcacatgtatcccagaacttaaggtataatttaaaaaaaaaaaaattaaccttttctagtttgtcaccacattcgtggacagctagtcctggggcactggggtgcatatgattagtggcatggctgaagctaatgcattcacaaatcctgatccgcaggtgcatgggtgtcccttgttaatgcgcctagtctgacccagggcagtgctgcacagctcattggctttacagtcagacaaacctccaatcctgtgtctggctctcaccagcttgtgtcctaatgaatcaataattctacccacctgacgctcactttcctgtaatttactgcagtgagttcctaggcatatggcaygtaaatggtcagtagatcaccttagaaggatttcagactctgggtctcagtccatctgtgaaaattaggatggtaggaacctctctgagatacacctttaaaattagttatgtgtgtcacattcacagctcctagttttgaagaccagcaacagaacaatactttcaagtcttcatataacctttattaatttaggacaggcttcatattttcaacaagagaattcaaagttcattttccttttttccctcagcaactaaagttctgagtttcataatctgtttcttattgatacataatattttacatatttacagggtacatttgagttacaatctattttaaatgatacattatgtaaagtcactgtgttcttaaataaatacacatagtgaatgatcctgcatgtatccccacaagtacagcttgaacaagtccatcttccaggggccaagcaccacctcaggcatctgtagcatgagcaaaacccaaggtcccctctggagaccctgtttaccctgcaggcaggacaacaggagctggaaggagcaggctgatccaatccctttcttgtggttttcttggttggggagagagagttgagttttgccaaaatacatgtgttctgtagaagaaacaggaaatggagatacacaaagagatatgacaatacaaatcaccagttgggccacccagatcctggtttccatataccgttccatgcattgttcctgagcatgtaagcatgcccacacttgaaggaggcactctcaagtccatcggggcctgggacaccccactgtttttgaagtcctggaatgtttttgtaaaggtaaggaaataccaaaacgagactacaaaaatgatggtatctactgatatgtattgacaaatgtgtaataaagatgtgtacgtgtgggtgtacctcatctaggggtgacaccttcaagtttaattttgaagcttgggccagtggtgcttcctttcccacaaccaccatgayagatcctctatgagatgttatcacagaacccatgtttctcagtggcagtagaatacgacatctctgtcaacaaatataattctacattactttaattgcttgcatggaaatccgttgtatgtaagtgccatggtacatttaatagatcttgtcctgggacatctacttctggtttctttgatagactagcactcttgtgaatatcattgtacttgcttctttgcatgttttcttccttccttaggatgaattctgagagatgtaattgatggggcaaaatgtactcacacatttttaagggttgtaaacttttyggtcaaaagctggtactcttggttgtttgaaaaggaaagcaagtcctcccattccagggttggattttgactcttttcctgtaaacttcactgctttttggtttaattgtcataaaatgccaagcaccaccaacagggctatgggaaggggcccagaggcagragggctgtggttaggcatggctttggccagatggggaagctgggtgcttgggatcagggtaagcgggtggggatgctgtgagtatagacgctrggcagggaagccctgcagggcagagggagcggcagggctgcagtgcatttggccgtccagctggagcagaggatggaaaccgaagagtgggttgactcttggatgccaggcttgagtcaggtgaatcctgccctcattttactgtataaagggagctactccaggcctccaggagtcttagaccctcccagtccctgtgggggtcccacaggtggttaattgtgcctcaggccctctgctctccctccctctgtaagtctcactctcctttgcagtgagctctagcgaaacttctattccagtaggaccaaatgtttgaggcctccagaaaagaaatccggtgaacacggagggtttgtcacactaacttgagtccctttctcaggtggcccacccttgtaggccagcctcccaattcctagccagctccaggctccgggcttttgctcattcaaaaccaaaattgaaggcatctgccctgctcaggcccccatctctgttcagagtaaactcctccctccctctgcttttgccctaagttctcttttcaactcacctaacatctaacttggccctgcagctctgatccccaaaaccctctctacctgttccctcccaagctatccctgaccagcatgccaggaacaaggaagtcttgaaagctgcactccttgctgctctcccctgtcctttatccttccacttggaatctctgtccttctacccatctctagctactgaaatcgtgttcatgtttccaggcacatctcatactctgtcgtctttaagaagtcttcccagaaaccccatcgtttatattcgtgatatataccatattccactgtgtaatgtagattgcaccagagagtatttaatctcctgaaggcaaggactataacctattcatcttcctttcctgggtggggagaaccaccatgccttgtaccaagtagcgatgacatgggtcctggctccatgaatgaacgggcattgagagaaaaggagctgatgatgagtgaatggaggagcctagtgaggcaacgtttactcctcagtgaagcagtgttggtgactccaacagctctctttaggaaggatttaagacaacatcctgttcggaaggggcttgaagcactttataaaagagaggcaagggcacacgtcaaactagaagaatgaaagtragaagagagaaggctgcagagaggagcaagccccatccrtccccctgatggtcctgccagtgcatgggttacctctcattgcatttagtgcggtctgttgtttttgtattgtgaaatattatccttgattacattatgttgctctgtttttgaaagagaaagtattcaagcaagtgtcacttctatttcttgcaggcaactatggtcctgagctccrcacacttctggttgggattatttctggttcctactgcctgtttgattgaagatgtggcatggagagcgtaagtttaacagtgaagcggggaccctaagtctggctcatctgtccctggaattgtctttctcatgagtcctgctacagggtatgagaatgacaggaattcggaagaaatgggtctcctgccacctgccagaaatgaaaaaaaaatttttttagtttaacttgtgcttcatcttgatatgaaaatatagacaaccataacaatagaaaaatcagctgggcatggcagcgcatagctctagtctcagctacttaggaggccaaggtgggaagatcactcgagcccaggtgtttgaggctgtagtgagctatggtcgtgccactatactccagcctgggccaacagagcaagaccctgtctttaaataaaaagaaacaaaaagaaaagaaaaaatacagacacaaaggagccctgagagaaactatgaagatcaataggaatgttgccttatataaaggcagagtttctgagtacacacccattccatcaaattgagaaagtataactcaaaactcatctctctttatatcataaactcagtgctaagtggtcacggatatggcctggcttcacttcccatgcttagagggaagctatgtataggtaagtcatttaaaattacaagaatgaagtactcttcatttttccaaacaactcatagtaggaatactttcagtaaaattcttctagaggattagttcacaggtctgtgagaaaaccagtcatgaagatggcattatcatgtaggttaaataggaaatcattcatattaaattttgcttttatgttttaacatatattgttttcaagataccttgttacaatataaaagaagcgactaagttccaaggtcatgtaaattttaattttatccatgagcaaaaggagggctgctccaagtaaaataggactgatttttgttttgggtcgacccaatttctcctacaaataggtgccaacttctctgaaaattgagactccgagctcggctttactttgggcaaaacacaattattttggggctctgagatagagaagtgagactttaatccaaaccttccagggaaagacatcagatttcatttttagccctccgttcctcccacactcagaatttttcttgcctgacagttatggaagtcttttgaaaaagtcctcattttggcattatcttgacaaccgatgatacctcatgcaaatctagatagagggggaaagaatattataacatggattttctttttttttcctgttcactaagttttttaactgttaaaaaattaaataattctcatttcttaaattctttgatttaccattacttccattttatttggtaaaaccatattctgcaaataacagaatcagaatcctcagaaatgaaaagattacagccagaaaaaaatattttcttaatctaatagatgtaccataagaacatagtagttttggccaggcgcagtggctcacgcctgtaatctcaacactttgggaggccgaggtgggtggatcacaaggtcaagcagtcaagaccatcctggccaacattgagaaactccgtctctactataaatacaaaaattagctgggcgtggtggcgggcacctgtagtcccagctacttgggaggctgaggcaggagaatcgcttgaacctgggaggcagaggttgcagtgagctgagatcgtgccactgcactccagcctgggcgacagagcgagactccgtctcaaaaaaaaaaaaaaaaagaaaagaaaagaaaaagaaaaagaaaagaaagaaaatattagttctgttatttgctctttcagccaataggcccaattgtgacacaatctagtcccttgctgaatttgttcaaaatctttgttttgcaaagataagtcagttttagataaataggccacatcagctggccttttctatttatagtgattgaaaactagtaacatgattataaattagtttattttaattcagctatctcaaattagtgtcattaaaacaattctattgagactgtatatttgcagaagactttagcaatagtctcttccatctgaaagagaatgtttatagattacaaagtgtctgtgcttctttgtccattttctggctcttttccagtgcgttctgagtaatcattccctgtcatcacaaagcaaattatctattccctcaaacaggacttgtttttggtttcccctggcactataaaattagcaccatttacattttaacaaggataaatcaaatgacactactcccagcttcaccacatggaaagagtaaaagtcacttcctttccaaggagcttgccaactgggtcagagcataaacccgggctctgcagtggaggtgcccgcagggcaagcaaggaaggctaagggtcgtcactctgcagcaggagcactcggccacccagcacctggcaccacgggcccagaactcagcttttccggggagccaacagcatctcagctctgggctgagccagaaaggcccctgctgaattccagaggtgctttctaaaatggatttttgtcttgttttatttaggggagcagggaaaatagcatatattggctgtgagctggaatatttgtccgaagcacatatatgctcaatttgtaatatctatttaatatctaaacyaccctcacccctctcctcaaaaacaagacatttttcagtttattggtgcattttccctttgatcgtgaggcccatattatgtctcatattatgctccaaacccgaagtatttgtttttgaggcaagtaaattcggaggcttctcacaaaaagagaatgcctattgtgaatcagttacctctgagaagctacagtgcttcactgagatttctctttctgaactgcagctttagaaaacgctgttggcttcttcttcccatgcactgaacaaaaatattaatcctgcttgtcccgaaccacccatccttggatttgagttgtcaagtatctactgaggcacgatatctgtgatgcaccttggggttcccagaargggtgtgtatttgagagtgggcacaggggcagctgaagaccctaccctgtgatggcagcatgtggtgatgccgrgagagcttccacaggggtgctgcgggcctctcatcttgccttgggcccatcttaaggatgttttattttgttctgaactttggtggttatcactctcttttgaaagggcttttagaccaggcacagtggctcacacctgtaatcccagcactttgggaggccgaggtgggcggatcatctggggtcaggagttcaagatcagcccggccaacatggtgaaaccctgtctctacaaaaatacaaaaattagttgggcatgatggcgagtgcctgtaatcccagctactcaggaggctgaggtgggagaatggcttgaacccaggaggcagaggttgcagtgagccgagatcgcaccaattgcactccagcctgggcgacagagtgagactccatctcaaagaaaaaaaggcttttaaattccagattaaggcaggcctgccttttcaagtatatttctgtgagcactgaagaaagtgagttgctccatctttctacattttccccatttctttgcccagtttctcgcttccatttcaggacctgagctgttaagagtaagaaaagagaaccagaatgaggtaattcaatcactttttccatgaagtctgtcagctttctggatgaagatccattattagactatcttaagtcagatttggcacgccataaaatgcctacgctattatcctgctaaccaaaattttcatatgggacaaaactaagctaccttttattaaaataattgattgattatatgtgatacctggctaatgagtaattttgttagatgcatgaagtttaaattgcccagaactattttaatatccctgcgcttatattcatccaaaatgtttactgatgacagcatgcttaggtaagctgccacatacccactttcatctaggtgaaatttgttagtattgctttataaaaataatacaagctcaaggccactgaacacagaggaacccatttgcttttatctagctgtatctcctgtattttactgtacatcaacaatacagtccccgattccagaatgacttcatttccttattataatcccagataggcagttaaatggaaagaagaggtaatgagcaatttctatacacaaatgggccttgatttcttttaactttctaactaaactaatttcttttgcagcacgttacatttacacttccatccaggtttagaattatatgtttccttttgacttgctgttcttgcatacaaaagaagagtccagggaaagagtttcagaaaaaaaaaaaaaaaaggatggaaagttcaagatccttaaacagtctatttcttttaaaagtctctgagaacctggagacacccttaggtatatctgaagacccacagacaactttcacactcttgagtcagtagccagcaccccaactctgtcccttctgtggtcatccagcctctcgatgtggggttagatgaagcaagccctggaccactgggcaataagccatttacagataagggacttactctgtcaaagctatgactcagaacacgccaaacgccagctcctggtaagacctaagtgacatgccagtggctaatgcttaacaactgactttataacctataaatattaattttagaccactcacatgtagcctttagacaggggagattttagaatcagtttttctaattcaggcgttattagataaaggtgcttgggaacagggttttaaattgccagcctcccttyactcaggtgctgttaaatgcatgcagaaagagaagttgaatcatccccagcattgcaattcagtgttttccaatagcaacaaagttcccaggctagctcacaggggctaaactagtggaaatagtatcaaattgctgagtaactcttgaatatggrcgcagtttcatcccctgagagcacgcacaatgcctgggagcactgacatgctcagaccattgccctctgaggccatgttgtgattgagtaaaaaccagcagcttccacagtgggttggattctgacctaagctgtaggttcccagtggccaaccttcctattccagcctcccacttaggaaccccctttcctcccagcctgggaaataacaatggggtctgttctacccctgtgcaggggaaaggggagagggagagagagggagggtgatggtggagagagggatcctggaagaaccagcgatgctgctcatccttcaggagyagccaggctgttctaggacccatgcaagcccatggctcagggcaggcggggcaggcactcggtggctttgttgtcagtctaaccccagaagcccaggagataaaagaccacttttggggccccacatgttacataataatgaacggggtacattttaacatcgtttttgactctcctttccagcaaactgttagatatttgctcatttcttgtttaaattaaaattccacaggctctgctttgaactgcagtattttatcaatcctgagtctcaggacactgtttgatggaattaagtaaggtattatgtgttaaagcctgtgtggctttcccttgtttactttgggggaaaggatgacaggggcatatacagtgtctcagtgctaatactccattatagattaactcggagtgtcgggagatggctcacattatcttaacaggctttctttccttgaaggtggagggtgggtgaggtggtacaggattctgcaggaagagcccacatcttcagaatgttcccatgacaccgttttcatttctgggcaaaggtgctcagtttttgttctcattctgtctttgggtcctggtacatagcaggatcctcacatgtatttatatttaaattaaaccgatgcaaagcttttcagtctggtgtgttactaatttwtgagccttttccctttgcagtttttttctcttatataacctatatctggttaaatgtcttttcacctagactgtttccaactagtagctagattgtttccaactggtagctcacttttagcttagtttagttttcattttataaagactctgagattggccaattatttgagcattgtgaggtattcatcttagtgtcctcagtaaaagggtagagggaactcttcctaccattcaagaagagtgagctgtccaggctgcgggttatttcataagttgtattaatgtcactgaggcctgcgtgtgtggactccaatggtgagttgttgccagaggaagatgggaaacctgcactctggatttgtgttgactccacgtttcaagcctctggttttgcatccagaccatgcactctagcatcctaagccccgtggctgctgtggcagtggctcttttcacgctaaagagggagggaggaaacttgctaacccctgggctctctgactgcagttggggtccttggaccagggaaccagtgcctgttcactaaggtgagggtttaaagtgtcttcttggttttcagttcctgacaagaaatgctgtagaggtagaccctgggtcttcgtgaaccccacccagtctttgagtgactgggctgctcggccgacttccggttctttgcggggtgggggtgactcttgacatgcatgatccgggtctggtctgcagcactcaggatacttccgggctgtggagatggaacctgggtcatgcatggagactgtgaaagctccaccacttcccgagcctcggcctccaccaaagggcatttggctgtggcctgagaggggagcggcctgtctttcccagctgtgtcaagtctctatgccatgttcgttttgtcttttcctcataacacagagccaagcacacctgcaaaaagacattgctggaggaggtgcaggagctggaaaccaagtctcgagtcctgggaaaagcggtgctgcgggatagcaatggaaagaggtggggaactccgtcccagtccgcacagaacacaggtgctcccggcccttttcccttattccttcctgtatttctttttctcatcttggttttcgatgggagcacagtatgctcaggcttaagaattttggttattctcagatttaaatcacactctcagtgactacatgaaacctaaatctctggaagtctccaggtaagactgggggttttattgggtttagaagtgagcaaaacaactcatgtgcagaaaatcgatgttgtggcagtattatcttaaggtggaagagtccagagttagcagtattaccacagaggagttaaagctaggcctttgaatttcaaacccaagtactgtacccaaggatgagtatctacagtgtgaaggtttgcatgtgaaataatgcatgttgttattcatgtaaacctgttacattccacttcagcatatctaaatgggggagtagtttttaatgctaacattttctgctgggagtgaaaggaatcgtgtgaactcctggaacagacactgccgcttgctctcctaattcctcctgaacatgagcctgcccttccccacaaggaacagctgggtctgtgtgcagtttttgtttcatcacacaagatgttaaaatgttgttagagtgcactctgttaaaatctatgtaccatcaagggaaatttctttgggcctgagaacaatttgcagggtactagaaagccattgctctattaaggacatggaatatctataatattctgagtacagctctcctataaatgcttagaaggaaatcagtaaccaactgctaatgaaacaaacatcaagaaatcaaatacttatagaggtccccactttgtgttttgctttatattgtgtttatttgtaccatcttttaaagcaatgaagacaaaataatttttttgttaaagaaagagaatgcaaacattttgagaggctttcaaaatacaatttcaaacagattttagaaaagggatgatggcatagagttgaagttgtggttttgtatttatttatgagttattttttagtaagtttattaagcattcattttatagcagctatgctagccactgtaaaaaatcatcagtcaacaagacaaaaagcactgtcttccataagcttaagtttgtgaatacatggggatgggggctgattttaccgcagatgtacatataaccactacgcgtggttgaggcttgttcagggctgttctatccatcagacagctgaggcataaggctcaggacctgttagagtttcagggacctaccgtgctctttgagacctgaaaaaaaacatattcataagctccaaaaattagggagcaggaaacattgcataatgaaattaataaatgtttaaaaccctataaaatgcatatcactcttaaccgttaagtttagtaaggacaataagtttattatacttagaaacaacttacaggctcccttatatatcaagtatacacaatgattgctgagggggcataagtaatttctaagtaaaatgagaatttcagagcaaaaytctcaaactcctctcaaacattttacaggacgacatcacatataatgtggtgtgagaatgtgctttagagtgtttgttctgatgtggggaggggtcatctggcttgagcaatcaagaaaggcttcatgttggagatggatgaacaacaggcttttgaggatgggagggtcttgaatggacagaactgctgagagtctgatttgggcagagggagtggcacatgccaaggctcaggtccaacactgtgtgcagggaccaaccacccagtttggagggccacatgcattttgcagagatacagaacctgcgtttgaattctggctttgcwacctaccggtgaggccttgtgcaggatatttcatatgatcagattgtctcttcatctgtcatagaagaaggctaatattttctttgggggattaaggttcgtgaaatatgtacaacgcagcatattgcctgacccatctcaggtgtgtaaaaggtcagctgctcatcttcactttggcaggagagtcatgagctgtcggccttgaattgtattgaaggaagtcgtgggctgtcagccttgaaagagtgtgtgagcccatttttgcttgttgttgataaatgaatgttatttttaaaattcacttatcctgttcaaaattcatttttaaatgttcaaatggatatcagaaaataagagcttaaatgcggtttcctaccgtctacatttgaaagtcttattttctggttccttgtaaatttcactttgtagttcatatgatggggtgtgtgtgtgtgtttctgtgcacgtgtgcgcgcacacatgcacgggtgggcctgcatactcccgtttggttgcaccattttccttttcttctagtcccagcatcttgcttcactttggaattcctagccagaacacagtttgggggctctgccgctcatcctcctcagtgaccccctcccatttgtttttctcactcctaattactcacagattttctgggtggtccatctgcaaactggataatggtggcgtgctgctctctgcacagagtctatgctgtcctgcttggcctcctaagctgcctcacaattgttctcttacaacctttgttttcttctttcacacctgcttagattcctgaggggtggagggtagagactaagaagtctgtcttcagctctgtcctcccttctaaagatcttatagacccccacctctttgaggggtcctgagtgtttttgtctcttctcacccctccctgttccttctttcctaccctcatctgatctttcagctgatttgtgtatctctctagctgttaaccgcacaggaaactctgtcaatatttgctggctgactgactggcaataccaaagtctagtgaggtggtagtgaggaaaggacggtgacttcagtgccagatgagctgacacactggtgcctgtgtgtcagctcgtgtgtcggatgtgcacaaagtggccacagagagatgctgacagtcaccgggcctccagggagggggcagtttatctcattgcttgagagtacagctaacatagactcacacatggagaggcatctgtgatgtaagattagcaaatcttacccttgcaaagatgcacaggccaggagcccatcctccctgaaacccactccctctcctgccttcctgtgccagccaagccagggcacccccaggggtcctcagcatccctaaccccaggggcttactcagctcagtcctgacagcattgcttagggccccttaaaggacattctgccaggtcataaaacccaggtccaagtcactggcaaatattctagcagtttttcttaggaatgtaaccacaggaagtagaacaaaaaaaatctgtatgcattaatctttttagaaaaccctcttgtaccaaatttacaattacaattttgaaatggtagccagggattctaagtttctctctgtgccttttattcattcaataaaatattttcatccaacattttattgaacttgtctaagcctcatacttttatactattttgataaagttaaattttcatgaacatgcttctgcactttctcattagtagatcttgtcttccaaaatcaacctgtggaattgatactttaataagcctgttctcatgaagaagcagataatgagaaagggtgagatcagggaattagatatccagaaagcacagtgaagaaagtgctttagggagtgaataaaatgtttgtcttgattttagtttgttcttcttgaaggagtgtttttcacgatgtggtgtttgtgcgccttatagacactggacacgtgtgactgttggggttgatcagaataccttttcccaaactgtcttcccagtaatccctacctggggaagcaggaacccccccgcaccgcacatgaaatagtctaccctgcatgtcgttattttgagtgtctaaacaatgaggagctaaatggaagaaaattctttgttttttaatgtcttggtaatatctttcctttctttattcctgaagtgtaagccatgcaaatttctttcctggtgaaagaaaatctatctgtggccactcacttttacagatacaatataaaccgatgacggcgtgtaagatgacagacttttgttccttaattttttttggaatgagataagtggttgccctgtaatattttaggtacaatggcaagcaagaaaaaaaagggggaatatatttgttgaaaacatctagtttttgagttatgcatagcctgaataaacaaggagagcttgttctatttctagatcacctttcactctgttcatcccagttggtgggagtggggtggggtggggtgagcccagggctgatwttctccattgtcaagggtaaacagacccggttgctgcccctgcctttgccaggaaggcagtggattatcttccccttaagtgctttccctgggtgtagcttacgctgtgactttggtgaaggtagctgtgtggctggtcttaaaccttctggcgagccgtcgcctcgtctcccttcggttttgtgttctgtgaacatctgtgcgtggccctgtgacccggggtaatctggacggcccatcaccgccagggaattcaggagggaaacctgactcttgctctgcggcttccatttcatccaggctgcctctaaacaggcagggccctggtcacagccttggacaggtggcctgggatcctaatggagctctctctgccgaaaaataggaacagagcctgaaccacagcagcaagatttcagacaaaccaaagattgttcctccactccaggcagtgctctcgagtgctcctttgaaaaccagtcgtattaaaaaaatgaaacaacacaaactcccgaatgcattctgagtgagtactcaactcaaaaatacctgtcatgctttgatctttaacggaartcctttgatctttaaaacagtgttgaaaaaactgtttagtatcatcacacctctaagtcaaaatcagtcccactgccaggctgagcatgtcgctgagccagcctgaggcaggagggatgcaggccttttgcaccggactccaacaatgactgcgtcacttcaggaaatcggttttttcacagtactggccgttggcagtgcacatgtggtgcatctcccttttgctttygtcccacctctcccacactttcctcctaaaatacctattattggctttttttccagccaaaaggataggaaattagggcatcctttcagcaaacctctccaggccaggtggcaaatgtctgcttccagcacctggttgagatttattttccttccagctgcattttttttcctcagctctgtcatgaagcagagaagcgagtgcagacggcggagacagatgacctgagctgggctctagcttagctgtgtggccttggctgggttattaacttctctgaacttcagttttctcatcatacattcgctttgaggtttaaataaataatgcagattaaatctatagcctatgtagatgttcaggaagcgtcccctaactgaaaagctgcataacaagtacatttcactggcygtgtttaccrtctaacatgtaagcctggggaagatgtgaatgcagcaggctctccgagttgcatcgtcggggtgtgccccctagtctgaggtaaaagggagaaatctaacagaatcccagggacatgggagtggtgtggacgaatggccgtagtgaatgttggatgggggtgtggtggggactgtagtgagttctgaatcttggtggtctcctcaagacagcctttggattacagcttcaaggagctcctctttgtgaagaggacagtgtacccagtccaggctgtcccttctgccccaggatctctcgccagcttacccctgtccatctgagctgcagtctgtctgtaacgtctatgccggtccttgccactcctccccagaaccagcccttccttcggagtctcctgctccatcgggatgaatttttcccacactgcagactcgctctcagtgtccacactgtcccctcatgtcctgcgcatccctgggtgccaggtctcggcgtcttcccagcatctgcacagtcatcccccctggtcccttggggtggtgcctgtccctcttcacccaccatcccacagctgaagacatcctttgtgaagcacagcctcatcatgccaccttctgccctcagcccaccacctgctgagccagtgcagaccagaaccacagtgatttccgcctctgcttctcttctcacgtgtgcgaccctcagcttccacctcccctgtcctccccacgctgtgcccttctgtggttggtgctacccttggctcttcttgattgactggttttatacgatggtgttgcactgtgtcccaagcactgggccacacgtgggctactcaggggcagcaggacaggccttgtcctgggaacaaatgccgtccacctcaggacacactctctgatgtcaccaacttccctgctgtgctgatggcagcctgagcttcccttaaaacactcattttaaaagttttattttcgaccggttgcggtggctcacgcctgtaatcccagcactttgggaggccaaggcgggcaggtcacgaggtcaggagatggagaccatccatcctggctaacacagtgaaatcccgtctctwctaaaaatacaaaaaaaaaaattagccgggtgtggkggcgggcacctgtagtcccagctactcaggaggctgaggcaggagaatggcgtgaacccgagaggcggagcttgcggtgagccgagatcgcgccactgcactccagcctgggggacagagtgagactccatctcgaaaaaaaaaaaagaagttttattttcattattcaaatattcaagcatacatagtagtagggagatgagcacaataagctcttatgaaatcattgcccaggtccaatcattatcaagattcggccagaactgcttcatctcaccccttctgctcagagtctttctttcctgaaacataaagcaaatcccaggcatcacgacagtccacctatgctttaggaggcatctctaaatattccacgagactttataacatctgtgatacacagcatgcttgtttatgttattaaatgtagaactccagtccccatgatcacatctaacaagttaataataattccttggtatcagtcaaacaacccgtccataaaaagactctctggatgcctcagccctgccttttaggattgattgatttgtgttaggatctgggcaaggttcacacatagcatttggtttctgtgttcctcaagttcctctgaatctggagaactttctcttgtttttttgttttgttttgttttgtttttaagatacagagtcccattatgttgcccaagctgggcttgacttctgggctcactccatcttcctgcctcagcctcccaagtagctgggattacagggatgtgccgccatgctgagacctgtcttcctggtttttaatgccatggacttattcattatgctccactttatwtttttatcataacactgatccccacatgcagcaaatgaaagtttcctcatgtgcagaaaaggcgatgaggcctcagagagatggagtcacgtctgctcagtgtcacccaactaaagagaggcaaacctgcatcttcttacttcaggcctctttccaccaagccaagatgtggagagccacccaaatgcttgcatttgcaattacatctttattagagagactggaaagccacggagcccccagagagaccaggaggggtgcttaccttctagcatggtctgatgaaaagggtcacagtctgctgtctggtgaagctgcgtgcaaaatccaaggaagctagagaattgtagttgcatgttgttgtcttttagatccctacatgtaggaagaacttggaccaagcagagaaatcataccctccccscaagaaatgctgaagccaaaccagcggacaaattcagagcaaataaagggwaaagagtgtgtgaaagcggctcattttgtttgtttgtttgtttgttttttgagacagaatcttgctctatcgcccaggctggagtgcagtggtgcgacctcagctcgctgcaacctctgcctcccaggttcaagcaattctctgcctcagcctcctgagtagctgggattacaggcacccgccaccatgcccagctaatttttgtatttttagtagagacggggtttcaccatcttggccaggctggtcttgaactcctgaccttgtgatccacccccacccccaccccccttccctgccctcggcctcctaaagtgctaggattacaggcatgaaccaccgtgcccagccgcagctcacattttgatatggctcaggaaagagaagccttgctaaagaagccccaatttccacccacagtcaccttcgtggagcctagtatggtctatgaaaaaattaattgaatgcgtttaatcttgtagagcaaagaaccttgggcaaagcctaatgccggcaaacattttagttgagacaatggggagagttcttaggagaacagctggagagccaacgacgctcccaggcaaggccagttaaagctctcgccttgctgacaaatactcgcgacaggtgaggaaatgcattagtggaacaaagggagtgaatgtggcaggaaattaccgaaaggctgcccgcatgacccagccgggcttctggtgactgtttgcatcctgggcacaggaaggagaggaggaggaaaataaactcttcaggaagtgaaacacctcattagcatttagttaatgcctaagctgcctgtgtcaactaaaaataattgattctctgttattttaggaatgttgaattccaagagcctgttgttgttgttgttgttgttattgttcttatggaccgatgtttaataattagaaaatttttaaattaaataccagatgtcatttattattaagcatcttgttcacctttaaaacggtgctgtggctgtatcagaaatctaatcaggagcttagctacttgcccagtgctgcgatgaagaagtgcagcatctttagaaaatgcctggagagaaaatgggaagaagtgtcctcttgatggagggaggtragtgtggagagaccatcagtgttagcggtttgctagtaacacggcctcaggctgtatttccaggatgacttgagtacatttccttttttgaattatgacttaaattagttccatgtcaactttctctatttgccaacaagactttttttcaagaaccatttttactgatgaatttattctcagttccaaacaaaactagtgtggacagctagctcactgtatccctttttaagtagtgatgaaatattttaatctttttggggaggatagttttatttaacccacttgagcagcaatagaaacatttaaaggtagatttgccaaaaaaaaattgccattgtataggtcacataatttgaatagtgatattatacattccaggcggggattagttcttcaggaggttctgggatctctttgctaatcgcttttctcctgcgttatcagtgagttgtttgcttttcccttcggcttcccgttttgcctacctccaactgtgactgatctctgagagtaagacattccagcctgaaaacaaacaggcaggtacacccatcctaaaattgagttacaatttagatgttatctgggaataaccggattctactgttcatttctcaatgagcctctccctaaattcttacaaaggcgtagagaagaagtgtagactcccaggccccccagcattcagggttaaagtgactttgtagtgcatctgagagaactgctggatccctgggacgtcctggactgttacaggcaaaaagaagactcaggagaggccgggcgcggtggctcacgcctgtaatcccagcattttgggaggctgaggcgggcggatcacgaggtcaggaattcgagaccatcctggcaaacacgttaaaacccgtctctactaaaaatacaaaaaattagccgggcttggtggcgggcgcctgtagtcccagctacttgagaggctgaggcaggagaatgacgtgaacccgggaggcggagcttggagtgagccgagatcgcgccactgcactccagcctgggcgacagagcgagactacggctcaaaaaaaaaagcctcaggagaaatgctggwtgttttttattcatatttgatggctgcttttgcacactacagcacagagcatgtcctcccaggcccctgacgtggtctctgtcactagactagtgactagtctctgtcactagtggtctctgtcaccatttatgtatacactagttctgtaaagccagcacttggaaagccagtcaaggtccagttaggtcacgggtgaatgacatcattggccttgtggttgagaggaacttggagaatatgtaaaagttatcaccaagagatggtcattgtagcaggaatcactgcatttagcaatagatttattggatttttggaaacatttctctattaacaggaacagaaaaaaaaattattcttgggtttaaaaaaacctggcatggatctcatgctggtgtatctaagagtaaattcttctgtagaccaggacacgtgaatgactgtcacagagcctggattgttagtgattcagtgagtcccagttaagtcttccttttctaatagggcagtgataatatgattattcagtgtttattctctttctctggcaattaggattggctcaaggccccttaggtggtggtaattgggacttcacagttactaatgagtaaacatgttggcctcatagcaaatagaaccagtgattggcctaatgtggggcgagtcatttatgtatccacgcaacagacatttattaaaaacggaggaagtgccaggccagactccggcctagaatgagagagggaattcctattgctttagagctcgcctggtagtgggagacagtgagtggtggctcctgggaggaaaatgaaccagaggacataacggggagtgaatggctgggctggagcagtcagggaagcctcctaagatgacactgtcggggaagaaaaaagtcatgtcttttcctcatccattacaaggctcatggctgacactcctgtaacaacagtcagagtaatcagagaaaagcgtaacagacttatttgtcaaagttttttgtgacatgggagccttcagaaatgaagatccaaagacccagggaaaaccgtatgtatttttatgccaatgaagaacggacagtcatgcaaaaatgtgattggaagaaaagggggtaatttatcaagcatggggaattcagcaagacctgtctgttgtgactctgggcctctttgtgcagccttccttcccgctgggtgtggggcaggaccactgtggaacgcaggtcttacggcctcctctcagggaaggaaggtcagtgagcaccttcatgactgtgcttcccactgaaaggtagggaggatcagagcaaccctcttgcttctgaggccttctcagtctccttcagttcacagtgctcagggtcatattttctgagccatgacaacatttaaactgagacctaaacaggcagtcaaccaagaggagatctggggaaggaacgttccaggcaccagaatttgataagaaggcctgtagggggagtgggagggatgctcggtgtgaccagtgcctgggaaatgcatgacaaagtcatctaagagatctaagaggcagcaggagccagatcacacaggcctttgtgagcagggtcctagggcattggattgtagccaccaggaaacatttccatgggaggagtttaagcaagggacatacatgacacaaatttttagaatgtgtgattaccatactacttaaaagccatagaatcccattctcaaagttaaaaattgagtaaaatctctagccaggcacggtggcatgcacctgtattcccagctactcaagaggctgaggcaggaggatcacctgagtccaggagtttgaggctgcagtgagccgtgattacagcgtgtgaacagacactgcactccagcctgggcaacatagcaagacctggtttctaaaaataaagaaaaagttaagtgaaacctcaatactgtatataaaaatacacaaaatatttattagtatgaatttatgatatgtgttcaaattaagacatttattgttctaaagtcaattggcgttagcaatgagttgatttttcaaaacgacaaaaattagaagtgagtgttatggaagacagwttgctttatatcatctctatatctagtttacttttgttttgttttgggttgtgttgagaaaagccttgagggataaagattagttgccaagtttgtgttttcatactttgccttgtgacctcagactttctcatttttgttcttgattatatttaactgttgcttaagtatacaagtcatacaaagaaggaaccaacagtttgtgtacacactgtctctgaaatcaaaatagcatcatgtgataattgatctcttgttatgtgactgacataatataacagtcacatgttccacacagacaggaacatggatcaggtaatgcactttgtgagaataggctarttgccagtattattttatgtgaatggacacgtaagaatgcttgtttgaaaaatagcaatatgtaattacaattactaattactaatcagtgacctatttgtaaaatcaaaaataagaacttttatttaatctgagatcctgacagaagcaagttaacttgaaaatatctctggatttcaatatattaagattttatatgtattatatgaaacaattcgtatgttcttatactaattaaatattttttaaaaatattcaatgtataaaaaatgcaatttaaaaaygagtggctgaaagaatagtaaacagcactgtaatcctaaaagcttgtgttaactttacatttcaatttagtcacaaaatacagatggatacattcctgaaaaaatgtgaagtctttagtaagaatagacatttttgagagagtaaggcacatttaattatttaatattatacatttagtttaggaacataaaatgaataatttaaaattttaatgattttaaaggtataatttaagagttgtacatgtgctcactgaatttactgataaatacaacttttcattactagtggaatcaaaaatttttagttctcccatatctatttttttggccagttcatcagaaatactcaaagattttagatgggagaaattttagattcttaagctatttctagaatgatggtggttttgtttctcaaagcattgatctgttgcccagaccttttgcccttcttgctctgtctcacctattcagaaagcacttgctctttaaaaaagaactgaggacaggaactggctgaatacacttttgtcatatggaactttgggcttattgtctaagctatcatcttttcaccatcctcacaaatctgttgaaaactgaagactcgcctgtgacaaattccttttgcatgttcccaatttatgcacagtgcttttcacatgacgcagaagattgcagacacgaaagcactcaaaagcaaagagacaccggggctgggtggggcacaagcttgctgccatgttgccggacaaattggttgtattctgtgatcaaacatctaaagatattctgtacactggagcatttgagacacagtgacatttcaaagtgaaatccaagtgagcttttttatttgataacccagagaaatgcagtggccacacatttctgctccattttggcctctgcttcttggacccataaactatgtgattgcaatgcagccagctggagataacatttctgctgtggcgtcaaggtttttcactttagtttctttggtatttggaaatgaaaatacacctatgccctcaaaaacaatttattaatctttgtaactgtactgttttgcaaaaaatgtctacaaagtgcaccatttgattccagataaataaatttctttatatggatcttcaggcaattcttccattaggcatagcagacatcctcatctatgtgcctcagattctctgttctttttgttccatataggatgtctttttcttcctttttatgtaatattctcaaaggatataaccacatcattccatcaagtttacttcatggtttgtgtcaatgcattattcttgcatttgcttctttctggaacacagcagtttataccatgtttaggttttatgttttctgacttttgttcttttgtagctctgttggagtgagtccaacttatgacatcattagcaatgttttgtaggctctgggatgcaccttctgtgtgtctgctttgattttctgtgctgccttcatgatagtgtccacagaaaataattttacattcctaaaactgatatatattcagcaacatttttcatttacttacaccatgaagaacaacaacaaaagaaaatgaagtaacaacagcaagtgaaaaatcagataatagagctagcagtaaagtctgtaatttgttctcccaaaactttgttcacccaactgagaggagcacagaacataatgcacctggttttgtcttctacaaaccattaaccattgacattctaatccttaaaaaaaaattgcacataatacctgctgagcaagtagcattataagtttttaaaaatgcctgtgagtaggcatatcctgttgtagagaattatgttctaaaagtacatttcctttatagaaccttggtgagttttctccctaatcttcaggggtcaacttggataaaactagggtttctgagaactttccaggcatggttcctttcttgtagttgtgaacttaaaggtgtaaatattgtcatcctttatggagatgtgaatccaggcaaaagcatgtatcaaacccttgcgatttgccagaggtcaagctgagcattgaagaaacagagaaacagtaaggtaatgatgacaaatagtagacagagaatgggaacacaatgtgaaaaacattttaataaagtgatgagtgacattccagagtgcccaaggaaaattagaattcccaagcaggtagtgaagcaggggacgagaatgacacagctgatataaaaagttatctggagcctgggtgcagtggctcacacctatcatccaagcactttgggaggccgaggcaggagaaagacttgaggccaggagttcaagaccagcctaggcaacataacgagacccccgtcactacaaaagttttaaaaaaaattagccaggtgtggtggtgcgtgcatgtggtcccagctacttaagaggctgaggcatggggatcgtttgagcccaggagttccaggctgcagtgagctgtgatcgcaccactgcactccagcctgggtgacagagcaagaaaccgtctcaaaaaaaaaaagttatccaggagtaatgaaaagtttggtgtgatgggagctgagagtccagaaaggtgctaagagggtaggttggagctgggcccagtggctcatgcctgtaattccagcactttgggagatgaaggcaggtggatcgcttgaggtcaggagttcgagaccagcctggccaacgtggtgaaaccccacctctactaaaaatacaaaaattagccaagtgtggtggtgcacacctgtaatcccagctacttgggaggctaaggcacgagaatcgcttgatcccgggaggtagaggttgcagtaaaccaagattgtgtmctcyagccttgccgacagagtgagactttgtctcaaaaaaaaaaaacaaacaaaaamaacaaacaaaaacgaaacaaaacaaaaaaacaaagaggttaggttggataagtaagtgaaggccaaatcataagacctgtgatgaagttggggctgtattctgtaagccacgaagagtcatcaaaagcctcacttgtgagaactagttattgaatgagatcctgtgagtagagaatttatcaagatctcggcagcatgaycacgcagaaacaaacagaaacaaaggaatgtgtcaccaggattcctctctcatgcagggctgtgttaggacacayatacttcatttgagattgtttggaaagtcacctctcacccccactctagaacaacttacattagagaaacgttttcttacagtggcctcacacacacccttttgaggagaaatgaaaagctgtagtttaacaaccgccttacacgtaagaacgaaggaaccaaatgtgcaaatttagaatgacattgcattgggctgaccataaagtaccctccatccccagggcactgctaatgcggagaacgtggtttgtcatacaagacctactgggtagctgtttatttagtagaaatagtgtatgctggttacaagaatggaaaagagaatagaactaaaattactattatcaactacatccaaaaagcacacaaaaaaataaccactaggtgtatatctcaaggtcagaaggccaaaattaaatagccaagttctttctttcttcttcatatcctttcagttcattctctctgctgtcaccccacgcatatactcatggttccttaaagtctttccttgggccagtggttcttaaagaactcttatgtcagtagaagatgctttcagttgccgataccagagacctcacttcaaactgatcttcaggattagagaagcacctagcttgtttaatttgaacgtcccgctggggggcagtcatggtcgatcaatccccagccagaatgtcatcagagacccaccagtctctttccatcttttcactttgcccccagtgctttatactgagtcgggcccatggcccctgtggaaataacagggaggtgacccaaagtaatggggactatgggcatccttgttcaccagtggagagggtgtgtttgcccttgacaaccaattgaccgaagttactgttcaccatgctggaaccaccctgagccaatccctacagtccaggaaataccatggtgggttggtttagacttggattaccaaaacctgtccatgtaggaagattggggtgggggtatcactgtgactatccatgctcttcagcagtgagggaagaaatggatgttggagagaatattcacatgtctccttcaggcctctgagaatttcatgaaagccacgtgctatatccctgtgtgttaattttgcattcagtttttggaggattcactaacccactgaggactgtcattctttttttttctcttcagcttcattgaggtataattgacaaataaaaattgtatgtattcaaggtgtacaacagatggtttgatagacgtatagattgggagatgattgccacaatcaagctaaatacatatccatcacttcacagttacccttgtgtgtgtggtgagaacactgaagatctactctcagcacatttcaagtatacaatacattattattaactataatcatcatgctatacattagctctccagaacttactcatcttaaaactgaaaggttatacctttggctaacttcttactatttttctcacttcttgaccccgggtaaccacccttcttctctttgtttgtgagtttgactttttatggatttcacatacaagtcagatcatgcagtgtttgtctttctgtgcctggcttatttcacctaatgtgaagtcttccaggttcgtccatgttgtcaccaatggcaagatttcctgttttatggctgaatagtattccattgtgtatatgtaccacattttctttattcattcctctgttgatggacacgtaggttgattccatatcttggttattgtaaataatgctgcagtgaacatggcaatgcggatgtctcttcaacatactgatgttgtcccctctggatgtatatacccgggactaggattgctgagtcatatgcttattctctatttttgaattttttgaggaacctccatactgttttccataatggctacaccattttacatttccaccaatactgtaaagaataaggaccattctttaccttagaaaaataacattgcttcccagaggcagaagtgcaccttattcctagatttcagcactctctgtactgtttatccattcaggaggaactacagtgatcaaacactggagataaatagtggttttaagcttttatttcataatttttacagatgatctagagataggccaagtaataatatgtaaataattaattttaaacattcagctcattctttaaaaaactcatagcccaaatgtttgttggttgtttttttccactgggaaaggacggggaaatgtagtttcccactcctgcgccctgtatgttgttatattttaccatgtctttcatagcagcctcccatcattggttgccgtaaatcttttcactgactgtgaggtaccaagagtaaggtaatttagccaaattagtcaggacagcctcactttgtggagcccaggtgaggcttttcaataagagctgttcttccaactggaaaatgccaacaagcaacaatgcagccagtcatcttattttgaagttttaaaagaaagggtttgccagaaatactgggaaggtttagcagctgttccacctggaagatggcaaggttcttgacctgtgaaggaccatttggcattgtctgtccatgtgctgatcagttttaagtaaaccctgcactgaagcaatgaagaaagacactggcaaagtcagcatgctgttgcctcactccccgtcaccactgtgaagcctcctcttttaacataaggcccagagaggatccaagatgttgccaagaccacctgtagccaccagccatgcaggggtggggtcatgtttcttaacccacagcaacacaggtgataggcctggttcttgatctggacagccttcgcataacaccagataactgaatgctaattttcctttccatttaccttaaatcttaacagtaacacaactaacaataaaaaaggcaccatgggatgtgtcctgcttgttccacaaagaactttttcccaggtgtggcctcccttgaaaaatggctgcacccttggatttcttcgtgtggctgatttgcagatccattagttacattcacctttggctaaaggctatgggatagttgatttactttggatgatgcagtatttttcaagagaagttttcatatatttagcccaactgcttcgccacaagaaacaaagtcgtaagtatctatacaggtttacagaaaatgaaattttagctccagctacaaagcggctcagccagttcatggagacttgtcacaggttggtgactgagaagggtccacctgaaacacttgcatgtccaggtccagctgagcrtgcatgccagcctcagccgctggggtccctgtctggtcctgcagcatcacgtggctcagatggcatcttcgctgtgagtgcgaagacgctgggcaccagcacctgcacaggcagatggtgaaaggcccccaactctctggtaatgaggatggcagccatatgctttctcatgcatccagctcagcctccaacctacaataccataatgatgacatgtgggaaagtctaggtcccatgccacatcccagttaaaatgcatgcactggaaaagggaggggaactcagctgcacacacattactttttttctatggccttttctgcatctacccaggacttaattgctaatactgcctccctccatgtgggatgaagtgggagaaggatcacaggaaaatacttccacccgtttgctgtggcagggctagattccaaagtgcccaggactgctaattcattcacccctttgtgacagcttatttacccacaccccaccttatttccaaaaggactccaagtagctcaagaaaggaataaagagctatagttaaaaaataatttctcaaagtcctctgcctgtctccatgggctgggctgaactttgagtgactcacccaccgtctgaagtccaagaaacaaataccctaggctgagatctggagattgttctatttgcaattcttatggagggagttattatattctccactgattgggcagtgtgttttcccagagagacagcatgaagcaggcacctgcatccactttattcttttcctctttgtgagtcttgcacgggccgtcagcctgtttgtgaactctggcaggacatggaggtcagcctgtgccaagcaccttgaaccctcattatctttaattagtgtttaggaggttaatcggtggtgaagctcatctttctttaattacttcaacaattcagtcagggggtccctgcagccagctttgaattattctgtttgtttggatgcttatttgaatttgtaaagttggatgtttattgtccagacctagaccctgtgtgcattgaagaaagtgttagggaaagaggagagacgagtatggggaaggttatttttattgcaattaatttgcagctgaatgagcccagaaagtttgcagttttaaaagtgcatcacagtcatatcagagatatcaatgattcaaactggatccaaatcttcctaagctccaattagcacatttattttatttttcatacaaggataagttcacattcaaataattagttgattaaaaaatattattaggtctctactccatgtcttgacatcttaggtgctttgtccagtcacatttaattttcagtattgtacatgataaagctaccaactttgggaaattatattccagcccaaagccttgcttcagaaactctccttaatgcctggctgacatttccttttctttttttctagcaccttatgctcattctctcctctatttattttcagtgaccaccagacactttaaagttgatctatatttacctttttataaggatccttcccaccctccatttctttccttcctcctcacttccacctacttgttccttcaacgtggccattgttctcatgcttcccggaagggtgaactttggctaaagtcatgatttccactcaacaggacagtaactctcagccacattgtgcctctgtctgcaaagtatccactgttctttggcaaagttaggatgtagccttggtaatcctttggccctggagattgtgtttttaacaaagcacctcccttagagcgggttttagaaagtcagcaggccagcgcctcccttccccttccaggaagaagcagaatctcagacatggtttcagggaggtgctcccaggagcctctggcaggagaaaggccttgtggccttgccatttccatctttgtctttgcgtttatacgttggcccagcctacattgactctttcatcgcttcacttcttcagtccttcaacaaatagtttttgagcatccactgtgcaccaggcactgttttgggtgccaagcatgtaactgtaaaaaaaaaaaaaaaaaaaaaagcaaaattcctgccctcatagaacttacattctaatgaggaacacagacagtacacacaaactatgtcgtgaaaagtgtggcatggaaaaccaagctagatgtgggtgcagacagtgatgaggggagggtttctgggaagctggtctgggaagtctggtctgagtgaactgagggagagagacttgtccacgggaagaacatcccaggccaagggaaagcatatgcaaaggccctgaggtgggaaaccagagtgatccaggaacttgcaaggatggccatgtggccagctggggcagagggagggagggaagcacagtaggaaatagcgttgagaggaagccagggtccttgcgtttattgtatgattctgagtaggtaagcagcatggtcctgtttgtggatatagaattttaacagaactttctgcttataaagctgcatctttgtgattaacttagagcttcactgctatagtatgttttctccatttcccaaatgcccctatttgtaaatgcacagagcctagactattcttcacttgcttggtgacacccaggccttttcaacccgtggcacggcattttgcttggggtctctccaggtcagccaggtgccctgctaatttatctgttcctagcagccccgtgactccaacctgaccttttcataggcttgccgacaggaccacggagctcagccttgcaagtcgtggaatgaggtgatggtttccatatgtgctggggctgtcattcaaattctttgcctgctcagctaatgaggtcagaacggctctgcctgaggtggacagcctctccctcgggtagtgtgcctgcaggagatacrggaggaagtctccccacccgctttaaaggaagcttggcgagatagcattgcttagcactgttcacaaaaggataactgcagaaaaacatgaaataaaagggaatagaagggaagagacagactgacttttttaatttaaactttttatttggagataattgtggcttcataggcagttgtaaaaaataatagaaagctcgcatataccctttactcagtttccttaaatggtaacatcttacaaaactgtagtacagtatcacaaccaggaaactgacactgacacagtcaacacaaaacatacccatcaccacaaggaccrcttcctccctaccctttccatcccgccattgtgcttttataggtacccctactttctaytcattccttaactcctggcaaccattaactgttctccatttctatgattttgtcgtttcaagaatggcatatacatggaatcttataacgtgtaaccttttgttagtgacattttctttcagcataattctctggagtttcatccaggttgttgcatgtgtccatagtttcytcctgtttactgctgagtaatattccacccaatgcatgtaccacgcgttgcttgaccattcatccgttgaaggagatctggatttccagtttttgctcttatacataaaactcttacaaacatttgtttactggcttttatgtcaatattaggtcttaatttttctgggataaatgtccaggagtgcaatagctgggtttatagtagatgcatatttagttttacttttaggttttttttttttttttcaataacaaccatgtatttagctcatgattctgtgggttgacagtttgggctgcacattagtggagggttacctgatttgtgtgtgtgtgagacataattcaaacacataaacttcaccattttaaagtgtataattcagtggtttttagtattttcacaaggttgtggtatgtttggtttttaaacaaactgccaagctgtttttcagagtgggcataccattttacattttcatcatgatgcatgagtgatctagtttttctatatccttgccagcattcagtgctgtcctttttttttttttttttttaattttagccatagggattgctgcttagtgatctctctttgtggttttagtctgtgttttcctaatggttaatgatgtgaacatcttttcatgtgtttatttgccaactatagtcactctggtgaaacgtcttttcatggcctttgaccattttctaatgggattctttgttttgttttatattgagttttgagagttatttatatgttctagatgttagttctttgtgagacatgtggcttacaaatattttctcccattctgtaccatgttctttcagcctcctaatagggcctttcatagaagaaaagttaattttagtgaagtccaaatatcaatttttctttgtgaattatgcttttggtgtcaagtctaagagaactctgcttagccctagatttcaaagatactctcctatttttttcctaaaagttgtatagttttttttttgtttgtttttttaattatactttaagttttagggtacatgtgcacattgtgcaggttagttacatatgtatacatgtgccatgctggtgcgctgcacccactaactcgtcatctagcattaggtatatctcccaatgctatccctccccccttcccccaccccaccacagtccccagagtgtgatattccccttcctgtgtccatgtgatctcattgttcaattcccacctatgagtgagaatatgcrgtgtttggttttttgttcttgcgatagtttactgagaatgatgatttccaatttcatccatgtccctacaaaggacatgaactcatcattttttatggctgcatagtattccatggtgtatatgtcccacattttcttaatccagtctatcattgttggacatttgggttggttccaagtctttgctattgtgaataatgcctcaataaacatacgtgtgcatgtgtctttatagcagcatgatttatagtcatttgggtatatacccagtaatgggatggctgggtcaaatggtatttctagttctagatccctgaggaatcgccacactgctatgacaaacccacagccaatatcatactgaatgggcaaaaactggaagcattccctttgaaaactggcacaagacagggttgccctctctcaccactcctattcaacatagtgttggaagttctggccagggcaattaggcaggagaaggaaataaagggtattcaattaggaaaagaggaagtcaaattgtctctgtttgcaaaagttgtatagttttatattttactttcaagtatgtatgctgagttaatttttgtgtaaggtatgagatttagatcaaagttctttttttctgtgcatatatagttgttccagcaccatttgtcaaaaaggctttcttccactgaattgcttttgcacctttgtcaaaaatcagatgggtatgtttatgtgagcctgttttttgtttctgtcttctagtctatttatctgtttatttctttatgaatgccacactgtcttgattattgtaattatatcataagtcttgaaatcagatacactgatttcttccatttcattcttcttttccaaaattttaacaattgttcttttacctttccgtatatactttttggaatggtctcatctgtaacgacaaaaaatggttgagattttgacaggaattgctttaaatctgtatatcaatttggagaattaacgtctttactatgctgtgttttccaatccatgaaaatggtaagtctctccatttgtttagattttctttgatttctttcatcagcattgtgtagcttttagcacacaagttttgtaaatgttttgctctgtttgcgcctcagtatttcatatatttttgaacgatcccaaattgcattgtattttaaattttagcatctgtgtgttcattgataatacatagaaatacaactgatttttgtatgttgatcttacatcatgtactttgatgaactgacttattagtactaggagttttatatctatacataaatatatatatatacatatttatgtgtgcatatatatgtatttcttgggattttccagacaattatgtcatctgcaaatagctacaattttattacttcctttctggtccctgtattttttatttccttttcttgtgttattgcactagctagaacttctagcacagtgttgaataaaagtggtgaaaatggtcatccttgccttgttcccaatatttgggagaaatcattcaactttttatcataaagtgtggtgctagctgcaggtktttttgtagatgctctttgtcaagttgggggagttcttttcttaatttgctaagagattttttgtttgtttttaactcatgaatgggtgttgaattttgtaaaatgctttatctgcatgaaccaatatgagtgtgttttttttctctttagcctgttaacatggtagattacattgatttctgaatattgaaccatccttgtatctctgtaatctccacttgattgtgttgtgtaattcttgttatatgttgatgaattgcacttactaatgtcaggtttttttgcatctatgtttgtaaggtacattggactggggctttctttttttgtaatgtctttgtatggactggtatagtataatagtagcttcataaataaattgggaagtgtcttttccttttctgttttctggaagagattatgtagaactggtggtaagtcttctttaaacttttggtaaaattctccagtgaggccatataaattcaatttccttaatatttagagagctattaaaattatttcaaattgtgtgaattttggtagtctttgtttttcaaggaattggtccatttcatctggtttgtcaaacacatgtgtagaattgtttctggtatcctacaattatctttttgatatttgcaaggtttgagtaatatctcacttaattcctaatattggtaatgtgtgtcttctcttttttttttctttgtaagtattgctagaagtttgttaattttattgttcttttcaaataagaagctcaataaagagcttttttattgtttctctgtttttaacctatcagtttttattcttaatgatttccttccttctgcttgctttgggtttattttgctcttcttttctagtttcttcatgtgagaacttggaattctttaattttttttaatatatagattaactgctatgaatttccctcacagcactgttttaaccrtgtaccacaaattgtaatgtattttctttttcatttaattcagtaattttttatttgtcttaaggctttttcttaatcctttattatttggaagtgtgttattaatttccaagtgtttgaagatttttctgttatcttttttatttatttctagtttgattccattgtgtttgtagcatgtattgtgtataacttttaagtgtgttgaagtttgttttgtggcccaraatattctatttcttgttatatattccatgtgcacatggaaagaatgtgcattctgttgttattaggtagagtgtggcatgaatatatcctgttggttgatggcgtttggcagttctttaaattttattgatgattttccatttgtactatccattgttgaatgagggatattgaaaaattcaactataattgtgaattagtctatttcttmtttcagttctatcagttttagcttcacatattttgcagctctgttacttggtgcatagacattcaggattgctatgtattctgaatggattgatccttttgtcattgcataatgtccttcattttctccagtaagttactttgctctaaagaccactttatctaatattaatatagttacttaggttttattttgattaatgtttgcatgatgtatcttttccatcattttctrtctgcctatatcattatatttgaagctagcttctaaaaggcagtatgtaattggctcatgtttttaaattcaccatgtcattctgtatcttttaattggcatatttataccatttatatttaatttattgctgatatgttggggcatatgtctgccattttacctttttgagccatcacacctagctctacatacatttaaaaccatatcagaccatgtataattttcactttaactcatcaaacataatttggagaaatcaagagcaaaagaaaagcttcttgtatttactcatattttgcttactatattctttcttttttatgttccaagatttcttcttttatcatttcctttttgtttatagaactttcttattattattttttattttttgagatggagtcttactctgttgcccaggctagagtgtggcggtgtgatctcagctcactgcaacctccgcactctggcgttcaagcaattctcctgcctcagcctcctaagtagctggtattacaggtgtgcaccaccatgcctggctaatttttttttgagacggagtctcactctgttgcccaggctggagtgcagtggcacaatctcagctcaccgcaacctctacctcctgggttcaagcatttcttctgcctcagcctcccaagtagctgggattataggcacctgccaacacacctggctaatttttgtatttttagtagagacaaggtttcaccacattagccaggctggtctcgaactcctgacctcagatgatcctcccacctcggcctcccaaaatgctgggattacaggcgtgagccaccatgcccagcccatctttgtatttttagtagagacagggtttcaccatgttggccagactgttcttgaactcctgacctcaagtgatcctcttgccttggcctcccaaagtgctgtgattacaggtgtgagccaccgtgcccccaccttataggactttctttagctattcctgtaagatcgttctggtggtgacaaattttcttagttttccttccattcaagagatttctttttcattcctgaaagatattttcactgggttgacagttctgttctttcagcacctgaaaaatgttgtgccagttgctctggcctcagtggtttctgatgagaaatccactgtcaacctacgtggttttcctctattggtgtcatttctcttwggctgcctttggaatctttgtcgttggtttttggcagtgtaattaaaatctgtcttgttgtggatttctttgagtttatcctctttagaattgctctgtaagtttatattgttcwtcaaaattgggacattttcagccactatttctgagtgctcttttagccctgccgtatttctcctctttttctgagactctgaagacgtgaatgttagatcttctattatattcttacaggctcccaaggctctgttaatttttatagtctattttgtctctattactcagactgggtaatttctactgttctatttttcagttcactaacgatttcctctgtcccctgcattctgctgttgagcccatccactgaggtttttatttcagttgttatatttttccgttctgaaatttcctatttgttcttttaagtcttatatttcttggctgcggctttctattttttttcttttaagtgtgttcataattacttattgaaacatttttaccatggctactttaaaatctttgtcagacaattccactgtttctgacgtcttggtgttagcatctattgatcatttttatttttctccctgtttgagatcttcctggtttatggtaaaataagtgattttcaaatgaaacctggacattttggctattatgctatggactctggatttcatggcagcctggctcctgccgggtagaggtaatccagattcactaatggcctctgtttatgtcttcagggtagggatgggagctcctgctctccaggtgcaggggtcctgattctccataagaccttttctgacatcacccagtgaagagggaaaaggatgccttcacatttcactgggttggggatggaagtctagtcatccgaagtgatctctgctgacatcccagaagggaggggtccttattggctggcagggatgaaagtcaaggatccctgcttggtcttctttttcacctccccataagggtgttggagagcctcataacagtctcctaagggaagaagtctaagagcaccactaggtctttgctggcatgggttgggggtgagggggccacctttttctctggggtatctggctgcagatgagtacttcaggcctgaaagttttctgtcttgctaggctgcccctttcctgttcctttgtctggagagaaaaggcatttgctaggtaggcttctttgttcatgcctgtggacattcagaatcgtcctctgcctctactgggaaaaccttgtctgggacagaggaaatcaagcactgtgctgctacaagcctctcttctctccagtgcccagtttttattattagaggaaagttgggtccagggaggactggaggaatctgttgtttatttttggaacggaatttgtattagggttagttaaccttgaaccctatggtgtcttcagccagaatgtcccccaaactgtcccatgtaacctgaattcttaaaaaattacaatgtttcatctctataaatccacaaacactgctcacaatatcttctggaatttggagtgagcttttctctcyggaagagaatagggacaatgtccatattctggcattttaaaagaataatacagaggaatttaccttggccactattggaaaacctactgtgtcctgagctcaatgctgggcgttatggatagacacgagacaaatggtgaaggattgagttgtggagacacaacataagaagagagtcgcaccacaaatcrgttaatacaaagcacacatgcaattttacatattgaaccgtgtcctctgttttcagcccaggataggtactgtgaaaaacataacaaaaagtgtaagacttggttccggctgaatgaaccctctagttgaacacacagatggtgtgctggtgttttccagggatcactaggcacagtgctgctwctcagtctaccagctctccatgggtttctacaagctgagtccaaagttgcatctcagctttgacctctctctggtcccctgtcttctgaacacctcagaggcgctcacaggccccacatctgaaactggattcattgctgttcctgctgaacctttttctcctcctgtgtttgcatctggatggtcagcaaagggccatccattgttcaggacccagcttcagtgctgattctctctgccctgctccaagttcttcactcctccacgtcacctctcctgagcctagcacaatctctgtaagggcatcatcaccttatagcatggtaagtgtctgcacggcgaggtcaccttaaagactgtgagttcatgagggcagaggctgtgtcttgggtaactttgtttccaacattgggtctcacacacagtaggcgcagtacaaatgctgaattaatgggaggtcaagaggtcatgtttttaaaaagaagatgcatatggattggcagaaaggggaaaggagaatcatctactaccatctaacagaatggaatttctggagggctcgtagttccgtggtatataaaataaatataactcttattgaagttttaggctggaaaaccgattttgtttttgttttattcttgtgattttccttcattacataagtgtctttaactaaggtaaagttttagataaaacaaaggyctaggtaggtctggaatacacttgagccccgaaggttttcatttcctaatgataatgagtaaaataagttgccaattgtggctatgaaatatcattctctaataaarcaggttagaatgttaacagcctggtggattggtagatgtttggccttccctgaaggacagggaactggggaccagctttttttcttgagggcctgtcacatctgtgttttgcagactgcccagtagctaatttaaaaataagtttctaaaattacctacttgtttttggctttgttgtagtgtcagctgtgattccggtcagttgtaactattgacaagatctaaaattcagatttggagttatttgctgtgtactccacactcccgctctttggcagttatgcatgtgtgatttttgcaggaatagctttctaacagaaatgtggacacaagagtttatttttctccatcataactcagctctccacttcttcctgagactgatcattttttgaggcaggagcataacaccttctctaggatttgtcagcttctaaaaagagccttttgtaaggacttgtatgagcttgggtttcaccatcattactggggaggcactaagactgcacatatctctgggtgaagtaatgtctacacaacacctttcatagcaatagttcccagctagcatacctgcttctgccagtacagagccaaaaaaaaaaaaaaaaaaaaaattaagtactttaatgccaataccccccaccatgggaaaaataaactgtaaaaatggcatcattaccaacagctcatgtgataggagggaactgaccttgatttggcacccaatccacctttttttaattcaattttctttctcaaaaaaatgtgataaaatgcacatagcataacatttactattttatagtttgccatacatggcagttggtagagtcacagtgttgtataaccattaccactacctagttccagaatattttcatctccccaaaagggaaccccatatgtgtgacgcagtccttcccacttcctttcccccacctccctgccctacagcccctggcaaacacgagcctgttttcagtctttacatatttgcctattttggacatttcatataatcatgtaatacacagcctttgaggttgggcttctttcacttagcataatattttcagtctttatccctgaagtatgtatccatctgtaccatatttctttatatggctgaataattctccattgtatgcatagaccacatttgcttacacatttgtcagttggtggacatttgggtcrtttctacttttggcttttgtgaataacgcagctagggatattgtactggtatctgtctgagtccattttccattcatttgggtatattcttaggartggaattggtgagtgatgagataattctgtgtctaacttaccaaggaacagtggctgcaccattttacwtctcaccaagtaatgtgcaagagttccagtttctccatatcctctccaacacttattttctgagttattttggttttggggtttttttaatagccatcctagtatgtgtgaagtgctatctcatggtagttttgatttgcatttccctaatgactaatgatactgattatcttcatgtgctttttggctattgtgtattttctttgaataagggtctattgaagtcctttgcccattttttaatcaagttgtttgtttttttgcttttgagttgtaggtgttctttatatattctggatactagacctttatcagatatgatttgcaaatattttctcccattttgtagttgtcttttcatttccttgataatgacctttgatgcacaaaagtttttaatttccatgaagtcccatttatctgtcttttattttgttacttgcatttggccattgccaaagccaaggtcataaagatttgcccctgtattttcctctaagatttatattgttctagctcttatatttatgctttttattaatattaattaacaaactgtaatttataagcctctggggtacaaagttatgttttgatacagctatacaatgtgaaatgattaaatcaagctaattaacattgtcatcacctcaccaacttatcattttttgtgatgagacatttgaaatttactcttagttattctgaagtatataacacattattattgactatagttaccctgttgtgcaatagatcttaaaacttactccttttgatgagttcatgtccttcatagcaacatggatgaagctggaaaccatcattctgagaaaactatcacaaggacagaaaaccaaacaccacatgttctcactcataggtgggaactgaacagtgagaacacttggacacggtgggggaacatcacacaccagggcctgtcgtggggtggggggatgggggagggatagcatcaggaaaaatacctaatgtaaatgacaagttaatgggtgcagcaaaccaacacggcacatgtatacatatgtaacaaacctgcaggctgtgcacatgtaccctagaacttaaagtattaaaaaaaaaaaaaaaactcactccttttgtctaattgaaattttgtaccctttgaccaacagctcgtcattccctcactcctccactctcaaccccagcctctggtaaccatcattgtactttctacttctatgagttcaactttttaagattccatatataaatgagatcatgcagcacttgtcttactgtgcccggtttatttcatttagcatagtgtcctcttggtttatccatgttatagcaaaygataggatgtcctttttaaggctgaatagtattccactgtgtgtgtgtgtgtgtgtgtgtgtgtgtgtgtgtgtgtgtgtgtatgtaccacagtttcttcatccactcattcattgatggacacctaggttgatttcctatcatggctattatgaataatgctggagtgaacagaggagtgcagatatcccttcagcatactgatttccactcctttggattatatacccagaagtgagattgctggatcatatgatagttctatttttaattttttggaggaacttccactgttttccatagtagctatactaatttgtattcccatcaacagtgtacaggggttcctttttctctgcattctcaccaatacttgttagctttctttttttttttttaataatagccattctaacagatgtgaggtaatatctcattgtgattttaactggcctttctctgatggttagttgtttgatcattcttcatatacctgttggtcatatgtatatcgtcttttaagaaatgtctattcaggtcctttgttctttttttttaattgagctatgctttcttgatattgtttgtgttccttgtgtattttggatattaacctcttatcagatgtatagcttgcaaatattttctctcactctttaggttgtctcttcactctgttgattgtttcctttgctgtgcagaagctctattgtttgatgtcatcccatttgtctatttttgcttttgctgcctgtgctttcagagttatattcaaaaaattactgtccagaccagtgtcatagacctttcccctatcttcctccagcagttttagtttcaactygtatatataagtctttaattcattttgagttgtttttgtatatggtgtgagataagggtcaagtttcattcttctgcatgtgaatatccagtttgccaccaccatttattaaagatgctgctttttcttcattgtgtgttattagcacctttgttgaaaatcagttgaccataaatgtaygggtttatttctggcagtctagcctgttccgttggtcaatgcatctgtttttatgccagtaccatgccattttatttgcaatagctttataacatattttgaacacagggagtgtgatgccttcagcctttttcttagtgctcaagattgttttggctattgagggtcttttgtggttccatataatcttaaggattatctttttctctttctgtgaaaaatgacattgccattttgatagggattgcattgaatctgtagatcactttgtgtagtatgattattttaacaatagtgttgttttacagttcatgagcatagcatcccatttacttgtattttctgcaattatttcatcagtgttttgtagttttctctatatagtcttttaccccttgattaaatttacacttaagtattttgtgttgttgttgtgcttgtaaatggaattgctttcttaatttcatttttggatagttcattattaatatataaaaacactactcatttctgtatgttgatcttgtatcctgcaaccttactaaatttactagttctaaacagttttttggtggagtctttaggattttctatacatagcattatgtgtaccaacaaacagagataattttgcttttttctttcctatcaggataccttatattaccctcttgcctaatggctctggctgggactttcagttctatgttgaaaagaattggcaagagtgggcatccttgtcttgtttctaaccttagaggaaaagctttcaacttctcaccattgagtatgatgttagctatgggtttgtcatatatcctttattgtgttgagatatattccctctataactaatctgttgagttttatcatgaagaggtgttgattggcttttctgcatctattgagatgatcatatggtttttatatttcattttgttaatgtagtgtttatagatttgtgtatattgaaccatccttgtatcccaggcacaaatcccacatgaccatggtgaatgattctttcaatgtgttgttaagttcagtttgctaatattttgttgaggatttttgtatatatagtcatcagggatattagcctgtaatttttttttcttgtgattccttgtctggctttggtatcagggtaatgctgactttgtaaaatgggtttggaagtatcccttccacttcagtattttggaaaagtttgagaattggtattagttctttaagtgtttggtagaattcagaagagcagccatcaggtcttggccttttctttgatgggagattttttactagagatccaatctccttccttgttattggtcagttgtgataggttgtaagtgtctaggaacttaacatttcttctagattatccaatttgttgccatatgattgtttgtagtaatatctaatgaccctttaygtttctgtggtatctgttatagtgtctcaactttcaattctcactttatttgcgtctctcctttttttcctagtcagtctagctaggagtttgtagatcttatctttggaaaaaaacaacttttagtttcactgatatttttccattgtttttgtagtctctgtttcatttatttctgctctgatcttttttgtttccttccttctgccaactttaggcttagtttgttcttccttttgtagttcctcaaagtgtaacattaggttgtttatttcttctcttttgatatagacatttatttctataagttcccttcttaagattgcttttgctgcaacccataaatttagatatgctgtgtttccattttcatttgtttcaaatatatttrtatctttgatccattttaagttaatttttgtatgtggtgggaagggcccaattccattgtttggcatgtagaaatctagttgtcccagcaccatttgctggagagattattcttttattattgaatggtcttcacatccatgtcaaaaattaagtgaccattgatgtatgggtttatttctggactctcaattatattctcttgatttgtaagtctatgtcagtaccatgctatttttattactgtagtttagtaataagttttgaaataggtatgtgtgagttctatgactttgttcttttttcaacattattttggttattttgggtcccttataattccatgtgaatcttaagatcagcttttctatctttgcaaacaaacaaacaaaaaaaaccattgggattttgataggagttacactgaatctgtaaaacactttgactagtattgctatcttaacagtatcatctttcaatctgtgaacacagggtatttttcaatttatttgggatgtctttaatgttttcagaagtgttttatagtttttttatgtatgagtgtggcacctctttggttaaaattattcccgagtattttattccttttgattataaattggattgttttcttaattttcttatcagattgtacattgctattatatttgtatactactgatttttattggttcacctggtatcctgcaactttactgagtttattaactcccgtaatttgaatatgtgtgtttgtgtatattcttcatcatataagatcatgtcatgtacaaatagagatagttttacttctttctttcatatttggatgtattttatttctttttcttgccaaactgctttggttagaacttcagtaagttygttgaatagaagtgctgaaagttggcatccttgtcttcttcttgaacatggaaagatggctttcagtcttttaccattaagtatgatgttaactttgggtttttttaaattaatgctcttttcatgataaggaatttcccttatatctttagcattttccacaataaaaatatcatgaaagagtactgaattttgtcaggtgctttttctgcatcaattgaaatgatcatgtgatattttttcctacattctattaatgcggtatattatattgcttgatttttatatgttgaaccacccttgcattccagggataaatctcatttggtcatagtatataattttttaaatatactaaacttagtttgctagtattttgttaatttagtattcatatactgaatttagtttgctagaatttagtattttaaagagattctctctttaaaaaaaaaaaaggaaaacatagatctaaattgctttttctgtgccaatctgtactcctcttttcttctcaytatttcagaattaaccaaagtaaatattttgttgtgttttgttcaccttttttactttgtttttgtgaacagatagcttccaaaccatatatagatgatataatattgtaaatggtaaatgttatcctttcttacccatttcaatcttgagcttttccaacattattgttcatgagaaattttagttacaactattcacaatggtctcctttcctccaaagaagagaagggtaaattggaaaaataatgttccttgacatttcaacattggagtgcatggagaaatcagtgcttcctacacctccagtagagtgtttttataagctctggttcctgttttatgacctctaaagctttgtcatatcctttgctgttttaaaagtttcagaaaaggttgttcctaaggatagcaagactctgcaaagaatagttctgtgatcttgttctgtagacatggtgttttccagtagttggttcagtgaaataacagattatttatagaaaccaggtggagtcaatatgatggactgagctaactcagaaaagatccttccaaacacacatacatgttaggtgaaatataaacaaaggcaggctctcaaaacataactaagctcaaaagaaygagaartaaatccagataccaaaaacagaggcatcaaagccagcagggttagaggaggtgaagccaaggaggctgcatgggagtatcagaccatgcaaagggctcagaggcagaggtttcatgggttaatgcagggagagaacagcttagtcccatgtgagatataacagaaccctatgcataaagttgcaaattttgtagggatgccattttagtgaaacagaaactagaaaaatttttctccttagattgacagagaagcaatgagtcatcctgtgtgcccagggaaatagatgaaagaaagaattacccactagaaactggaagcccatgcttatatgagaggtccaatttcaggcttcccaatgctacatgctaatatattaatatacaaattgatgtaacccacagggccctagcagaggcaaaagaaaactcattctgaagaactagagcacacacaggaaatgaaccacaatgaagtagagagtccttctgtactaaggataggaaaattagcttcccactagctggaattgcaaggaaagtctgaaagattctataaaatagtgatgaaagaagatacagatatcaaaaagcaagagaagggtagtatgtaagaacaggtggatttggaagaaaaataaaacatatagacatgaaaagtccagtgatttaaattaaaacatattagaaaattttaaagtagtttagataaagctgaagggagaaggggaatgaaaaacatgggagagattgagggatgtggaagatagaatsagatcaatatggagatactgtagatagaagctccaggagaaggtaaaatagagaacggaggggaggcaggaatctcagtgttttctgtaagtgaagatccacaaacattcaagctgttgtagctttccagacctgagcagctgaacaggatataaaaacaaacctataaccagtcatactaaatattgtcatgaaactacagcccatcaaagacaaagggaattattgtaaaagcaaccagaaggaaaagacagattccctgcaaaaaatggcaaactgagtagccttcagtgctgaagacaagaagagatggaaaaatcagagttgtgtgttctgaagtgtttgcattattgaagaagggggttaaattattttctaacttttgaccttgtcaaatatgaaggctagaaatgtaagggtgaccactgaaataaataataaagtattcctctaaaccaaaaaataaaagcaaaaaacatgataaacaggaagcataaaataaatgacaccatttatgcgtatttttaaatataattggatattaattacccatacatatctatgaagcaacagtatgaaatatagactggaaagctgtttcttttttatggaagggagaagaatggcgagtataaggaatttatatttaagactttattattttattaaaatctgaagtaatcatagttaggcctggtcctgacatttgcaggacttggtataagagtaccagtggagaccttgaaccacacataaatatgtgaaagttacaaatcaagctagcaaagaattctgtcccttcatgatgacaccttcataaagcctggtgcgcttcctgattcctggcttatttgaaggccttagccagagtaaggcagcgtgggaaagagctcactccctggacaccctctccatgcttcagaaccccagctctgccctgcactgagggcatctgcgcacgtgtggtgtggtgaacatcccagcccacacatccaggttctgttcacatccccatgcaaaaagcaccccttggccacccccacagacctggggtgtgcacattggctatatggtctacttttagggggatggagctcaggatggagtcaagttagccttggatggaggcctgggtggtcattgagcagggacttctagggtcccaaataactgaggtggtggatggcaggcctgggccatgggagggtgtacctccttggctgtggacccctcacagtgtgtggaggaagggctgcggcacagagtgggtccctctgaagcaagaagtcacatttttaaataatatctcattataggctgagcacagtggctcatgcctgtaatgccagcactttyggaggctgaagtgggcggatcacctgaggtcaggagttcaagaccagtctggccaacayggcaaaaccccatcgctactaaaaatacaaaaattagccaggcctggtggcaagtgcctgtaatcccagctactcaggaggctgaggcaggagaatcgcttgaacctagtaggcagaggctgcagtgagccgagattgcgccactgcactccagcctgggcaacaagcaagactctgtctcaaaaacaaaaagaaaaaaattaattataaaaaaagaagacagagaaaagcattcaccactctaggcggcatctaggcggcgtctgccagcacaggagccctgccagcaaagccccatctgacctttgtcaagttatttgacacagctgagtctgttttctcacctgcctggtgagaggccaacatgtataatttcaatgatccctcccatttctgaggatctgtgacattctcataagccccatcatgaggaggagcttctgggatggccagggtggttcaggaggcatgtccctgtggtccaggggcatgggggcagagcctagtcctgcatggtctccagcttctgagaaaataatgtgtcagttgcccattatgtccccatgtggggcctggctggtgaggctaccctggggccaggcagggtgaggggccccctctgcacacagtgccctttattttgtgcaggagtcatggccagtgctgggcacgtgttggacagggaggacaggcccttctttatacctgccacattctgaaaccaggcagcacagggagctgtggacagtcggtgatggcagctacacagagggacaggtgccacgggctcactcctcctgtgtttgcacaaccatgccttccagggcaattgctcagccagacccggtgagattaatttggcccatggaagaaagaggagacgggagggaggaccagtgtgaaaggatggagaaagtatttttcttcctcagccatgagacgttttgccaagcttagctagctgaggctcacccttaattgggaatgaattaaacattgttatttcaaccaaggcactcagaaatgccctctcctggaaattcaaaatgaacttcagctcaaagaactgtgaagaagagccagggccccactcctctttcratggccctgagggagctaggtgggtctgcagtcatgggaggggcctcctcaggctccaggctcactgatcgatcgggggcagggtacatgggattcaagcacctgcagcttcttctacaactccgtatcccctcacgttcccacaaacgtaaggggggtctgtatttgtctgcctgggctgccgcaataaagtgccataggctgtgtggcttaaacagcagaaattgagtttgtcacagtctggaggctggaagtccatactcgagctacytacagattggtttctcatgcgagcactcyccttggcttacaggtggctgtgtgctctgtggtcttccctccgtgtatgcctgtgtcctcatctcctcttcttattaggacagcagccatgctggattagggcccaccctgatgacctcatttcaccttaattaccactttaaaggccctgtttccaaatacagtcccattctgaggtactaggggtaaagacttcaacatgtgaatttagaggggacaccattcagcccataatctattatgcctctaggtcactggcaaactcctgtaatgacaagcgaaatgagagcctgatagtaaaaatcaaagcactttgacctgcctgggcagttttcaagcagtccctttgggcttatagaaataaacagactgggcatggtggctcacacctgtaatcctagcactttgggaggccgaggcaggaggatcacttgaagccaggagtttgagaccagcttgggcagcaaagcaaggccctgtctctgcaaaaaatgtttaaaattagccaggtgtggtgatgcacacctggggtcccagctactcaggaggctgaggtgggagagttgcttgagcccaggagttcgaggctgcagtgagctatgattgtgccactgcactccagtctggacgacagtgagaccccatctttttaaaaaaataaaatagtatagaaatagccaagctccagaacagttccacatgtcttcacagcagtggcaaccttgaagggaataggttcaggaaaggcagggactgctccttagccgtctgttttagaagaaaactcgccttgatgttcattggggttcaaaataatcaagttctgcagaacgaagctgggctgtggctggggtcctgaggcctccgcggggctctcaccccgtgcaggcagggggctgcaggcaggagtgaggcgcggagatgtttacccggaaacaggcctctccttggagaagtgtcctgaaaagcccacggtcccgcgggtatggaccgggcacatgcacacttcagcgagcaggaagcgctggctaagggagggactggaaacggcgttttccacaacagggagccagcattgaggcgcccagatggcatctgctggaaatcacgggccgctggtgaagcaccacgccttacccgacgtggggaggtgatcccccacctcatcccacccccttctgtctgtctccttgtgcaacccgagtgttcaggtgacaagagactgacgcgcttgctttatccgcaggctgaacgagcgcgaccgcctgatcaagaggctgggccggaagacgcccccgacgctgttccggggcagctccctgcagcagggcgtcccgcgtgagtaccgcgggygggggctgatggaggagtgggtgtcggtgcggggcgggggttgatgaggagttgggggagcgggcgctgatggggggccgggtgagtgctgacggggggtgggggcggggcgtgcgtttggaagtggaactgcaaaatgtgtatttggccccaggaacgtgcagcttgagtgtaggcaattccctgggaccacaaaatccgtaaacttaaaatcctggtgtggttatgatccttccgtcagcctcccaagaggagttttttaaggttgaagcagtatgacytttaaactgttgcccctaaagatagcaatatgaactgttttgtgtagtgttgccatattgattgaaacaatgaccatcattggggaaaaacatcatgcttctcccaggaaggctgccccacgtctaagcctggcgtccccctgccacccccgcccccacctccagattccagaggagagtgggaggctgtgaaacatcccctctccactgcccccgactttggagctcagggggagctcatgggcttgtttttagcaatccagtcatcagatcccagctgaggcagatccaggccaccttccccagggccaaggccaacccagccctgcctctctgtgtcctgcggccttccccagccccctctccacccccatcacgtgcacacgccagcttttcctcccatacttactccctgcctccctttcccttccggaggagtttagagggaaacgactggtagaaagagatgagttgggccggacgcggtggctcacgcctgtaatcctagaactttcggaggctgaggtgagtggatcacttgaggtcaggggttggagaccagcctgaccgacatggtgaaacctcgtctctactaaaaatacaaaattagctgggcgtgacggcacatgcctgtaatcccagctacttgggaggctgaggcaggagaatcacttgaacctaggaagcggaggttgcagcgagccgaggtcatgccattgcactccagcctgggcaacaagagcgaaacttggtctcaaaaaaaaaaaagaaagaaagaaagaaagagacagatttatgaacgtgaagaatcattgttcacacagtacaggcagtgaaggatctgtgttctgttgagctctgcctgtcaacaggtatttgcagactttctcaatggagagagaaggagggagacagagtatcattgcttttcagtaatctaccccctgtcctcactttcccatgtggaatatcgtatgggaagaaggggactgacatgcttctgtcctttaatgctccactgccctgggaggtgggtaatgccaccccaaggacacaaagcagaggctcaggtcagaaagtgggtggcccagcattgctcagtggcatgccatgaggtctggattgcagcctcagactctggcccaaaagagaggtaagtcaagaagtttgatgggacaggagtgctaactgtagggcagccctctggagatgggctgcctgggttcctgtccctgctcccctgctttttcgtgaccttgggcatgttacttaatgtctgcttctgcatctgtaaagttgggtaatatgagaacttactggatgccagaggttcagtgtaggtcctgccacccacagctgcacagaaagccaatcactgaaacaacaattatagccaaggaagaaggctttatctggtgctatagccaaggaggtggcagattagtcttaaatccatatccttgactgactaaaattaggggtttatatagcagggaagaaatgttaacaatgtgtaagaaaacaggaatcagtaggggtaaggaagcaatcaagatgaatgaggggcttagcatctcgttgtctggatgagatcattgggtgagtttcagatctttgctacttttcgagaggcctgtgggtccctacctaaggaaggaactcagataaaacaaatacaaatgtcaagctttaagaccagaagggtcatttctatgttaaaaaaacaaaaaaacaaaaacaaaactgtctatgggactattgggttggtttcaattaggaggattaaatgagatcataaagataaagtgtctatataggcaatatagggtccaataaatgttgggtattattattctgccattagctgaataattttgggaaacttaatttctctaaatttttattttctcctgtggagaaaaaagaattttaatgatatacatcttacacagtcctgtgagtcttcatgacagcatgtgtaaagcaccttctgtatgccagacacagagaaaacacatacaggttcccagaactctacagggtctgttctgttgagccgtgttgcctctctgatgaatgtttcaaaataaccatagacagaatatacacgatatatatgttgtgatcaaagaccgaatgagaatttttatgggagagtcataaatgtcttaaagacaactactaaatgcttttcttaagtcaatattttgaaggccaaaaaaaaatctactgaataaatataagaaataagaaggcttctgaaatcacaccacattttttaaacattcagtgactagtaccagaacctgatggataacttaggacgtttctgtcactaacagccagagaagatcgtcgggtggtcagagctggtcctggggtgcaggatgggcatatagcaggtctcagcctttgatgttccgcctgggtctgtccaggaaactagcaggaaaaactctaatcttggtagtattttagttcctgtgagccaccaacatacaatatttgtaatcagcatttcctacacagtctgatttcctctttgtccccatggtcttctcatttctatggctattaggaatctttccagacaggaaactgctattttcattaagatgctatcagagcacagattcaaaggaatgctacttaaggggagttttattccaaaataatgaaaaaaaaagacataattttatggatttcaccaaatgttctacccggagaagacaaaacaactaagaaatccgtctttcctcccacctcctttcacctacacgattctgttctccattctggctgtggctgtttaagaaagcagatgctttaggaagccagccagggaaagttcagttagttgggtccatgagagctccctccaggcccccatcaggacttttctggctgttaggacttcctgaaacatgagtgaaagtagggagtgcaaagagctggaggcttcctccgagctccccgtttggatgcaaatgacagttaaaggttcattaggcagagctggggagcaggtctgtatcttcatccggtgggacagaggctgggcaggcaggactggttgaggggtgatggtgtctggttttccagtaaaactcctcccatgacagctctaactcccgccaggcctggtttctaagaggaaaatgtttaatctgaaattttatctgaacatgggaggactccctctcccaagataaacctatcaggccattctcctttcactcttgaattgtagagtccactttcattctcggttaaggttaagaaagtcttagcgtacaacacgctggaaatgtggtggtaggtgcagccaatgggaactagggaggatggtgggagacatttagcacagacctcacgttgctctacttaccctgggaggtttacaacaggaggggcaactcttctctgcctgtctcttcaaagggaaacctcgaaacccttcccatcccagaggggccaaatcatcccgctgcaatcccatgggaggcccttgtggccatggcactaatgcacacagaagaagtgacagagttatgagctgaagaaacccccggagttgggtttccagtagacacaggcatgttatggaaaacaagataaataaaagaaaaggcttttgcaccttccatttgaacagggagtagactattccaaaggctaagatacctttcccgaaaggacactccctaatttatttttatgtctccatgagttccccccaaccaggagaaaaaagcaggccaaaagaggtataataggtagttaattattctttttggatggactgttgacaccgaccctttcttttctgacgtggatgcagaggcctccgtgttggtgcagtgtgaactagcactgacagagggagagaatcctgcagcctgggtgtgacgggccatgaacatgtcctggagcccatagagaggactggaggttgagagaacttgggccttgcctggtccaggccatttaatttacagaaaagtacatcaagacccagggagcttaaagakcccaaagtcacatggacaagtagcagcaagcaaggactagaaccaccctttgtttcctggccaccacccygaccccatgctgcagccacttggggccaccagaatctaagatgaaaacaagcragtggagaaagacatcttcagggtggagagctcagtagtcctcagcttcccaccggaagagtttataaaagagtatgtcccattctttggggtgactgttctttactcagaaccacttctgtaggactgaggagcagccccgggagtggtgcagcagctgtggagccagtgacgaccctgccattgcagctgctgttctgccaggccccctcaggatgacttcagatgtggactagaaacgttccttgttaaagaactggagaatggaaattgtccaagttgaccacagtacatagccttgttactggagcagacgaagcagtgttatttgctagattttgctttgaaacatcccaaggaaagacgtctcctcttggactgcagtaaaaatgcttcataaagggcagcttgtacaggattggggatgagagtgtgtgtgccacacggtgccagagggaggcaggaggctggggcagctcctccaaagctgggcaacggaggtttccttgtccctgctgctaatctctgattaagcaacttggtgaaaatccaaaagctcttaggagaacaggagtggtggcatttgctcttcggtgcttgraagcagatcatgtgaaaactctaaagccctgagaatcaaagcacagccacctacctrgtcaggaagttcaagtgcactaggtgtgggcccaaggctggcacaagcatatccgcccccaagggagctcccctccaggctgatgctgccttcaggctcagacacccacctgctcctgtacccagctgtctgagggctcacaatggtctgggagctgcttcactgtggctaccatgtggtgggaatttttggtttgtaggttttgttttgctagaaatggaggtgagcaagtagacaaaagccccctgtggaagattcctctctgttctgttctcttctgttctgttcaccctggctcagcttgtatcaccttctctcccgcccactgtctcttcctcctgtggcctcactggtctgggccctcctccctgctgctcagcccatgtcctcagtcaactctcaggccacctctgcagacaagcccttgcctcccccgataacccccctgagcctttgggattctcaggcagtggccagaaggcatgctctctggaagagccrggaagccagcccaggaccgggactctcagttatgggaacacacagagtaagaaaacagcctgagtgtcttcttttaaagtctcctcctcttctccatcccacgaggactcttctgtcttgttactgtatgtcttgatactctagaaatttcctttttaagccagatgcctcaggaaattaacaggcagtccaggaactgattcatgggcacccttttcgacttcttttctccttttaaagagtatgacagtgaactcacagctcccctgataagttgtacgcatgcatggatggaattcaagattrtcaggtttttttattgtgttgtcttttggccagaatgtctaattgagctgtgggacttttccagacccctgacacagaagggttagccaatggagagcaggccttataaatgtctttctgtgggaagggccagttggaagaaaagccccactctgggcttgtgaacactaaagctggttctcagctctagagtgtggaccctgggtttgcttcccaactctgccactcacgaggtctgtgaccttgggcaggtcacaaaaatctctgtgcctcagttttctcatctgtgaagtgggaggagtataatcccctatctcatagggtttctgggaggattaaatgagctttattttatagcacagtgtcttagacacatggcatttaatgagtcttggctattatttattttattaatagtatatgarctgattgtgtaagaatagtctttgtatggccacaggtccaatcaatcactaaattccttttgagtttattgtgtaacctttttctttacatggaaacaaccctactttgattacttattaccagtccagatcagtctgatttaaaaacagggctgggtgtggtggctcaggcctgtaatcccagcactttgggaggccaaggtggacagattgcttgaggtcaggagtttgagaccagcctggccaacatggtgaaaccccgtctctactaaaaatacaaaaaaaaatagctgggcgtggtggtgcatgcctgtagccctagctactcaagaggctgaagcaggagaattgcttgaaccctggaggcagaagttgcagtgagctgggatcgcgccactgcactccagcctaggcggcagagcaagactctgtctcaaataaataaacaggaaggctccaggtatcacgtgcattttgccagcttgcactattagtgttgtgtgtgtgtttccctggcatgtttacagcttcataaattagctggctgccctacagcatcaggcagacaggagtgttttttcttaattggcagtgggaaagtggagtcggggaccagtgacccactgtgtgtgattcccacactgagctcagccgcagccccctagaaataggaaacctaccctcagaggctttcccttcccagcatcagcagctagaaccatgggaccccagttagcctgcacacggccgccacggcccctctatggycacaggtttcttcatctcaagcctccacctatccaaggctaaggaggccagatgtcgcactcacccgcacgctgccaaaaaaaagcagcttattttaaacctagtgtgctcccccaattctcctgttaaccagtttctcctgtgtgcttcactttcagatgggtatgctttttctcaagaagaacacggagctgttagtcaggaagaagtcatccgtgcttatgacaccaccaaaaagaaatccaggaagaaataagacaygaattttcctgactgatcttaggaaagagattcagtttgttgcacccagtgttaacacatctttgtcagagaagactggcgtcagcagccaaaacaccaggaaacacatttctgtggccttagccaagcagtttgttagttacatattccctcgcaaacctggagtgcagaccacaggggaagctatctttgccctcccaactcgtctgcagtgcttagcctaacttttgtttatgtcgttatgaagcattcaactgtgctctgtgaggtgtgaaattaaaaacattatgtttcaccaatatttaaacatcagtactagttgtcctgggagaaagggaaaggagttttatgttgcgtgagaggcccatcctgtgtaattggagcagggcacacttgcttcctgttgagttaactcagaggttaagtccaacgggccacatgcagacttcactgtaggcaggttgctctcctgctttgattcctgttttgtgtgtaaaattggcataaacttcttgattgcagtgaaatcacaaaattctmtatcggggtggtcaacctgagaacatttattkgaacctcttagccacatttccagcagggcaaaccaactgatgccctggaagagtcttccgcaccctctccaggtgcactcggcccagtcctgccgccgtgtccaggcgcccctcacccccacacctgctgcatggctggccacaccactcagtgcatggcggccgatgggcmgccaacccaaacccgcgcctttccttgttccactgcagactcagatacagatgcgaaaaattccttcttccaccgcccttctcgttctgtaaagaaagaaaagaaacatagcctttctgcatatattctaaacgtctctctgcctctgtctgacatggggccaccccacaggtcagagtggtggtagaaccccttcaggactcccagccgtggtcaggctctgaatactcccttcccaacatccagactgctgggcctttggcatccacttacattagaacccacgtttgtttcagagcacattttggactttcactgttgggaaatgaatgaatttataacatgcctgcacagcgaaggaacacacctgtcgctcttagctctagagtcagaggatgagtaaacccagatgcaagagtataggacattgagtggggagaacaagacgaccacagaagtcctcagaaggagaaggaaggacacggagacactgagaggaggacacagaggaatcgccaccagatctttgcagtagaaactctgaaatargccttgagacccagacaattgtcatgatcagcccagtgtgtatgagagcttaaacaagaccttcacacacagttctaattgaaaagaattccaaacatttcagggaaacacctttttaaaaaatatactgacatggtttcctttctgtatcccatcagtgttagacacaggtacctatcagaatacggcatatcctgaattatctaagacaaggaagtgaagagcrgaatcactgactttcccaactgcagagtcccacacttaaatctcaacagaacctagatgtcttcaggcatgaatgtgagcacctggagcccttactaaacaacctgcctggagccctgttctctgctctggttgccaaaccagatttttggatggcctaaatacttgtgrgcaactgttactggtgaaaaatgggagtggagagcatgttttggattttcactgtggggaaatgaatgaatttatcacatgactgtgcagcgaaggagcacacctgtcactcttagctctagagtcggaggatgagtcaaccctgtaggaatgattgtgctaaattaggaaataacactttagtgcactttgcttcctaacccttttttgtcagaaatctacaacctactgggcatggaaatgatttaaaatatgatctgcattgactaagaaaactcatcctcacttatgaggtgaccaggatgcagagagggcctgaggggcagcagaacaatgcaattcacaggtgaggctccaaaaagggccatttctttctccccaaggtgcatagaacatttttaaatatcagagtacccagcaagacggaaggactgtcatgcaggaactctaacacaaaatgtgcctatgactaacacgacaaaccaaggtgtatggtttctttgcacacccagaaaggtgatggccaagatacagaggagaaacgaaaactggaattgaatgtgcattaggcatcttaactattcatattttgtytcatttgggaactaagcctatttggaaagagtggattagaaattgaattctttgtcaaacagttagctctgtcttgaacttgaagccttccaaatcagaattatgtatttaagtgtgtgtttgtgtttgtttggggtttttgtttcttacrttagagttcatattttctgggatttaaggatacaggtgtattttcctattctcttgagaagtagactaaacaatatttgcagtgatgacagacgcacacagaagaaaacattagaagagatgcctttctatcctctcatgtggttgagcattcttacagccaaatgactaaattggctgtaaattggtttctaggaggagcagctgtcactacgtgtgatgtataatatttagccagggccaactcaggggctgtgtcatttgtcctatctttaaattgaggtcagagtgtcacacacaacccctcccctggggcagggtggactggactaggttgcatacgctggctgtcagctcagcaaaaatgccacatggggcttgtcactccrccagacactcactgactcacgggctggcaggtcacgctcggttagcgctccagggcctgactctggattgagctaaactggcagaatccactcaggccaacccttggtctactgctgtgtacagacagcccagtcctgtgttgagtctctcttctcctggatgaccctgcaaaaggaagagascagttgtactgtgggcttagttctgggtttccactgcacactgacacgtgccagcaagggtagctgtggaaaacacgtatcaggagagcagagtagtctggatgaatactctgtgctgatcagaacgggctcggtcataatttaggagtggagctgatgtgtctgtcctgcctcaatgcagaatattccaggcttcttgaccagggttatgttcacccatctcccaacacacacatgcacacatgaaaacaaaaacatggtaactcttttggttcggcacaccatacaaaacgtgctttggggcgaggagtgctgtttcttttaacacttgtagaggaatatcctgagaagtgaacctgggctttgggagagctcagctgagaattctgttgacattttctttcccttgacaaggcttcaggttcgtctcactatagggagctggctgtgaaaatcagtaataacttgtcaagaagcagtgaaaaatgcgggggggtggaaagagtctaggtaactaatgtcttataatgcatatgtatgtaaatattacaggatttaaggttgaattttttaaaaagaaagttatagtctgtaatttccatttgttataataatgacctttaatcttgtcatttggaaccataaagcatttttatcaggtacctctgttccaagggatttatgtcttagaccatagctgaattgaatgtttgcaaaacactgctataggataaggtggtctttagttttgaacgtgtgaaaggactgcacacttttcagccagggtttgagttactgcccagggtcatcgtctcaaagtaattcaaggagtgatttaacatcagcatttgaaatgtagtcttcatctcctgggatccataaaaaaatgtgaacagggaaatggtggctaagcagagcctgaaataataacttggcaaagaaatgagtttatcaggtcgagtcaaaacatggcatcccctgttacactcaagaaatgctttcttcatgtaaatgtttatacgggcatatataatcacaatgggaacagttaaaaccccctcccttcaaaaaaagaaaatctatatcagttgggtttggttttggttcttcattggctcaaggcagttaactgtctcagtatagcctttggggagatttaacctcattctagccatttttccatcctgaaggccaagaaggactattagaagggtttttgaggggtttcggaggtgagggcccaagacccccataatgacatcattaggtattcttgaaaggtgttaacagaccagcacgctcgatgtgttgtacccttcatttatttttttttctcagcatcccaagttgtccatcagtacattccccttcaccttacctgatcttcatttaatgcccagtctgtaactaatgttctgtttaaagctctcttaatttgttggctatgagtgatttgtgaatctgggatgtaaccctgagtgaggagaaaagggcattgagccagcataaatctgaatgggcagaagccacaaacaaatgggagcagaaaagaagggcgagctcccccgcgccgcaccccgtgtataatccagtgttaacctctgaggaacacctcggctctcccaactgaggagagacaaaagagggattctttttacacccaggctggcgcattttcaagtgacaatctcgggctctagttgcctttgagatatccactctgctctttctcccaggcctcagaccaagaaaaacatgctctcaagattagcccataggcagttcttgtgacctggctgaagaaagaaaggagacctgtttgttttaaaagtcgggcgcaaagtgtcaggtggctttgatttatgacagaaagaggaagaagaaagttggagtaatagcactatccaaataaccctgcccaggaaacttgggggtcaagagagcttatcaagagccttttataggtaagctcttccgtgtgaaagagaaaaggccggaaagagggagagagcccagagagcaggctgcgaactcacttccaatgggattggagtctgttgtattcttaagagatagcctgatatgtggtttataggtgaatcaataaacaccaacaacaacaaaaaaaaaaaaaaaaaaaaaggaagaaaagmaaaaaaggaaaccagccctgtcatggaatttctctccttccctgcacagtaaagacttttgggttttcatggataaaatcaatgtcagtactgaaactcctactctcccctcccgccccactctcccccgttgcccgagatggccaagttcaggcctgtgcaatgccgcttccctctgagcctccctctcaagggccacgcaggcagctgcagcagggccagctgcaggatggggctgccggtcactgaattgtcgttcaaatgcatcatctttgtggcgtctttctcatgcgagcaaagccacgtgctctcctgtctgctgtcacatctgtgcctggattgcttaaatattgtttgtgatggggaggttttaatctggtgatgcagagggaagcagggctgtgggggcacrtttaattggctcccagcagcgtggggrgtgcttctatggtgtgtggggttttttgttgcctccctctagaagtgttaccgttttcacgtcctattaatgtcctctggttgttaaattacagcagcacattacagtgcactgggttccctcctggagtgaatacaaacggagggcatctacttgtatttttagaagttttgggagaatttagtgatttgtggctttgatcaatcctgttgactggtgtatgtctgcgcaaacctgtttcaaataaatcttttgttaaagtaagtgattggactgttttattttggaattttcttttccactaatcagcatttactgccacagggactgcggcctgtaacacaggggtttgtcagcatgtgcaggctcaaggacacatacactgcctggagagccgaggcccaggcaacagtgttcactggcaggagcgcaggagagtctgagttccagatgaacacatgttccttgctctgaggcaaggccccattttctagaagagagtccagggggccacacagagtttggattcagtcactcaaaggaaagaatggtgcttacaagacctccttcctccattacttccctccctctagttcatctcatttggctacaaactgaggaggcagctcaaattcaattggaaagcaggaagtcatgacattgttactttaaaaagaggaaagacacccctgccctttctctctaggtacaaggagttgcattcaggtaagcatccattgcctccaggttctctgtgatgcctcagccaaggcagactcctcgcacccggggtaaggtgggaggaagctggcgggcccagatgttggccccttgcctggctttgtttgggtagctctctacttccccagcagggtgtgacctggggatgaaagacagcctgttagatgacagttctctggtgaggcttgagcctggatcccaaaagacttcttaattgcactctgaatttattgcaattttccatagcggactttgattcctcccagatggtccagttcctatcagacctggatttgaccagcccaaggcagtcctgacctcagtgactgtgtctcaggcatggcaaggacacgggaggcctcacttgcaggcagagagttctacagtttagagctcaccagggaagggctttcatctcctgctctacattggccaggccttttcttccccaatggtgagaaaataaaaatgatttaatacaatcaacagcgaagtgttaaattccaacctttgccatttcttgttcatatctttacaaaatctgcctttgccgctgcaatggttttcttgaaatgtcattcttcactgatgctcagcagaataaactcgaaccattgagaggctcttattagctgaaaacagtgtgcagaccctaacctctctgcctaaagcagtgttctttgtaatgatgtcctccggaaaagtctcaggatactctgaaaaatcattcagcttctgctactattttcaaaatgtttattatggaagagacatatgtaatgtgaggggttaaagtgtatagcaaacttgtccaacctgcagccaaggacagctttgaatgcagtccaacacaaattcataaactttgttaaaatattacgaatttttttttttacacggagtttcactcttgtcgcccaggctggagtgcagtggcacgatcttggctcactgcaacctctgcctctcgggttcaagtgattctcctgcctcagcctcccgagtagctgggattacaggcgcccgccaccacacctggctaattttttgtattttagtaaagacaggatttcaccatgttggccaggctggtcttgaactcctggcctcaagtaatccaaccacctcagcctcccaaagtgctgggattacaggcgcgagccaccacacctggccagtgttactgtatttgatgtgtagcccacgacaattcttccagtgtggcccagggaagccagaagatcagacacccctggatgtatggcagagcaacagggcatgtgacgtggggctcctctgcctctgatatcttccacctcattttgtcccacacgtgagtcttttgagggaactctccagtgctggttggaatgccaaggagataatgttaactggggctatagatgaggctctggaacttgattaccagagggggacaaaaataaaacccttccacctactaaagctacaagcaccaagcacatccagtccagctcaaaagcattaagctttcatttattaaaagtaggccatgcacgtaaataagatgatttaaaattctaaaattcttgagggttggtctcaaagctccatcttcaatcttcagctgtttgtctctctctacaatgaactgttgttgacttaagattccagagcaatggatatttgaagaaagggtgcgcaggtaatcgttaaagcaacagcgttgacctgaaccttggatttgaattgtctgccccaggagtttctatatcactgtcactagatagttgtcaaaatttaatgctacaggtactctctcctctactctaaaaaaatgggttttgatttgaaatattctaaattgctgagaaacccttcctgattttccccccaatttttgttgttgttgttgagatggagtctcactctgtcacccaggctggagtgcagtggcgccatctctgcttactgcagcctctgcctcttgagttcaagtgattctcctgcctcagcctcctgagtagctgggactacaggcaccaccactgcccccagctaatttttgtatatttagtagagacggggtttcaccatgttggccaggctggtctctaacttctgacctcgtgatctgcccgcctcggcctcccaaactgctgggattatagggatgagccaccgcacccgaccttcccccaacttttaaaactgtggtgtatgattaaaagctcttatgcctggcagggcgcagtggctgacacctgtaatcccagcactttgggaggtcaaggcaggcagatcacaaggtcaggagtttgagaccagcctggccaatatggtgaaaccccgtctctactaaaaatacaaaaattagcctggtgtggtggcacatacttgtagtcccagctactcaggaggctgaggcagaagaatcgcttgaacccaggaggtggaggttgcagtgagctgagatcgcgccactgcactccagcctaagcgacagagcaagattccgtctcaaaaaaaaaaaaagcggggtgggggaggctcttacgccaacctaacacatcttgccctgtagctgggaggccagatggttgttgcttgtcgttgttgcttcccgagtggccttgaatggagggtatgactagctgttaggagctgaaagagaacagcccagtagccacaaacaaagctgttaagctcactttttttcccttcccagtgtccttaagaggagctgcctgcaaattactcacaaagatggctgcaggaaaagcccttgaatttgtttcagtattacatataaattgcatgtggttgcagagaatgagattgggaggcccttattcaagaaactgcctccaagcaatgtttttaatactttagctggaaaatgtcttcattcaatctcacttcccgatttatatgatgaaaaacccccctgtaatgcacagcagagagctaagggatgctccacagaagcacctgtccttgtgagtgagggaaaactattcagacagacaggatgcttttgcatttgtgtgcatgagtacacacatgcatacgtacctagtagttctatgggaaaaaatgaagtaaacaactgtacagaaatgcaaaagaaaaaaattcacttttaactttgagaatttggcaaagcagctccaaaagtgccacggcaggtatgtaagggcttaacccaagtcttgttttaggagacaagagataacccattctctggaaactgtgtgtgctaaagggaaaatgctctgggccttttcagtcccagctgaacagccagctggatgtttgtctgagaaccagggggctttcttctaaaattgctgaggctcctgttcccaaggagaggcctcaactggtgggcagaggcaggggagcagggggccttgcagttagaacatgggaagccggacttgctagcgatctggaatctcaccatccgagggagcttcagctttggggcctctgccatgctcttacgtgctgctcttgtgaatacaagctgacttccagacactggagaggtagtggccaaccaaccaaagtccctttcctcatggagcttacattctagtgggagagacagacagtaaaggaaaatgtaatgtgatatcatgtcctacagtgtaggtggtaatgtaagcacagggctagattctgtggctcccagtggagagtttagtcttaacaaatgccatcatctttttcttttcaaaagaacctcttaaaactctgacttgacttgtacctgttggccacacacataagtgcctgagagggagagcagtatagtatgtcctctgttctttcccacctaatggcaatctctctgctcaccaaagagaacatctgcctcagccagatcccagggtctattaatgtctcaagcttatcctcctcacttaaactctgctgctgactcttccttctcctccctcatgccttaaatccttcctacccttggaggctttgttctcatcaacctcctccatgaacccgtctcaaacaacagtgctcccttctctcctgacagatagcttttcctgcagtatctgggcacccagtcttgtagttttttctattatgcatcttacatgtgtcagccttatatctccaagaagattataaactttcccacaaggacctgtttccacaagcacatgatgtcgtttgtgtagcaagatgaacattggacttggaattggaatgcttgtgttcaagtatttatttgcccagttattagcctcatgaccttaaagaaatcatttcacttctctgcacttcattttcctcacctacaggactgggacgctaccttcctacctcctcacgtgatatataaacagggctgacctgctgcatctacactgcctggtactattactgtttgatcaatagccatttctcttgtcagttaagtagttggggcacccaccactacctccggaccttcccacagtccagcaatgaagaggtaatgctggccatgggggcctccttaccatataacactcttactctaggtcctgttgctgtccacacaggaagctagtcgctgagacaagtactgccagggagggctgcagcgaggagaatgggagatgagtctcaaatccatttcctctataactgaaatggaggaaattagcaaggaagaaatataactacgtgtgggaaaacaggaattagggagaggtaaggaaggggagctggtcaacacgtggtcttaggcaatcatgacagtgagcggtctcacatctcattgtccagatgcagtgatctgataaatttcagttccttgctcctgtctgggagaactgatggtcagtttcctgagaaaggaactcagatacgacaaatataagtttctcagatgttaagacttaggggatccatttctatgtttattcaaaagaaacataaacttcgttctgtggagaaattaggccagttttagcatgatggtccttgtccattatgactggtcagtgcctactgtcctccagattgaaaagtgcttttttttgagacagagttttgctcttgttgccctggccggagtgyaatgatgcaatctcggctcactacaacctccacctcccaggttcaagtgattctcctgcctcatcctcccaagtagctgggattacaggygccaaccaccacacgtgactattttttattagaaacggggttttgccatgttggccaggctggtctcgaactcctgagctcgggtgatccacccaccttggcctcccaaagtgctgggattacaggcttgagccactgcacccagcctgaaaagtgtttttataataacatccctgattgtgacttgtccggagtttgtttgttccagcgggtttgtgatctcgctgacttcaagaatgaagctgcggaccttcgcggtgagtgttacagcccttaaagatggcacggacccaaagagtgagcagtagcaaggtttattgtgaagtgcaaaagaacaaagcttccacagcgtagaaggggacctgagcgggttgctgctgctggctggggcagcctgcttttattcccttattggcccctttcatgttccatttcttccctatcagagtgcccttttttcaatt

SEQ ID NO: 95410 - DNA, 60054 bp, Homo sapiens
  misc_feature (1)...(60054): n = A,T,C or G
cggaagagagcgctctggcccaggcatcgcagctgcgggacagccgggagcggagcagggggcagccgcggaaaggaaaatgtgtttagaggtaaggaaaggaaatgctccaagggataaagagacatttataacttcaatcatttttaagttgacgttacctgtagtcagtgtttctaagaaacatacactgatagagagcgatcacccatatgacagaacattgctctttaatgctgccatttgggaaaagaaaggaggggaggagaggaatgtacacttttttgcttttattcgcaaacaatgtttggcagtttggggtcagagagagccatattctgtatttcttacacatttgatcctttgcagggcttgtataaatttttcatcattgaagaaaaaaactagcttaataaaaagaaaatgacaggtgaaaggtaaaaactgttcatatattttgctatgaagagaagcaaaaaaaaaaaaaaaaaaaaaaaggagtatgtctggatgctgatggtaaccatactttagagaaggacgggtgcaggttgggttcctgaggaaatgtacaggaagcatataaaccaatgcatacagcacctgcacctgtagaaggaaggaggaggaagcaggtgtgggcagggggagaaggtcagctgtggtggaacccaacaccmtttgcccgcctcacaagaagctctggagattgaacagcccttcagagatgtctgaagttgggctgggaagagcaaacctttagcttctacatcagtcactggccgggggtcacctgcgaagcagcatacgtacccttcagcctagatgctttccgcaatcgtggagaggcggactgcaggaggctgtgctgacagcacgccagcagctggggcagcaagtccttcactgatgcagtgctggtggcccatcagtgtctgccacagggagatggctcagggatgaggagatggcaaaggctgagaagcgaaacactactggggttcactgtgctggaactagcctgcagcttcctccactataacaagggtggagtgccaactggtgtggaggtttggtggtggaagggatagatcatcccctgtcagcatctacatgctcaaagaaactttgagaaatgttatctcttgcaggagagaaggctaagaaatgtttgtctcagagactgggaaagcgggtcttctggggacacttaggagagttgcagggcacgtttatatgcttatagaagtgggaaaattaaaggaggacgagtcatctctatcacattttcctccatcaactcagtggctcaggctaggaaacttgaaggcagaattgtcctggaggatttccaatgctagaagcatcatgaaggaagagaggggctggaggtatttgtaggagaagaggacaaatggaggaccacagatggctggtggtactgaggctcagaaatgttgtacagcttgagcagattcggaaaagcaatgcagctctggtgtatcatatgccagggtcctggcatgacaccctccactaggtaaatagaggagcatgggacttacaaaggagctggaggagaagaggacacccaggaacggcgtagtgccttggctctggtaagtgggagctgtccttgccatcctaggcctgaagcgggaggagagcaatcataagagaaccaagggactgtcaggctgtgcggagaggacttccgaacaggggcctggacttccaggtgggggaagcagccagcccttcaggagccagccaggagacagcgtgcggaataggggcctctccctcagactccccatccttcgattccctgtccctttctctaggagacaagggaggctccggagcaggatgccgcgtggaagaatttggaatcagcgcacacccctactcctcatgacacaagtcatcaaaccaaccagggcgtcaaaatcttatttataagctaagagcatccatccttctgtagtttgcagagggctcctcatacatggcagcgcttcctgtgacaatcccagagggtccaactggaactggaaagtgcaccattcccaaggagcagtgggagctcgctctgggaagagtttcttccctctccgcggagccttccagccactcttacaaggaatttctcatccctgcagtcggcttggccagcagcagccgcggggctgcgccagtgcccgcctctggccaggggttcccgcgcctcgagcagcgccctgggcccttctacgggaagaggggatcgcggcgcccgcgacacccaggagctcggacgaccgcagcctcaccactaacccccaacaaaggtacagcgggagtccaggccgagataaagttcccttcccagtccgctggggagacaactggccgcggctgccctctgctccgctcccggctgtcccgcagctgcgaggccggggccagagcgctcccttccgggcgggcatcggagccgctgcggcgccgaccgcccttcacgcccgggccgctggagaaggcggagcgagctcgcagctgctaacccccgaggggccgcctcgctggcgaggggagcgggaggaaggtccggattccggtggcaggaactggggctctgggccaccggttcaggctgccccaggaaatgcctgctttgcggtgccgcagagggtatagaggagctcggccccagagggtggctgttggggaggcggagctggccgcaggctggagcagctgcggagcctcccatcccgagcctagaatcggagaaatttcaggcggaaaatactgcggggatggtttggctcaagtctcccattctacagatgtgaaattttagagtgacccgactggggtcgcacagagggctgttggcagcaggacctgggggaagagcgagaggagagggcccccgtggcggccctgccctgtcctaaaggagaggggctgcctcccagatgagagccctgagaggccctagctgcgcaccctattcggtaataccaaataaaccaaccaaaataaaacataaaccttatagacgtgctgaaatacaattctctcctttctacatttccgaatacaaacattttgaatgagtttatcagaggtaaacctttccctcggttttagtggtggcagtttgctgatgcccagggtccaagcgtggggaaccccgcactgctgagcaaaggttaagggcagaagctcaaactgggttcacggttaatttggctaccagctctgtccaggtttgagcctcgggttctgcatctgcggaatgggaagacggttgggagagatggcctttgccaagggtggaccgagagcgaccgccgcgcgtgggaatttcacggcacagcctacgactctctagagcaatgggaggatcagctaggtgggcaaaagggccaaagcgtcagttcgccgcccaggtcgtcctctggcgccgcttcccagcccgcccaggcgctgtccaggccccagacgaccctccgaccttgtgccgggaaggcccmgcggcgcggtgcgcaccgcgaactcccctgtggttctcaatagttggaattgaarggacgccgggtgggtccggcccgagacttagctgtgggagctcagctctgcgctgcagtcagagcaatttccgacgcccacatctttacctctactccctccttccgttaatccacccccggaaaaaagaaacgccaaatgtattcagctgcctcaatttgtaattgctcacttattagactttactaatcctcaggacagggaccttttatattgggattgtcaaaatccttaaaacactgaaagactcacacccaggcaagcctgaagttagccacatgggagctacagttcgcccaacacacacctatacaacatgaattttccacctaaataacataaaatttgaagacactccctacggagacactattttctcctcacatttccaaatagagtcgggctagtgctcagaaatatatttgttctcatgttttagaagtttaaaataaatggattagattatcaaattaagagcgaataagtcacttcgaagaacaaacacaacgttccagtgagacacggaaagaaaagctagaaagaagttattgctgagaatataaaagcgggagggaaatcctctgtctaatttatttctccctcaacagttttgtaagaaaacgtcttgggctcaaagtagttgcaaagaagtctcccgtagcacagccggggcgcacgggtccggtgctggcagctgtgctatctgaatcctctctggccattaccgctgctcaggcacattttcaaaccaggggtgctaacgtcaatctggctttctgcgtttgcttccgacgaggggggaccggacccagggtggggctgcgtaaactcggggacacttgggaacatttactcaggaagtgagaggggccggctgctggtggctggtcctggacagagtggtcgagggaccagggctcaggtcggttccgctgcgcccgccgtcgccgacagtgaagtaagtacagtgcgggcggcggctcccggtgagtcacttcgtgagtgacactcagccccgggggtckcgctggggtcggagccggaaggaatgttctgtccccggaaccgcttgcagccaggagttggaggccctctggccccgcagaggctgggttgcaggcatcgaaaacttcctgaacacaaccagtaagaatttgatctcgagcttccgaactccaaacgcctgggcaagaattcagcaaagcgcagcaccgctcacccgcacttcccccagctagcggttgctgtttcttggaagacgcgtttatccgccccagtcccgggtgggtgggtcattttgccaaagaaaatgtggttgggggtgacttcgagtagactttcactattaaataagtgcacctcagtgatggatttgttccaaattgatgtttgacttttaaaaaagcggtggtgaatgacaacacgaaacaatcagtgtcacaggttagcaaatcacactgtctcctaaattaaggcaaatgttggctttatatctattcaggaaaaagggggagatggaaagttttctcaaacctaacgtctccaacaaactcatatccagataaaacttcctacacatgactcccacgcacatgtttcgaccaggaaacttttgtttaccagactctcttcctggtaatttctcctgtctcttttcccctccccaacctactttcggcagtttggaaggctggagatttttgttaaggacactttacactaatctcagttaaccggcaggccaagctaacctggcaaagaataagaaggaaagacacacacacacacacacacacacacacacacacacacacgacagcgatttccaaacatcctttctacttaaacttcctaatcccgtgcctgtcccagaagggtctccgaatgagtccccggcgtgggttgggggggggggttccagtgcctagtgcatctcctaccctgctctccctcctccaaccgcctccctactctgcaacacgtaagcatcacgaaacctcctgcgaaacatctggatggggactggtgtcccaacatctgggcaactaccgccaaggctggcttctagggaacgagtgcggaaatgcgtgcgggtgtgggagcgcaccactcagtagggtaggacctctcccagcgctaggtcactgcagcattcttcccaccatctgctcctgtcaccagcccctaactccgcccctttgggcccgccccttgttccgaagccaatagcaacccctgaccgccctacaccgcccagaagcctttccacaccccctcgtcctgggagcgggttggctgctgagctctcggagaagcgcctgtatttgcatggcgttcggggtttttggtaggtagagcagcccgtcactctggaaggccgggaccgcccactccacctcggtycacagctctcttcctgcgcagttcgcctcygcagcctctgcgrggaagtgccggggctgctcgaggctcagttcttaggactgcaaggaggcagccccggcgtgcggcggtgcgcacagtctagagtggccagggcgcgagagtgcaacgtcctcctggccccgagcgcgtcgtcgcgccccgggagcagaccctcgcccagcagttaccgccgtcccgactttccgttccagttgcagctcctgccgggcaacatgtcaagagccgccgccgctacagctgccgccgccacctggggaagagcagcagcagcagcggcggccgcgggcacacgggggcaataaaccgagccacccgggcgtccagcgtgccggggaaccctctctgcgctcactgcccggcgggacccacgccatgtgctgagccatgtccctggccgcgcccgcgggcagcgcatggggcagcgcctgagtggcggcagatcttgcctcgatgtccccggccggctcctaccgcagccgccgccgcccccgccgccggtgaggaggaagctcgcgctgctcttcgccatgctctgcgtctggctctatatgttcctgtactcgtgcgccggctcctgcgccgccgcgccggggctgctgctcctgggctctgggtcccgcgccgcacacgacccgccagccctggccacagctccggacsggacgccccccaggctgccgttccgggcgccgccagccaccccactggcttcaggcaaggagatggccgagggcgctgcgagcccrgaggagcagagtcccgaggtgccggactccccaagccccatctccagctttttcagtgggtctgggagcaagcagctgccgcaggccatcatcatcggcgtgaagaagggcggcacgcgggcgctgctggagtttctgcgcgtgcaccccgacgtgcgcgccgtgggcgccgagccccatttcttcgatcgcagctacgacaagggcctcgcttggtaccggtgagtttccctgccaggggcagggtctccatcgtcgattcagaccctgagctaagggagacatggcgtatgatagggaattggcagggttacagcttcggaccacccggggtagggcagggaaactacggcagattgcgcagcgcatcctgtccgggtgcggtgagggttgcgctccgcttggttctcgtcacaacccacagaaagttctcgcggagcactggtgcccttgaattcatcaggcgacctcgccgcaaagaagaagggcagcgactgagaccgccctcagcaaagcgagccaccctctaaccatgggggtatccgactcgaatcgtattttatgactcgttttaaattttttcctcccggagcccgagacgctgggaatgttctgagcccctttggtcggtctccgccctcaasgaacttctagagcagcttctgcttcccagatggggagagggggtgggggccgcggcgtcccggcgaggccgcagagtctgttaactttttgttacagtccgcctggttaccggaaccccaagggtgtcagacccgcctcgctcgcgagccgcctgggctcgggagggtgagccgggcgggtggcccggcgcctccgcctggcgggcgggcggcgcgcggagcgtggagctgtgctggtccctgtcgggcaaaggcgcgcactgcaaccggctggagcggcgcgaggctttgaaggcgtccgggcctccgggcaccgccgcccgtttccgcctccctgccctcggtgctgggatagggaaagcaaggacgcgtgtctccgcggggcttttacacgtccggagcaaagaatattcggggcccattgattgagaaatgagggttgcttcgaggtcgcggcttccggaaattctgttctcgagtcgggttgcgggtcaggttccaaagggacagyggccccggggtcacaatcactacctctgcccactgcttyccgcagctgctggtctttggggtgagctgttgggttgcccgagcttcgggtaaggcgcgagtgggcaggaggtctagatttcggcctccgataactgtcttcgactaggggcccaggtaacgacccccacattttcgttggggtctccacccgtaaccccagccagcacgacattcagacacccctccaggcccaattagcttcacagacgctcaagacttgggaaaacaaaagaggagaagataactgaacccctctccctgtgcccaccccactgtcgggacctgggtgggttggagaataaaagagggctgaccccgcggattaaaacggctcccttcccagcctcgtcctaccccttcccctttgtccttaatggttttttattattgtcaggagttgcccaagtctcgaggtttagccaaccgtgacagtcatctttcccaccgttcccgggctgtgacccattctcgggacactggtggataagaatggggtctctggagtccgacgcctggattcacgtcctggctagtcgcgtgaaccttggtgctctcatctgtgcagtgggaataatgcaggttctgggcagggatgggaagagtgaatgcgctggtacggtaaggtgcctcgcaggcacgtgagggcctctctaatcgttagctattgtcaccgattgtattgttatgacttctaccaccaccactccccctcctcctgggatggtgattccagggccaggcggcaggctataactagcgcccttccaggtggaacccgccagagccccgaggcagcctasgattttctgagatcagacacacttgggccgggttgggaggaactggcaggaaaaggactgaacccttaatgtcaggcggttttgaagcacctggggcaagctatggaaatccccacaggaaggctcacgcagtctcttaggcggctgccctccacctgccacgttctttttgattgactaaaaaacgctgaatgaagaacgaagtcgcgtggaaaccctcgccgcgcgcctgcagcggacagcgcagcccgggaggttcggctgcsgacttgcgcccgggggctgcgctgcgagcggccacgcatggcggctggacccgggcggccgcaagggcttggctgggccgcgggaggcgggaggttcttcgtcctcccgagccatctccctgaactgacaagcaggactcccgggtccagggggcacagggcccggggcggtgacccggcggatcgggctgccggaggagcccactgtaaatgccgcaactggccccaaacactgcgttcctggactgcaccagcagctcctggcgcggccgcagagttggtggatattttccaagggggaaaaaaatcttttaaatgccatctgtttactttaaaaatgttgattacttaagaaaaacgaatggatgtctgggcaaaggtatggacgtcacaattattttgaaggcgtcctttttaactttaaacagaccacgccaggaggagactgctgacccagagcgcattacctaaaatctggtacccagagtgcacccttcgccctcgttggagttctctcctctctgccaagctttgctccgtgccagaggtgtgctccattgtacctccgctctgtccctgcagtcaggcaaccaattggagaagagtataaatagtaattaaccagggagagttgtaattcagaaacctagttaaaacaagtcctcaaaaactagagaatatgagagtggggagacattttgaaggcattaagaacaaaaaacgatggggacgaatggttgagtctgaggatcagcatcgtaatctgttagagaacgaggtcgtggctgtgtctgtgagtcgttaatgggtttaatcggttgatacacagcctgctagtggcctaaccagtaacccagggcctggcagatttgcatgacatctcggagtttgattgctcttccttccacttggcaaaaggagacaccatcagccggatcaggaggggtcatggtgagatggaacccaccgaggtggtgtacagagctggcgctgccaatggccagagtggcagcctttctacctccttaaccctgcaaaaatcaaacgtgctagtacgcactgtccatccacactggaactccagttggttttagtctgcgatgatgactcttctgggttgacttttccagttcattatgcagccctcttgaagcaggcctcccaaacttagcagacaccaatgagaacctcacagagaggctcatcaagcaggctggtgaaactgggtgttacttcctgttccatgggtaccccatagtgtttgggaaacaccgggctgtggttcaggagaatttcacatatgctaagatggagaaagaacctgccctttacatttaggcttgggatgttaatttaaagtttgaatgaccaaaaattaaatctgtaacttttaaagtttctctttgtgattttacttaagtgttggtagatattcttaaattgtaatgacctcagtttgggaattaagttagccaaatattgtgtaattattgtttgttatacaaaaatatgccttagactgtacagcggcagaaactccctctaccacctcggyccccctttccattctgcgttatacaaaataagctgacacgttaatgctgtggcccacattaaacaaagtataccgtacgtgtgtgtgtgtgtatgtggcataataaatggtggtagctaacacttaccgaatgttttccctatgttccaggcactgtttcaagttttacaggattagcaaatttaatcctcattacagttctgtgaagtaggtacttttacaggtgaggaaacacaggcacagagaggttaagcaatttgcccaagatctcacagctgggaagtaccaaagctaatataccaacccaggcagtcctgctccagagatcgttctggaccattctggatcacacttcctcgcttaagtgattgaagcaagatatttatcatatagcatgggtccaaaactgagtttgctttagaagagtttgacagctttctgacatgcctttagtggtctcagcgcagactgcagattttgtcattcacttgaaaagaatatcagcccccaagcaggatagttactacatctaacattggttaataactagagtgaggataatcacaccaccgtgtcagtttcatttttctgcaaaggacagttagaatcaagggagtcactgacatggcaaaaaatccctcaagcatccagacagagaaaacatagcaagtgtccctcttgaggagatttatcctctgccatttgtcctttttaaggctgggaggaggatgtgaggttaaatgacacgttccagaacttcttggaattaatttattcataaaaagagtgcccccaaatcaagttcataattaacttgtactgattaaccagcagacaattatagctaacacttttggcagattcatttagaatgaacatagaaaaccctgtaacttcagaaatctctctcttgaaagctaatagctgaaaatagctatattccccacattttaaatttaacaaatgctgagaaaacaaaattgcctcctatttttctagtctacttcagaaaacctggtagcaaagaatgtttctgtcttcactgagggaaatttaagataagatctggctggggataatccattttgaaggaattacactctcttagtcccagagtttaaaccaagtatgtaactcacttccaagatgctgggtgaagataaaaaaaaaaaaatctacatttgtatgcaacaatttgaaatacaaaccatcatgttacaaagctctcaagatttattagcaagacagtggagcatgtgttgaactctgtttttaattaggcacctaaattagaccataaaatggttgattaatcttttacaagttgaagggaaaatataacataaattaacctaatcataagtgttttcccagatgctctgagttaataaaatagtcaaaatttaatagcaacccatttgttttagataaatatgatgctaaaatatatgaattagattacacttattatcttccaaatgatatgttatcattgaacaggtctctaaaaattaggttgcagtacatgtcttaaaaatatttatcaaaatagaatactacaattaggaattacatgttggctaaactagattatgttttttaatggaaactgataattgaaaatttacaatttagcatagactagtatttgtgaaagatatttttccagctagagttgtattgcttgaaactttaaaatgacctgtcacagcttctgtgtttctagtttgatgttttagtctgaaaaaaaaaaaaaaactttttaatattttgaaaagtcaatatgtcatataacgtcattccacatatgtatgctgatttatctttttgtttataatatgttgtaggaataaggttttctggttatatgaaatgactccttgaatcactaaaattatttataattaaaagcacaccaggaatttttttaaaaactcaccagtcagctagttttatgaatcagggaggtggcatttatttcaaggttcagaactgaaatacgtgactcaggctgcttgccgactggtttctatgtcagtagttttttgaatactttatgttctcactctatgaacatggaaattaagttgattgacagaaacacaaaatgcctactctaaaggcagggcataatgagcatttcttttgctgtgaatagagttagtttccaaacagggcgctacctctctcatttaacagtcgatgatttcagacagtaagagaaatttcaatcctaggctgttgggatagtcaggaattccagcaaaatgagtcccccaagtatgtggcatattttcaagtttaatgaaaacaatatgctgcctacctcgaatgaaaacatttaccatgactgaaaagaaaggagatactgatatctttgaaaactaattgtaagtagagcatgaaactttttatatatttaaaacattaccttgttggaactctcgggtttctctcaaactatgccaaaacaaaactaacatcaaataaaactgatgttcgtgcatgctgatttttatttctgatttttcttgtcaagagatttggggaaaagtttaagacgtgagaagcaattaccatcttaataaaatgataataaataatttttatggcagccaagaggctatgtgttaaaatactgctaatgctaataaaacccaccattaagtttatttgtacatagataaaagtggtattaatttcctttataaattcttttaaatacaaatttcacgcacatttcggtaacttgaaaaatattaaaaatatcttgttactggctcattcagaaaatgtacttcattgtgtcatggatgaaacatgtttaaatagcaaagttgtactgcacaggttttgcctcccaaagattgctgtttgtaaaaattatgagtgcgtatctttagatttagagctggttaaagagtactgtccgagaggagtttatattttccggacagtaaaaaaaagtacacacactatacattgttggaataagatatttttgttctaaatatggcaaatgtgaaaaaataagactctggtttaacatcaagttgattgtgtttcagcccagactctctcgccaaggggtcactattttaaacgccattgcccagaatgtgaacgattccatgtgtgtccatgaagcaccttacacgtaggattcagaatccctgttttctcccaagtctttgccccacactgcttaatactgttacacttgcttagaaacccataaaatgctgaaagatggttctgggcaatgtgaggtttgagaagcaaatggagagtgaaaaaaacattgggaagagcagtgagaatcccactcttgatttaatgaatggagctggggggagagccgcccccctttttcaggtctgcggacggaagtgtccagcagggccccagctgcccccgacgttgccacgtgtccgctcctttcgggagctaggggggcgttggcttggacatcccgttctggaagggtggccgggggcgctaccacgggcggggaaaatggctccgagccacccggcctcgggcatcaatcgacgcggccctggtgtcgcgcgggatcgccgcctctggcccgggggccgctgagccggagacagatggcggagcttcccagtgcgggggcagggctggcagccgagactggggccgcctcccccgcccctcggctggccgggtagtcctccgtggccacgtgaccagcctcgccgtccggcctcacctgttgggctgagcctggctgagcggcccgcgctagaggtgggcggtgccggcgggacccgtcttcgcgctgattgggtggaggggctgcggagagaccaatggtgttccgcctgagaggagaaccccgcccagagaggcgggctgagcgggcgcgccccgcccccgccggtgttggcctggctgttggcagctcagcttccactcggtgctgctgatttggtcctgagctgccttcgctttccaagtcgagcctatcagctgttctattgtgctctcttcctttggttcctctctctttgtcctgtctgcaccctcctgcacaaattctcctgttttctggagcggagatgtctgttctccgaatgttcggctcccgagtcctgcagggagaccgtctcgccttctgcagccctggctggcaggacccgagtgggcccgagtggattatttacagccgaagaggacacttcggctttttcggaccttattttgggtctgggaagcgggaggggttgctggcaagaaagtgaattcagttgagtcaatttgcaacgagcacgtttcgtttctcccttttctccgcccccgtttctctttggggggaagaaatggataatcctctttccacccacttctataatgggtgcctgtaaggcgatyccgcarattcagtggataacagaaaataccttcatttccataatttggcccattaaatgacaggacgaagagaaagtgggaaggactgggatggagaggaggaagaggaaaaggccagtatctcacaagctccttccgatccctgaatctcacctggactcagaccgagtggcacgccccctccccagcaccttccgcgctgttcacacacgccaggctcgtcctcctaaccctaagtcctgtgcacagagccctgtagccgcccctacccagagcaggcactgacaagcccacccatttctagtgctgcccaaggtggactcagcccacaaaggccccagccccagcctttgcggataggtttcctccgtggtgccaacaactcttgtggatttgaaagaggcaacctttttcctcgcgtttctaaaggcctatgaaaagggcacgtcgggaagtgcacataagacgttgaacatcgttgcatgagatgttgaagaattacaagatttcgttcttccttccattaaagtacaatctccctggggagagacacacaaagtacacaattagagaccagtaattctcttccagatcgctcccggtgccttttcctagctaagcagcctctccctgccggtcctggccttgtgtaccggaaactctcttggctggatccagcccttcctcctgatgtgctgtcgggcttgtccctggtgccctcttctctgattgttccagtctgcctscgggcacttagcatatgctagtgctgccagttgacacagatacacaaagcagtaaacatcctgttcccaccgaagatccccaagtgtgtgggtggatgggtgtgggaagggatgaggtaaagagagaaaggcagtgaagtgatcattaccttatcactgatttaaaatacttattaatggaggaagccaaaggtgaccatttaaaatccttttctatagtcaatgaataatacattcgtataaatcatgtttacttactttttcattcatctaacaaggattttttttttttaagacagggtcttgctctgtcacctaggctggagtgcagtggcacaacctctacctcctgggctcaagcgatcctcccacctcagtctcccgtgtagcagggactacaggtgcacaccaccatgcctggctaattaaaaaaaaaaaaaaaaaactgtagagatgagatctcactatgttaacccaggctggtctcaaactcctgggctcaagcaggtcgtcctcctcaacctcccaaagtgctggaattacaggtgtgagccaccacgccagacccagaccgtatttttagagccgttttaggttcacagcaaaatttaataaagtacacagatttcccaaatacccatcagtcctacacatgcacagtctgccactatcaccatcctctaccagactggcacatttgttacaactgatgaacctgtgttgacacgctatcactcagggtccgtaggtttacattagggctcactgttggtgatgtacattgtttagggttggacaaacgggtaatgacctgtatcccacattatagtatcattcagggtagttttaccacctcaaaaatcccgtcggtgcacttgctcttatcaagtacaaggcagcacttaaaacactgaggaagtacaggagccatgaacttgtccctgagargcctgttttagttggtggcttgtatgcatacctgtaatcccaggtatgcatcaacttgtatgcatcgtttctctgcagggcctcctcttccttgaagcaccacttaaaacaggctcgaggagatctgtaggcaatttaagcctgatgtttttacttttatttttgaaatcattagtcctactaaattactagtaaatctgaaaaccatttaaggaggaagcagaagcatgagataagatagtacaaatttaaaatgtgatttttgcattttacttttccaggagctttccaaagagagctaaggaagtaagaaggggccagaaagtcagcaactgtgtgattaaaaaaaaaatgtcttngcctccgtatgcaagaacttgctgtgtgcaggcgagtgggccaggcgcttacttaatcttaacagcgatgcttcctgtgtgatttcccttattttccaagggaggaaacggaaactcacagagattgcctaaggtcatacagctgtatctgtaggtggctctacctcttggacctaaggaagaagggaacgactccctgagggcccttcaaactccataacttggaggctgtctacctgcctgaaattcaatgccgtgttccttctggaccagttttaagccatctcttctgttgtttctttcctcccaaagatgtagacttttccacttaaaagcatttccaagattctattttttcatccttttttctgtccctattctctttcactccccacacttgttcctagcctgtctctgttgctctgatgtccatgttgatggtggcggtcttcaaccatgccatccgtgtgccaacccagcactttcctgccatccctgtagcccttgccccaacatctgtgcatttgactccccttctctgaccgaggcctgctcccatcccctcctctaccaactcatcccttctctcccacctgccctttgtgctgccccccacaaccacaccactcagrgtctcagctcttgggatcacrttgacacacccccacattttacactctgtggcccattgcttctgagctgtattgtccagcaccatgaggaccccacccatggagacactgggttttgtaccatccccagcagttgtgagtgaaaatgtcttttttttttttttttttccagagacagagtcttgctctttcacccaggctggagtgcaatggaatgatctcggctcactgcaacctctgccacctgggttcaagcaattctcctgcctcagcctcccgagtagctgggattacagacgcccaccacaccacacccagctaattattgtgtgtgtgtgtgtggtgtgtgtgtgtgtgtatatatatatatatrtgtgtgtgtgtatatatatatttttagtagagacagggtttcaccatattggccaggctggtctcgaactcctgaccttgtgatccacccgccttggcctctcaaagtgctgggattacaggtgtgagccactgaacctggccaaaaatgtcttatataaagctgatctggcccaccccaactttatgcgctccactgagaacttggcccttactyactctgcagctgctagccctgctagtcaccaccccttacctgtgccaagatgacttgtatgcattgtttctctgcagggcctcctcttgctcgaagcaccacttaatttagctcttcctacacaaaaggagaaacctcagagagatggcagcctgtatatgaacaccactctcttaaccacttctcgacatggctttattttataccttccccaagacttccctccgtcatttcttttcttttttttgagacgaagtttcgctcttgttgcccaggctggaatgcagtggtgtgatctcagctcactgcaacctccgccttccaggttcaagtgattctcctgcctcagcctcccaagtagctgtgattacaggcatgcgccaccacacacggctaattttgtatttttagtagaggcggggttccaccatgttgctcaggctggtctcgaactcctgacctcagstgatccaccagccttggcctcacaaagtgctgggattacaggcgtgagccaccgcacctggccccctccatcatttctaaggaggtgctgtgttatctcttttcagtattatttgaaagaaatctcagacattatattgtttataaatctgtggggtttgggtttctttttttgtttttgtttttgttttgagatggagttttgctcttgttgcccaggctggagtgcagtggcacgatctcggctcaccgcaacctccgcctcccgggttcaagcgattctcctgcctcagcctcccgagtagctgggattacaggcatgcaccaccaggcccggctcattttgtattattagtagagacagggtttctccatgttggtcaggctggtcttgaactcctgacctcaggtgatccacccgcctcggcctcccgaaatgctgggattacaggcatgagccaccctgcctggcctgggtttcttatttaaatttttatttacatacttatagaaaagtgtacaaatcagaagtgcacagcctgacacttttcacaaggcaaacatacaagtatgttgttggtaacaagcgccaagatcaagaagtggcwgttcaaaaacccccaaagctacctctgtatccccttctggttaccgtccccatcccgaggacaaccactatctcaccttctaccaccaccagttagttttgcctgttgttgaatctaatataaaggaagcctaacagtgaatattcatggggttttaaaacatgcacatttactgcctatgttgacaggttgggaggtttcacatacaaatccagatttcctgctgcttttataaaggatcrgacagtaccatgcctgtctttcttatggcaacaaatggctggacctggtgagcccctgggcttgtgaatgggggaatcgtctctccttccgacattctgccctccctgccccttcctgtctcacactgggcagcttctctcatttgttaccagagtggggagcttcaaacagttttcccacttttttcaggtatgtacgtttcacgattaaatttccccaatccagttcatcacgggcattcttgttagagttgggcaggagcttttatctatttgactttttcattttacacttttgtagggatcccaagagaggctgtgtggaggtctgcttagctggctgccaattaaaatcagaaatcaccttgatgaaatcattttcagtgacatgcttctcctattttttacttttttagttccctaactggcttttctttgatcggattccccagttggcaaatcttagggtcagccttttgctgtggatagtcaggtcactcagtcattctggtgtcagcagaatacccaatgtgtaccatagaaattggacccagcagtgtttcctaaaccagttctcagccaactctcctgtaggaccacgttttcccccaatgcactgtggctcaatatgttgtcctattgcatgtgatgagcacacagagcatgccgtgtgcctcctgccatacaattagcaacacgcacactggctagtgagtttactgatcatggccttggatgctgtcgcaatgtcaaattacttataatagttttaagtgcttcctctcaggttttgcatgtatctcctccaggacagtttgtggggagtcctgcagaccacactttgagatgcgctattccacgtttctttgagtgaagacaaagttcttctgggtgtggtggctcatgcctgtaatcccagcactttgggaggccgaggtgggtggatcacctgaggtcaggagatcgagaccagcctgaccaacgtggtgaaaccctgtttctgctaaaaatacaaaaatgccaggcgtggtggcgggtgcctctaatcccagctactcaggaggctggagcaggagaatcacttgaacccaggaggcagaggttgtagtgagctgagattgcaccattgcactccagcctgggcaacaagagtgagactccatctcaaaaaaaaaaaaaattaataggtagagggtagaaaaaaagagttccatgttagcatattagaggccctgagaaatactgtagctaaaaacaaaacaaaacaaatttataaattaaagtaaataaatgtttgtttcacctagcatttcccccatgagtacagaaccctcctttcattcataccttccagcatcctgaggcattgtgtctatccagatgccagcttgggccatattcgccaaacatgtttctgaggtttcttgcagttctaagagtctgacactaatcctgtgctcccgctctctctccatccacctttaccccttggagcaggcttcccgttcctatagcttgagttattcctctcccacacatctcccactgtgatgtcatctcaaacctaatatgtctgcaccctccccctggccccagatgattgctgcaaaaagaataaagagcaagaagtggagttgcagtgaatcaaggaccctggataaaaagtggctgaggctgaggccgaggccgggggaacagacttgctgattaggatttcaagtcgggtcttgctttgcctccacttgctgttattctgtaagcaggctaattgcaggttcagctttcctccaagcagcttatgtctgttttcaamggtaagtgttctgtgtcggtggtgtttatggagcaagatgtttgatggtgttggaaaaggtgaagcttttttccaccctgcctggccctgtgtggcgcttgtggtctgagtatgttttatgctagcaccgagatgattgctcaacctggttgtaatgttgaggtcttcactaaataacgtgagtgccacatgtaaacattggcagccttgagctgcaaacgaagccaataactttttaaaaaaatgcattytcccccttttgtgtggccaaggggaacactgaaaagtgtcctgcagttcacacagcaccggaaacaaaggaaactttcagattaggtgtcactggggaaggaggctagtgaagccttttaacagagagagatggggattgatttacctgtttgtataaaactaaagttacaggagtatctggatttctcctgcaagcactctaagcttgccatagttatcttattatctcctgatacacttaccgtaggttcttcgtacttggggaaattctaacatctgcatggatcgcctgctcacctctacctgagcccttgctcaggaggaggcgtttggcaaggacatttcacatggtttgtgggtgaatagtttcacaccagagtgggatccwctattgcatgtactcgactagcttttcattcttatcacacttcccttcctataaagttacgtatcttttaaagggaaatttaatacccaccttcgctttctgtgcggccttgtgaaaatcaggcaataacaaggacagccttattgccagtgtatgaccagagcatctagatggcactactagtggaatgtcatcttgtctaccattcattcattcattcatgattttctctaccagacagttttggaactcctagaatgggtcaggtggtaggcaggcattgggaaaacaaggttttaagccattgtccaaatcctcaaagaactcaccattttggtcgaggggccatggtgagaggtgtatagaacaaagtaagaaatgctgtaggagcagagagagagaaagaggcccagagaaaaagacaccatccagctgggcwctgaagcacggataggagcttgctggctggttgtcctggaaactgatcagaatattcagggctgggaagctctgtgtgaaaaaggcccagagaagcacagaagagcactgcagcttgggcaaaacggtgaaacagtgagggtgcctgggattgggggagagaggagccaggaggctggctcagaggtggagaggctggaatggcacattaaagagagggcttttatcytacagacaagggagtttttcaggccagcagagctcctataccagagacattcacaagctttatatgagttgtgaattcaaattcttttcatgtattttcagggaaaatttaaaaatttgtgatttcaagacagagaaagcagaaaacacatagatggttttctaagatgaaccacatttagccctgctgggtgattcgagtaaggctcccaaaggaacaagcagcagttcccgatggtgtttgcaaatatggctgggacatgcttcctcatccccactcattgcccctgcrgaatccacacaccccctccctgctgcctccttgggtagcttggatgactgtcctaagcaccttcgttctgtggtttgaagtactgagggaaagagagccattcttctccaactccccrctcggctccccaggccagcttctccagcccgatggtgtggagaggcaggtggtctgcaggctgggccctgmcacctctcctctcccttcaccagtcctgctgagagaggatccctgtcattcttccgggagaggcatgtcagcaggcgcagygggagaggggatgagggaattgccacktgtccacggctctctggctcaaccaggcagggttggggcaaaccttcgccctctgtctcagaattgcaagcagtctaaagaagccatgcttggctcctgcttgccggtactcccagtgtgatttagtcctgggcccatcactcactgtggaggaactcagctaagtttgggaamcttccatgttagcatataaaagtaactgcagttattgataaggtctagctcagaattgggttgccctgatcagatcctgtttctgtttagaggagacagagaagagaggctgagaggtagactcaagagggcacagccaggaggcagctggttagggggctgccactgtggctgggtggctccctgccctgactgtgtctccttcccatctgtctcctccaagggaatgttcagtctttcactgttatttttgggatggtgttttcttccagtcccagctggaaacagaagtacagaacaagcccatgactattttgtgttctgcaaaaagagcatttgccaggcagcagatgtactggcttcctcaagactgaagctttcgttggttttgaggactttgatggaagccacctcattttacccagatggtgtcttttggggatgtgggtttgggggatgggaagtgcaaaagcacatcagtgagggctgtgagttgtttgtggttgatcagcctccagatgtggcagatggatggatcgtaagtcccagaagctcaggtgcggagagaggcactagcagacagcagcggtctgggctgcaggtaaaggtgcctcctaagtgattgcaagctcaagtatagtggtggacttagattctgtctcacacattccctccgtaaacagttttctagcagcttgtcaattacattctggtttggatttggtgctgttttgtctccattataaaatcctttggcttctctttactcaataagagtgtattgagaggacaggcaccgtgtaccctcctcccagaggaaattgtcattagggcagtccctgaggattgattatatccatttggaagccaacagtggacacagggaagagggggaggaatcaggttgattccagctagttcttggtttctctgtatctgaatgtccactgattttcgtttcgtttcttagaatttaagtactgacattaatgtattgagcatctactctgtatcaggctctgggattcaaagatttgttcatttcacaaatatcactgggtacctattttatgaacmctgttcctgccctcctgtagcttacattctagtagggagatgggcagtaaagaaataaacaagtagattaataaaaatataatgtcaccaagagtgagggggtagacggttttgtgggagaggatgatgggagaaaagggacactataggctggaagtcaggagggcctttttttatttcaatagtttttggggaaaaggtggtgtttggctacatggataagttctttagtggtgatttctgagatttcgatgcacccatcacccaagcaatgtacactgtacccaatgtttagtctttgattcctcaccaccctcccsccgagtccccaaagtccattatatcattcttaatgcttttgcgcaggagggcctttttaaaaagatgaaaaggtagaaagatgaggactgagagggtcagagaggcaggtcttgatgtgagacgccagcgtgtgtggggctttatgagtggaagggacaggacctgtcctacattttagaaaaaccctgactgctttgcagagacagactgtagagcatgagaataaagggaggggtgagatggctaaacacagtatggcatgatacatgcaaaaacagaagtagttcaaaaacaaatcctacagagggagaatttcaatctatctaggcgggatggggcgctgcactgggaaggcttcagggaggaggtgacatgggagtgaagttttgatggatgaataagagttcatgagcagaccaggtgggaaagaagatcatggcagaaggaatgcatgtgaaaaggcaaggaggttcctaggaaaaaatatggttggtgcagggaaggacccagcagaagagagtgaccgcatgaggggagtcgaggatgtttgtaagtaagccttaacctcatgacattgaagggtaactagtacaggttatcctgtgcttatttttttttctttttcaagtatgtcagctcaaaagtgggaattgtcagatgctgttgaatagyattgaacagaaattgcttttgctggtgatcagaaaagatgccactcagaaaaaagggccagtgctggagatcctctcaggttgtgttccaggttccacgtcttcgaatctggttgccttttgcctgtctggaaggagtctttcattaagttgaagccatgtaattagaaattccatttctcagctccgcagacctacaataggaacagccccattggccgctcagttccagcattcagttccaggctgccagtgccaaaatgccaaacctggtaattaagaggtggctctgcaggcacacacctgttccgagtgtgcaattagtgcctgccgcccttcttactgagctcagccctctgcaccgaccatttgcagggacggtgggatgtgtgtgtacaaccttgatttactgtgctttttctgaacatcaaagtaagaaagtctcactccttttgttgttgttcaaaagagaaagtgtaaaggaaggccagcttggagtgtctgaggatggagtttgggcaagcatttggtggtggacttttccccaggattgctcactcatcagacactttcccgtctacrttccgggtttatagctaggctaatttaatttccagctgagaggctactccccatatgatggtaatctcaaatagttaatgagctagaagaggaggcagcctattggattgattctggctcctcggctcagtggtttagcagtactaatttattagcctgtttgtctgctggttcgagaggcttgtttagcctggcgcagcttcatgtatctcccgtcttctaaagatggattgagcttgacttctggcctctgaacctttaggatcagctctcttttccatttacacacttcgtttatttaaagggaagaaggagggcagaggggatagccctgggtcggttcgtgagctcacgatacctgtaaagcacattgtgaaattccagttctttccagctgggtttgtatcaccagcagagccttttaggtgagctgccttgagcaaccctggcctgtaatattagttccaggatgtgggtaagtggtgtttttcttccatagaacactgatggcggttgaaaaaaaatacaggctaaagtacataaaacagaataagaattgggaacgaggaatgagggctgtggtttggagaggctaatctagttattttcagttktgtgatcatttgtttcagtgggactgagtgaaaaatgaactcctaaaataaaggcattagtgcggaagtgcaaagaactagtaagagatttagcttccactttctaaattaatttttctctcatatatatatatacacacatcaccaycattatcatcatcattatcattatcatcatcatctcttttatatatatatatataaagtgctgtttatttcattataatttataggccctataattccaaaaaattaatttaaacccaaaccttttttttttaattgtcggataggaaaagaagrcaaaaacctctttagaaagggggtgagtaattagagatgagtcagaggtgggatggttactatatttgagcattttgatctaggaggttcttagaaatgtagagaagtgggatgagcatgagactcagagtttcacattctggattttgagtccctgctttgttacattgcccagtatttgatctggggccacttaatctctcctctctcagcctcaccgtcccattctctaaaatgaaggaaacaacccttcattgttattacattgagccagtgagatcctgaacgtctagtcctttgtggcaggtaaagcgctctgcaactcttagagctgacatcatgatggccaaggcagggagaaccatcttctgataaaaggtttgcctctttccaaggggtaaacttatttttctgtagcatgaactttgagtattggactggtatctttgcgacttcacaaaactgtgccgactcatcatttcaatgcttaataaaatataaaggcagatcccatgtgtatgtattgcaggcagagtgtttgggtgggcctaagtgttatgctaacctcccagatggccgaaatctagaaaacctggaagagtccatgtcctctctcccccattcactgacccctaacacagatcatgtcaaccaggcttttgaccwgcagaacaaccaacccgtggctggtggacagctgctgggctgtgccaaggctcttaatctgggcccacagttgctctggagtctgtgaatctcctgaagttgagaagcgagatttgtgtmtaygtctttttttttttttttttttttgttgagacagagtctcaccctgtaacccagactggagtgcaatggcgcaatttcggctcactgcaacctctgcctcctgggttcaagcgattctcctgcctcagcctcctgagtagttggaattacaggcacrtgccaccatgcccggctaatttttttgtatcttttgtagagacggggtttcaccatgttggccaggctggtctcgaactcctaacctggtgatccacctgccttggcctcccaaagtgttgggattacaggcgtgagccaccgcacctggccgtgtatatgtcttatatctgcattttgctgcaaagagggtccatccctttactcggattctccacaactcataaaagctccagagctctgctccttgggtactgcactggggaatttgcatacctttttgtagtcagcaagggtagcattctgtcgtaatatttaacaaggcctatttctattctgaacaagtgaagaatcatgtatcttcagaggaaggaggagcccaggaaaggggatcctttttaaaagctgtgagaaagctgtgaatcaggtccatagtcatttggggtacatttcttaggacaattcctgggtccatcttatatccccacttttggtttgcttctttaaccgtcatgttttatgtgcttttttttttgtctcataaagaaagctatctcaattccagatgcattgagataacttcatattgggtgtgaggaggctgataactacaccagctttatagctttgtggtcagttgattccattcctcagtttgttacctgatagtcctgactgtctccaagtgacaagtgaatcgatgtgcatttagcaaacccaggaaaacattgtctttggagaggtttgagcttgattaatctccaaaacgtgctaatggggcaatagagagctcagctcttgttctctccttcaggtggtgtttgcctgtgagcttagtgccctatgttcccagcccagggaattggaaattgattcatttgggaaagtaacagcttaaaggtctttatttgattttgtcagagaatagagaacaccgctgagcttttcagagagaggcagtaattattcttggtgcacccccgacccctgcccccaaccccaacctaggctgattcgtctgcccagaatgagcctttctggacccaggagcccttttctcgcttataatctggggttattcttaccttctctcagttttgatctgtttttacacatggagacaggacgtaaatcttcatttgtttataacatttcttggatgaacacctaaattcttcctcacccctcaccctcaaaacttcctgggttactgctacttctgtgggtgaacacagagtgcttcagtgtcatgccctccatcaactttgcttaaaaattgagggtgctccttgtccccacttctttctccacatctaacctgtcagtggcttttctttctatcttcctttaaaacgtttgtttgtttatttatttatttttagagataagggtcttgccatgtggcccaggctggtctcgaactcctggccccaagtaatcctccagccttagcttcctgagtagcaaaatgtttagaattagctgccccttcttttacatccccactgtcccctccccattcaaatctacatatttcgtttatttttatctatcgtttgttttttaaaaatatattttagagacagggtcttgctctgttgcccaggctagagcacaatggtgtgatcatagctcactgcagcctccacctcctgggctcaagtgatcctcccgcttcagcctcctgagtagctgggactacaggcacaccatcacacctggctaatttttaaaaatttttgtagagatagggtctccactgtgttatccaggttggtcttaagctcttgggctcaagcaatcctcccatcttggccttccaaggtgccagaatcataggtgtgagccaccattaaggcgattcttaaaaatgatacataaagcacagagagcacataaaacatgacagttaaagaagaaaaccaaaagtgggaatataaggtggacccaggaattgtcctaagaaatgtaccccaaatgactatggacctgatccacagctttctcacagcttttaaaaaaagaaaaccttaattacacaaatcacaaaaacaagctgtttgctgaaagggaaccatgactgttcttggtattaagccgaggggctggcataaagagattgccatggggcaatggctactggcacagatagggcccctccaagaagcacatggttaatccagcctttttgttaaaggatatttttcttagaaaaaggtaaaatcatgctctcatcaaggtatacaatgagtgtgttaaaaaccttatttcgctcattattaatgatggaaccaggcaaatgttaccattggttcaaaggagaagtcaaaagaatacaaatttacttggactttaattaacaaatagatgagaaactgacttcttccactgagtaggaggtagagaaaaaagtccagagaactcccaccagaaagaacttatttgtatatctctggtcaagaatcaagaattatattggattgctatattgctgtctatataatttagaaagttgcagagtctctcaaaagcaataaaaggctggagtcagataatcagcgagcgtgctctaaacagtgcaagttttccactggagacacctagtgatctttttttgcttattccaaatttctttacattttaaaaatactggtcttagtaggctcgcggagtttataatcagctcaaagcctaagcctgtttaagatacgctgctggtaagtgctggctccctgacgcctaacaaaagattttgatgccgccaacctcctacattttatgtggcttctcattgcctcagaggtcaaatccaaaatctgtcttagcatttgttcctgcatttgtttactcttcctttatctagcaactgtttatttttgccacagtgcaaataagccagtcctcacccccttggaggactgctatagyagatggatagaggttatgatgactctgtgtgtgtgtgtgtacgtgtgtgtgtgygcacgcacgtgtgtgcgtgtgtgtgtgcattttcaggaaggatgttgggaatgtaatagttatgaaaaaggaacaaggagtgtatagaaatatattagaagaaggaggtccagaaagaatagtccaggaggagggaagtccatgggggccaagaaacctcatgatccactggagaaaccacaggtgcttcctgatagctggggtgaagcagagttggaaggagggttggaaagagcgagggaggaacttagaattcccttggagtgaattcatatatgccytgccagggagtttgcaggtcattctcaacacaacgagaagctatgaacatttccagatttggcttttggaaagatgtctgtggaagcaagggatggagggatggacagagtggatgagggtattcccagcctgttttccaatccatttttctaaccttatttgccatcatgtcttaaaaacaaatacaaaaacaaaaaacaaaaacttcagtccaggctaagtggcccaatggctgtctcattgagtaggctttgttcatgttcctaaataggagcatcttttgttcctgatttcttcacttccacctactcttggggcaggctcaggggccgtggctcacgcctgtaatcccagcagtttgggaggccgaggcgggtggatcacttgaggtcaggggtttgagaccagcctggccaacatgatgaaaccccatctctactacaaatacaaaaaaactagctggacgtggtggtgtgcacctgtaaccccagctacttgggaggctgaggcaggagactcgcttgaacccgggaggtggaggttgcagtgagcagagatcgtgccactgcactccagcctgggcaacaagagtgaaactctgtctcaaaaaaaaaaaaaaaaaaaaaaaaagaagaagaagaagaagcttcagttgtcccgagcacaacttctgggtgccaatttttcacgtttctcattttcgagtcaagtgtataatatctcttgactgtgtctggaatttctctcaacataaacggtaagtccctggagggcaagaatcatcccgatcaacaacacacactggccatatcactgactccttcatcattatgacaaatattaaagttgaattcgagtttcctttcctcttgctgctacctaggaggcatttgccatcacttgagggatgcttgggaatgcaaactaactttaataataattaaggcaaaataataagtaataattaacacaaatctgctaattagtgcaatttttctcattgttattaactgtaaccatttattagtctgaacagatgttgattactggccaccagaggtaaagcatcccaagttcaatggggggagatgggctcagagtttgctgtgatccacaggtaaaataaggaactctgatcttatcacatttgttgtgtgtttttgcttagcatttaagttcaagacttttatgggtatagccacttaatgtcattgcgtcacttaatgtaatgggtgtgatgatacatgtatgtgtcatctttggacatctttggacatcaggatactgggaccatcacccttttgaatcctggccccacctgtttattattccaagttgcccttgattcacccctgagtttcttgacatatttgcatcatgacctccagtcattagctttaagccttgctagttgattcattttctttcattcatttatttgttcattcaacaaatattttcaagcgcttgcgatgcctggtgttttgctgtttttcttgtatttttttaaagatagtctttaaaactcacagtctaaacaaatacgagacaaaacatggaaggcaataagctgcaattaaagattttgtttttggaaatggtcattaggcttaaaaatagtcacagggtcagtttttcacgaagccaatgcagggtaaaaggctaatctcacttgtaattcttagcagctctctcactgatggtttagttacttaatctccttggtgtttactgtgtcgttccttacgggtgaagaatgggagatgaacgggaatgctttgtctaaagcacagaagagttgctggaaattttaagactcaccagtcaggcaacatcatctatcaaaaagttctcatagaatgtaacaaataatcatggaacctactcaaataatgcagaacctttgtccatagcttcaggcctccaatgctttccttctctctttggatgtgaaatgcacaaggcaggttggactctgtatactgatctgttgcaaaggtatcgggcttttagaataaatggttgaccatgacaatgaaaagatgagaatgtagggaggttgggcttacttttctcctgctgaaagttgattccgggtagcatctgaacttcacaagctgagaattccaataaatccacaaaaagaattcccctagggaagggggtgtggactttaattgatgatgtccaattagagtttccattgacattgccatgtctcttgttttcttgagacatctcttggtcaccctcaagcatatgtacaagccagttaggaagaagtaagtactgatgacaagaaggagtgtgagatgagaaacagtagccttttctttgtctgtagcatctcaagttttatastctctgggatcttctctctgattagaaagtgcttcttttccacctggcaaggtggcacacacctgtaatcccaacactttgagaggctgtgctgggtggattgcttgggcccagaagtttaagaccagcctgggaaacatggcaaaaccctgtctctacaaaataaaataaaataatgcaaaaaaagagagagcaactgcttcattgcttttctaaaacgttgttgagctatttaaagcctatgataacgggggtttatttgcacttacttcccttcattttagttgaattcaagcttatgtcttcagatttttattgacttagttaccttatactgtttttagtggattgccgtgaagtagggttctgttggttgagcacaagggaagcagagagctggatggagccattatctcagacttaagtcaagcgctgattgaaatttctcttgtcccaaactcctagtggtcctgcactcaggagatagggaaggtcgctgacgatactgagtcttttccacagtgcttgcttctttttagcagcctcagatggatccctgcccctaaactggggctgtttctctccttctcaacctaattgtgtgccatgaggaaataaagaaagaaagagagaaagagagaaagaaagaaagaaagaaagaaagaaagaaagaaagaaagaaagaaagaaaggaaggaaggaaggagaggaaggaaggaaaagagagaaagagagagaggaaggaaggaaggaaaggaagggagggagggagagagagagaaagaaagaaaaagaaagaagaaaagaaagaaggaaagagagaaggagaaagaagaaagaaaaagaaaggaaaagaagaaagaaaaggaaagaaaagaagaaaagaaaagaaaagaaagagcttgtgttaaaagctgcctaatttcccattcctccttggctgatcatctaattcattcagtgatgtcaaccccagaaggagactcagtttttctttgtctccaacatcctacaggggcactaagaaggagggcaccaaaaatggaatgcttcatagcacaagggaaaaattacaagaaatccaaactcttttaaatatttgttgttacttgaacctttaaatttaaaaaacgattttatgtctcttcttccttaacagcatttctctcatccagagccaaatgccaacggagacataaagagggggcacaagtgggattcatcccaccttacccttaggtaggaatttgctgctttcagagtgtattcatctacaaactacactggattcttggaagaatttttttgtaaaagtggcaggacaaatgttatccttttacagatgaggaaagatggcacagagacgttgtgcacttgcctgaggccacacagcctgamcttgaactccacttttcttttgattcaccaggctgagtgcctcattttaaggtacatttgacattgagcatcatctgatgacacctcctgggggtggtctgtaccaatgcccttggggtgcgttttgtacrtattcaaacaccaaatatttatagaggttctacttaatgtctgccagcttgtgccaccctactgctggctgtaggaggaagtggtatgtggggaggggtgggagaaagggtggttataataactttagagctgaggaacacccttttaaaccaatccattaatttttacacgcggagaactgagcacaagcttttgagtgtcttgtccaagtacctgttgtctgtggcagggcaggaactggaacctagagtttcatatgcccagtgcccactctgctttcattctgagcattgggcagcccctccccttgtcctgtttctctcctggtttcccggtgtgtgtgtgtgtgtgtgtgtgtgtgtgtgtgttgcttgcgggtggaggtttagtgattttcatcaactctgtgttgactggtgttgcagagtgttttgcaagctctctgggtgaaggccwgtttacaaacatttacactgtgctaccaagggtacaagggaaggctgcttttcttgggaatgaagctgggagcagggaggggactacagaggcatgcgaaaaagaaaagagaattgcaagctgcttgctggaggaatggccctttgttgccagggaagtaacccacatagggctggagccccaccgacccagaaaaaagaasggtgttagagaccgggaagctaggactcatcagagacaaaacgttggcccagcgtgtgcagagaagaatctgtccaagcaggaaagagcagaactacttcaactgcagctggattttggtaccctcctccccttctttctgggtactcagctctgtcccgcccctgcccattggcagcactgattttactttctaaaaagtccgcttcccagaaaactcttgttctttctttataatgattttatttttaagttggattttgttttgcttttttttccccctaggaaataggacacaggatcattgatttcacaggatttgtcccggcataaacaggagtttgtaaggtcctgtaaacaggagcagtaccccagagagctcacccgcaaaagactattagcttttaattgaaaccctccctccacccccacccccagccccttccaggaacaggaacaggtggccattgtgaagcggggcctataaccgaggattctgccccaatgaaagggatcttgagttgacccagagaagcgagatgctcttttgagctccacccccttatggtattcaagggcttttcattttctgagcagtattgaaattctaggacaatggaggccaaatccttgtggtgggggttgggggctgggcgtggagaaaggagagagggcctggaagaggaggagggctcgggagtccatcccttgttatttttcttctttcctacccattacctttaaaacatttaaaaaaggaaagagaaaggcctagtaaacttttaatgaataatgacatcacttccgggagccccacggatcctgctgcgaaacctgaaattgagagccagtaactatttacaatttcagttcaaattattctaaaccctcccaaaggagttctttgatatgcaaacatctcccccaaatggagataattatttatggagatgtgggcctttgaagggagttctcagaaagggtggctttgaggcttcctaggaaaggaaggaggttccagataaggagtggcagggctgatacacatcttctgcccagcctcctcccgccaaaccccactccctgggatgaaagctgctttaaagaagaaacttcccggagttacaacttgcagttcaaattacagctctcctctgtcattgtccccatgtctatgttaagttttctgggaaaacttccttttcgcatccctggctgggtgtcttatctttcagtagatgaagaaaggggagaggagagactgtaacctttgtctttttgacccctgaggttccctgggatgtataaggtcatgtagaaagagcccaggctgtttttggggggtgaatacttaaggttagtacattggctttcggagaagacagtagtttaggccatgcttgctattacagaaaatgctgtgattaggactgtaatgaccttgcggcctactctttctttttcccttggattttcttttgaaaatgctttaacacgttggtctgaagtaccagatgccctccccccataacctgccagcgtcttccacctctaggacttgcctggcagcttggaagtttgcttcttggaagcatcctctaccctcccccattcgcagctaacctaaaagtctgcaaccgctcccaccgcccgttcaagctggtcacctgagtaggtggaatggaaatctttcctggaatggaaagattgagcaactggtccacggaatgcggagactgaaataagccctcagcttccatcccaccrgttcttgggtccctcatttcccttattatcgcacttccttccccaaggaacagagcaggagctaaggatccagctccaagcagctgaggccaaggagcggcttgggcaaccccattcagcacggtgagggtacagagcagagtccctgataactgatgggcatcctttcataaaagaggaccttttatcyttttttttttttttttttttttttaatgtcgtaggttaagacgtgctaactgacaaatctcagttgtaaaactgagaagggtttttctttttcctgagtgcttggcggtggttgctaggggtttcgagaccagcaaagctgcgcatgctccctgctccccaggaagagcccgcagctccaagaaaccaggtgatgagaataatacccatgatgttggtcttggttaaggagtgagaccctgtgcgtccccagaggagaaaatgattgttctcgtaggaaagaaactaaagagagatgggatctgtgaaagaaaaccagagccatagtagtcaaagcggtataaaaacagattttaggccgggcacggtggctcatgcctgtaatcccagcactttgagaggccgaggcgggcggatcacgaggtcaggagtttgagacccgcctggccaatatggtgaaaccccgtctccactaacaatacaaaaaattagccgagcatggtggcaggcgcctgtagtctcagctactcgggaggctgaggcaggagaatcgcttgaacccggggaggcacaggtggcagtgagctgacatggcaccactgcactccagcctgggtgaccgagtgagactccgactcaaaaaaaaaacaacaaaaaaaaacagattttgttcaacaactattgcaacaaaggaaaagagacctcagaactggcctcagttcttaatacagcatagacaagtggggatttatagccaaggtgctgtgggtgagggggcggggtagggtgttgggaggagtaggggatgtcttcgggcagggggtgagaggttatcagtggttggaaaattactaagaggaatcatcaggggtcgggggattctggctaaacccacctagccagattcttactgaagacaggccagggtgacccaacatcacctgggggatagtagaggctgagaaccttttttttctgagacagagtctcgcaatggtgtgatcttggctcaccgcaacctctcccgggttcaagcgattctcctgccycagcctccccagtagctgggattacaggcatgtgccaccacgaccagctaacgtttctattttcagtagaggggtttcttcatgttggtcaggctggtcttgaactcctaacctcaaggtgatccacccgcctcagcctcccaaagtgttgggattacaggcgtgagccaccgcgcccggccaaggctgagaacctttaaatatcgatggtgatcagctatggaggatggggtattctagctaaaccaactcaggagaattattgctaaaatgggacattgcagaggcaaagagaatgacaaaagttgaggcgtagttgaaaagtttgggggagcctgagtcgtttgattgggagaagaatctttgctagattccagtgttttttcatggtttttttttttttaaattgactttatttttaagagcatttataggttcacagcaagattgaagggaaggtacagatatttatttatttattgagatatggtctcactatgtggcttaggctgtagtgcagtgaatgttcagaggagcaattatagccagtacagcctcaaattcctgggcttaagcaatcctctttcctcagggcctctgaggaactgagattacaggcgtgccagcacaccaggctcatcagggatttcttatatactcctactcaacccctacatgcataaactcccccattatcaatatttcctaccaaagtgatacaatagatgagcgtacattgacatctcattatcacccaaagttcatagtttacactggggttcactggtggtgttgcataatctatgggtttggacatacgtataatgacatggaagctacatgatattttcctacagggtagtttcactgccctaaaatattctgtgaatcrtctctttatgcccctcacccaacccccaggatcccagtgttttctttttgagtttagctgctgatgtttgtcggtttatcaggcactcaaaaaactgcactctctattccctttgctctttttaagggggcatccttatttcctagacagatttgtgactgtgtagatgctgggaacatgttttgctttggagtggggaggggggaaatcttgtaaagatttctctttgtcacatttttgatttgtgaattctcagaggctggacctgggcttcctggaaggtaatgcagatgtgacgtcacaatttcctgtcccgtgctcttgggattggtgtgagaatagtttatcagaatgggctgaccttctgcagattccactgctgaactaattttatagatgaggaagctgaggcccagaaaggcccagaaaagctgaagctcttgggattggtgtgagaacagtttatcagaatgggcaaaacctctggagactccactgctgagctaattttacagatgaggaagctgaagcccagaaaagtaaccactgggacatgccgattaggagcagatatcttcaaaaaaataacttgtctttaaagaaaaaaaagcaacagtaaatatatcagttatatgaaaatttggccagatgcggtggctcatgcctgtaatcccaacactttgggaggccaaggagggtggatcagttgaggtcaggagttcgacaccagcctgtccaacatgatgaaactccatctctactaaaaatacaaaaattagctgggcatggtggcgacacctgtaatctcagctactctggaagctgaggcaggagaattgcttgaaccgaggaggcggaggttgcagagagccgagatcgcaccactgcactccagccagggcaacagagcaagactctgtctcaaaaaaaaaaaaggaaaaaaaatttctatgtctctattgatgattctttcatgtcaatcaatattttccccaaagcagtgtcaaaacaaggatttgggcaacctttggccctttcaaagggaacttgtaaaatcttcattggaagaggctgaataagtggatttgggggaatgctagaattgttctctatcttgatgatagtggtggttacacaattctatgcatttgtcaaaattcttggaactggacaccaagaatgatttttactatatctaagttaaacagtaagtttaaaaaacganaaagagtctttgttggagttcagaaaacgtggggtatttctgcaactaaacaaggaagtcattttcctaacgggccaggagaagtgggtggggtgaatgtttcccttgctcttcccagttttcctcaattgacttggaagactgggcctaccccaactcaatgtgggctgcagcttgctctcctctctaaagcacattaacttccatcatctgttttacgtaaatttccaggcatctgtttgcctgttgtgagttaggttacgcccatttcaataatcttttttattgttgtgtaatttaccagttcaaacagtaacttcaattgctgggctataggaggagggatatcacccgaggaaaggaagaagcagaagaagatattagggcaacatttggtactgggtaacatcagaattatagggctttttagaactgctctggttcattttaatttcctacgcctttagccttcaaggttggtttttaatagtccacttctagctgcagtatttaagagccccagcaagagtggggatgttcagtggtaaagtctcgtgtttctccaaagccctgggaccgccattccccagtgggaaactgacttggcaggaagtcagctcatcttctcagctgaccactctattctggagaggaaaggcaaggggcagaggctatctccgactgcagatgaaaattctaaatcttcaaatgtgattctgagcatcctgcctcaatattgggaaaaaggaaaacaggaatttatgccattaattcatcttactttcatggaatttttttcttttaaatgagaacttagtgtctttctttccttttccttccttccrtcctttctttctttcatttataaagaaaggagtttatttcttacagttctggaggctgacaagaccaagatttyggggacacatctggtgagggccttcttgctggyggggactctgttgagtcctgaggctgcttaaggcatccgatggcgagaggctgagtgcattcatatgctctaaaagagcactgagattcatttgcagccacaaactcttatacaagcataaattagacaatctaatactagtattattctttacctgtctgtttttcttctgcttagggtaatattatttaacttttgatgatgaaagaattagatacctctgttagcttttctttatcacaccagtagaggtggacttatctttcttctagtttcctttcatttgttttgttttaytggtagcctgattcatatctggtaaccaactctcagagggkkgtgtgtgtgtgtgtttaggggcaacaagtatcttatcctgattggatttttttttttttgagatggagtctctctccgttgcccaggctggagtgcagtgtcaggatctcggctcactgcaacctccatctcccaggttcaagtgactctcctgcctcagcctcctgaatagctggaattacaggagcccgccatcatgcctggctaatttttttttttttttgtatttttagtagagactgggtttcgtcatgttggccaggctggtcttgaactcctggcctcaggtaatctgcccacctcagcctccaaagtgctgggattacaggtgtgagccattgcacctgacctgcctgattggaatggatttgttcttttctctgcagtttgtagaccatcaggacacaagccctcactggccctgggaggtgatctacaggcagctgagcgtgtgaccttcactcctctagccatgactcaaatagctagtcttggattagctgaacaactttcagttctgctgacaatgttgtcttctcattttttccccccacgaaggtggacctctatacccacatagtatctccacttaggtgcacatgaatatcagcagaatacatgactagattatgacaagttccaggcccacagatgccacagcataatggtttccagtcctgcttgcacattagaatcatctaaaagaatcccatgttgaagccccacccatccagggcctgattcaatgggtgtggggaggggccaggcatataacgccagttaaaagcaccctgcatgatttaaaatgcttccagggatggaactgagtgccacagaggtggcgtataccatttgttttagacggagtcttgttctgtcaccaggctggagtgcagtggtgcaatctcagctcactgcaacctccacctctcaggttcaagtgattctcctgcctcagcctccggagtgactgggactacaggtgcgtgccgccacgcccggctaattttttgtattttagtagagatggggtttcatcatgttrgccaggacggtctcgatctcctgaccttgtgatctgcccaccttggcctcccaaagtgctaggattacagatgtgagccamcacgcccagcccatatacctttctttgttttggtttgtttgttttttgagatgcagttttgctcttgttgcccaggctggagtgcaatggcaccatctcggctcactgcaacctctgcgtcccaggttcaagtgattctcctgcctcagcctcccaagtagctgagattacaggtgtgtgccactgcgcctggctaatttttgtatttttagtagagattaggtttttacatgttggccaggctggtctcgaactcctgacctcaggtgatccagctgccttagcctcccataatgctgggattacaggtgtgagccagcacacccagcctggcttatacctttcttgaaatatccttaaacaaattgaaagcctgaaatactccaaatcctcctggttctcagaatcatgcactgtggcccagttttttgaggccactggtggtcctggaagttcattgtgcttgtcatccccaaatcttaatggggtgacaagcctgcyttgcccttaggtttaattaaagaagtaggatctttcttgggttctgtcaccctgtgttcatgtgggcacacatacctggttagtatctcctaggcttgtcccaaggaatactcttgtgggctgtgagcattgtgtcttccttagctttggactggagatgctgtctagccccatcagcctcacaaacatctattagtgatatgtgccaggtttacgtgcttttcaaaaaggtatcccttcctgcccacgtggtaaagaggggaagaagaggcggggccagggttgctggaggggaggtgctgttgcaatgattggtgattttccaggcctcatagaaggcagttaacaatgggatcatgtaaaccaaagagccttattgtttcgaaattggacgcctatttgaacaattatgatcggcagtgatctgattaacactgaaatacctattaggctactaatgtatgaatgaaagaaaaaaatacaggaatctatttaaagagaggacaggtgtgtagctctacatgttctaaatcatattaagaagaagcaaaggagggttaagagaggatcatcatgaatggaagaaggcccatcaggagagctgactacaagtcccaactctctgacctgcagctggtgacccatctccaagcaagtcaccctctctcctttagactcagtgtcttcatttgaattggagattacaataactaccacaaaggcgttaaagtaggtgataaagcaggtgaaagtttgcaagctccagggcgctatataattatgagctctgactatccctttgagaaactggttttcataatgagtgactcaattaacctgcatcatgtgctcactctggaggccagcctggggctggacaggctgctgaggttgctgggatgggcacacagattccatgtgagggggtcttaccctcggccacatcctcatcctttcttctgtgtgccactgttgagatcagagaggtttctgagagtgagggcaggaaagtgtgcccagaggaggggcagaggaagaggaaggtgtgcccagttagtgaatggaaagaacttgactccaggactgcgcggttgtagggtgagggtggcagaagaagagcagccaaaggggcaaagagggacttgcctggatgattctgtgccaggagccgctcacacacttctcaggcctgccatgcttctcacttggggtcacaaaggttctttgcttgaccaaacttcagtccgcctcctgaaccttctcccaggacctcctgtgcacttccttgtaaaacccaatcttagcaaaggcccctgataagtcattttggcatgaactcctcacccttggtatcttatcaggttcctcagcctccaccagcccccaggtgatgtctggtcactttggccagtcttcagggagagtcctattagatcggtttagccagaattccccttacccctcatggcgcctcgtagtaagtttctatccactgacccccaccctgctccttggctctaaaccccacttgcccatgctgtattccgagttgaggccaatctgtctccccatcactgcaagactccactgcagtgggtctctatacctatcatgatggtcctgaataaagtctttgctgctgtgatttaacaagcgtgattaattactcttttcttttttttcttttgagacagagtctcactctgttgcccaggatggagtgcagtggcgcgatctcagctcactgcaacctccgcctcccaggttcaagagattctcctgtctcagcctcccgagtagccaggattacaggcatgtgccaccacgctcagctaatttttgtatttttaggagagacgaggtttcaccatgttggccaggctggtcttgaactcctgacctcaagtgaaccacccacctcagcctcctaaagtgctgggattccaggcgtgagccaccaagcccggctgagtaatttttttcttggcatcttgggagatgccaagtctctttatcacagcagtagttcccctggctcagttattttgacaataatcaaaataaattctgaggctccttgagtgctttctgacacatgtggacaaacaccagactgtcctggggagaggggccctcatatgggttgtgggaccagcaggcggtcgagcacagtaaatctgcccacggctcagggaatctttatttatggttgatctctcatttcctttttactagctttattatgtggtttcctatacacaattgccgatttagcattctgttcagctactgacaagcccttctctagggccagtgaggaaattccggctgcagagttcagggaaggttgtggaccccaggcaggctgagagcagaatccagcattcctgcacttagcctcttccaggagccaaacctccctcattgcccccctgtggggtagaactgaatgagtgacaagtcccctgtgcacaagtcttgcttccttacatcctttccaagatcctgtcaacagaagataattgataacatttttgtaacagcctactaggtaccaggctgggtaccaaagctaactttgcagttctttcaaaagccctaggaggcagacatcatcttttttttttttcattattcagatgagaaaactgcagcatggacagattaagtgatgtgttccccaggttcacacacgttagtaaatggaggtgctgagagtcagactcggtggcctgacttccaagcccaggctaagtcagactgacagcgagatacccctaaacccccttctctgcaatggccccgaagaaccttggggtttggtattccttcaatcgtggtgataatgctttgattctgaatattaatgtcttgtaaactgtctagttgcagatggcttaacacaggggaaaaagaacttgggctttatctgacttgacctgctttttagtcaaatgcaaaataakttgcgagccgagactctctttaatcctcaatcacattagcctgatgacactgctacattaatttaagtggttaatggacaaagtgggtcaatccagctttagcttaaatcaaggctgactccagtgctgctgaggcagtcttccttaagggaaaagcactcttcttctaactccctgttggcagtctgcaagaaggagtgcccgccctctagggaattgccttttctggctcctgtgatcaagtttctatggtttccgtatcggtgctagataggggaattgtggtctcagtggattaagatggcttgaagcttagaatgccttactgagaggtaaatatttggtcaaaaataatgtggaaattctcttttttttttccttttaattcctgtgcctaggcaggaatcagttggaaatctctattccatagtagatagctaatagatgatatagcctctaacatggtatctagaataatagcaggcacccaataaattgtccgacttgtaaataataactttctgattgtagatctgtgatcaaagcttagtatccacttagttaacacacctccttttggtgtatacaaactagcgcttatacacatatgctgaattttggtcatatgatatgccgtaaactgtgtattgagcaacttaataatgataataataatgacagtagtagtggctgatatttgttaagtatattccatatgtcaggtgtattctaagcatnttataattattaattgtttaatcctcattaaacttccatgaatacgtattggtggctccatttttgtggatgagaaaaagacgcccagaaaagttaaataaagtattcaaagtgacataacttataagtggtagagccagaatttaaacccaggcagtctgactttagatcccaaattccttaactaatttaagaagctaatttaagctaaactgagtcagctttatgaatttcatttaatttttttcctttaaaagaatatatgtgataaataattgtgcatattttgggggtacaatatgatattttgatctacgtttacattctagaaagatttaatcaatggccgggagcagtggctcacgcctgtaatcccagcactttgggaggccaaggcgggtggatcacgaggtcaggagattgagaccatcctggccaacatggtgaaaccccatctctaccaaaaatacaaaaattagccaggtgtggtggtgggcgcctgtagtcccaggtactcagaaggttgaggcaggagaattgcttgaacccgagaggcggaggttgcagtgagccgagatcgcaccactgcactccagcctgggtgacagagcgagactctgtctcaaaaaaaaaaaaagaaaagaaaagaaagattcaatcaagcaaattaacatatccatcacctcaccaacttatcattttttgtgtgtggtaagaaactggaaaatctgtttttgaagaagatttgaaatacacaacatattattattaactgtggtcactgtgcagtgaaatagatccctacaacttatttctccagtctaactgaaacttagaaccccctgatcaacatcttgtctttcatcatcttccctttaatcccccaaccagcctctggtaaccacctttttactctttttctgtgagatcaacttttttagattctacatataaatgagataacacaggatttgtctttctgtgcctgatttatttcgcttagcataatgtcttccagttgcattcatgttattgcaaatggcagaatttccttctttttaaaggctgtataatatttcattgtgcatatatactacacttaaaaaatctattctccattgatagacacttaagttgcttccatatcttgtcaattttgaataatgctattataaaatgaataggaaaatgcagatatctctttgacataccaatttcaattcctgtgtatatctatccagaaatgggattgctggatctaacctcacttaatttctttctttttttttttttttctgagacggagtttccctcttgttgcccaggctggagtgcaatagcaccatctcaactcactgcaacctctgcctccctggttccagcaattctcctgcctcagcctcccaagtagctgggattccagacatgcaccaccacacccagttaattgttttttagcttttagtagagacggggttttgccattttgtccaggctggtttcaatctcctgacctcaggtgatccacccgcctctgcctcccaaagtgctgggattaatggcgtgagccactgtgcccagcctggtttttttattattattatcgttgttgttgttttataatttcagcttttattttagattcaggggatgcatgtgcaggaatttgttacataggtatattgcatgatgctgacgtttggggtaccgttgatcccatcacccaggtagtgagcatagtacccctctaaagtatttttggaggcttctagagttgtgtcttgggaatttcctcgtggcatgtttgtatcagtttacttacctgatttcactggattttttggctgctgtgtgctttgttgctttgtgaagtaaaggctttgtcagcagtcactgtghtaaagccggaacaactgggcgggacccgagggatgttttccttccagtgcccatggcacatctgcctgggtttggtaagtgtgagaaggcagactagtggcaggactcatggacagtgaaatctctgggagtcccgggtgctatagttttaggaaaggcacttatcagaggccaaaggcttttgtattttggcttcagatgcttggggcaatctgaaagctgggaaaataagggaaaggttatacccacaagaggatcttagagaaacagatagcttgccctttctaccttgcatgaaggggccttcgtgttttccggtagatggtacctgccctccaaaccaggtgggatgctaatctacctttcagctctaaagttctacttgcattttacatgtttctaccactgcttccagaaataagagggagctgggattagaagtcgtgaccttaagacgtgtggccagagaggcgtcaccttctgatcccggtttgtttgcttgcgtttctcagggacctgatgcccagaaccctggacgggcagatcaccatggagaagacgcccagttacttcgtcacgcgggaggccccygcgcgcatctcggccatgtccaaggacaccaagctcatcgtggtggtgcgggacccggtgaccagggccatctcggactacacgcagacgctgtccaagcggcccgacatccccaccttcgagagcttgacgttcaaaaacaggacagcgggcctcatcgacacgtcgtggagcgccatccagatcggcatctacgccaagcacctggagcactggctgcgccacttccccatccgccagatgctcttcgtgagcggcgagcggctcatcagcgacccggccggggagctgggccgcgtgcaagacttcctgggcctcaagaggatcatcacggacaagcacttctacttcaacaagaccaagggcttcccctgcctgaagaaggcggagggcagcagccggccccattgcctgggcaagaccaagggcaggacccatcctgagatcgaccgcgaggtggtgcgcaggctgcgcgagttctaccggcctttcaacctcaagttctaccagatgaccgggcacgactttggctgggattgagcagacccgggctatgtaccttacccacgtggcttatctattgacagagattatatgtatgtaaaatgtacagaaatctattttataataatttatttttaattcataagcaattaattcactaagctgcctagccacactctttagagagttagcttcataatctgttaacattccaaagtgtttaactctagtatttcgttytcttcttcacaattgatggtgcttctattttttcttctcccctacctgttatatttaaaacaaagaaaagcacaacttgagatttttgttgttacgggtattcagccttcagtcaccgtctgagttctccagttgctgcctccttgtcttgtcttgggtctcccattccagcttccctgtctcttcctgcctgtgtacctcgtaggaacgctgagctgcctcaacagggctgtattctgaagggcaggcctcatgcagcagcctccttgcagatgtggtgtcccgtccaatgatgtagcctgaaagccacagccctagggttctgtccctccctccattcagcacatggggaaatttctcactccctttacagggacatccacatcctttttttttcttttttttttttttttttttttttgagatggagtcttgctcttgttgcccaggctggggcgtaatggtgtgatatatgcttaccacaacctctggctcccggttcaagcgattctcctgtctcagcctcccaagtatctgggattacaggcatgcaccaccatgcctggctaattttgtatttttagtagagacggggtttcttcatgttggtcaggctggtatcaaactcccgacctcaggtgatccgcctgccttggcctccaaagtgttgggattataggcgtgagccactgcgcccgctatccacatccttctagagtcagaatggtagggtccgttgacttcagcttttgattttgcaggatggccctgtgtcctcctctgccccattccctggttcattaaccagtttgaagtgtatgtagattgttgccccgtctttcccaggtcacatgtgtgagatgcctgggtgctgcttcagaaatcaagatgatctcctttaatttgcatgaaactacaccatgctgcgttccccaggcagacagttctgctttgacacaccaaagaatcctgtaggctagcagagccgccagcacaaaccaagggcgctgggtgtcgagactcagaggggtcagctgtgtccctcggcatcagcgtctaccaaggtgctgctaggtacagagccagccagtgttgggcagcaggctcacagcctcaatagggagaaaagacaaaggcctcaaaatgacaggcagcctgacagaggaaggagtctgacacctcagcttgakgcgtctttggaattcctagctcatctcagaattatatcttagagtgataatatgggtggtagccagtggccaaacagcaagaactaagagtggcccttgcaaaaaaaggttgggaaagctgggcccatattgcctgtaaacccttgagcctgatgctcatacagctgtcccttgttttagccaggtcttgacagaagggttaccagcactgtcactgctctacagaatgctctccccgtgcctctctgttgatttataacagttgggtaaccagatagcaatatagtggcaattgagtagccatatagtaatacaggggcagttggttaaacrtatagcaatatcacataatgatatgtttaatttaacctcagttttttaaaccagaatgcttctaccataaaagaattgtgatttcagttntacttccatcaaggaatatgtgggaagatayacatattgtcaaaatggttgggatgggatagttacaaaggacacttttgyatgttgtatgggatcacttgcctgatagtataaggaacattgtatgaaaagatgaaaagatacttcatttttagaaactgatcagagatgtcactggtctttaagtgatgtcttgaaaatccagtatgtatttgcccaaaagttttagcctacatctagctagcttacacttagcagccaaaccatcattgtgtaggttctgttttggaggaagctcatgggggatctgtgtatttcttaggtttctccctgttctccaatgttttatccatttcgtagcttttttactgtctccagaaagtagtgtgggacctgcacttaggggaataccagaatcatagcgtggttctgccttcttgatgagtgattgtgaaaaacacctgcataagggtgctaattggttgtgtattttttcatttatttgaaatcaaactgagaacacctcttttcggtttacagcataacatggcttgaagtaaaaggcagtatccaagtccttcacctggtcttgccctgtctactttctgatcattctgatggtctgatgtggctgttgatgtggaactgcagaagagttcagagaagagtatgcaacaaagccataggaaaacacacaggagcttttccctccccttcaggtccccgccctctttccaagctggacaattttttattaagttgtttattccctgccttaaaactgaaacaggaaattttctggtagaaggagggtcatttagtcacgaacactgaagtgggtcaaaattctattctgggtcaaatccttgaattcaaacagatgtccataatcagtactgatggaatagagcaagtttttctatgtaagacaaataaatcaaacatcatgtgcatctcctcataagggtctgcaagggtctgatggtttaaagttcctaacagatctggttgcagcatctgccggagcttgcaccccatcatcggacggtcatcttcctgctgcagaagttaggtaacataagacttagatttcttcctgttctagcaatctgcaagaccaccaggcttaactttttagctgccagaagacaaacccccttttctgtttcggcaatttgtcctggcacgtgttttggacttcctccgatttacacgaaaagctctgatattcattggagtactttattttttttcctcagttttgtttcttttctcatgtaaaaacaaacaaaaaggtcaacaaaaaaaaattgaggtttttcttgtttctatctagttcatgctttctttgcggtgtttgaacagtagtctgttaacttagtaggtggtacctggaaaggtattttaagtatagtgactgtttaataaatacttaattggatgatggaggaggagaaattgttttcttcccaggattctctttgggggtcattttgtgtgacagatatattttagacatttggagaaacagtttcagatcctgccaggatatttttgtaaaaaaggaaaatggaagattccaataaactagaaacagtacgtatctaagatgctgacacagaagctaatgtgacttttcagcttatcaagaggatggccaataaaacttaaaggtgtggttagatgttttctcacttttgtgacaytaatttatcactgagtctcattcaaccaagtaatctaaaatactgtgcaaattctagcagtatgtcttcgataacttggatgttaggatagccaatatgtacaaaaaattaaatcaagtattttgtcctatgtataacacaaattaattttacacagagaaagatgtttctaggcaagtgaaattctggtaattcatactatttctttgtatgaacaaataaaatatattttgccaacwtgtgggtacctttatgttttcttaagtattacagaaggacaaggtagcaatattttgtttaataatcccatgtgcgtgcatgcgcacacacacacacacacacacacacacacacacacacacacacacagagtcattctgagggcaagctgatctttcagattttaaagggtccaatccaatatacaactaatccacaagcatttagggtggatttttttttttataaatgactctgaagacaagatcggcgagaggggctcgtgtgtcttggtggagcttccccgcagcccccaggaagtgctgtctattacacaggattccaagaatactgaagccactgcctgccccggtctttcagtgccacaggttcgtgtgcatgggcagccacatgtcacacgacaggtgcaatgtgagcacagcacctatggctggatggattttgataataggtgccttctcttctcacttttgcagagtgttctcctataaggtggagatccttatctgtaagacagagacagaaaggactcagacgaggcagcatttctgtgtctttaatccgtctcaaactaccttctgcttactttttacctggcacrccatctgtacaattagtatttgctactttaaccatttgattcactctctgattttacttaactttaaaaggaaacatattttaagtaaaaagccatgatgtcttgccaacaggaggagatcatcatttttaaaaggcacaatgaaagcaaagcaatgctgttaatttctagcccaggtagtatcactaaagccacactagccttaccttaggctcactcgctgctcctggcaaagattctactgttcaagactggcacataagtgagatttgcatcttgccatgaagaataaatgggacttggtgaaggaatgacttactcaatgttatttattgttagttctatgtatgcctaaaatgtgggcgcccactccccacctccaaatcatctctcgcagttctcttggttttctgacatttttggaaacacagtgcctcatactaagaaaatgcctcggagaggcatggagttgaaaattagtctagcattgtgggaaagcagtggaaagaaaaccctgacttaactagaacagggtgtaagttcgtcagtcagaaaacaagccttacttaagatttggttttcaaaagctagcattctacggagatcagtttcttcaaagctagaaatttgccacttagtgaaataggtgtgtgaaatagaagtgttgactttactttgcaccccaactcatcaattttatgctttttctacagaaaggtactaaaatggacctaaaatctattttttttttttgagatggaattttgctcttgttgcccaggctggagtgcaatggtgtgatctcgctcaccgcaacctccacctcccaggttcaagcgattctcctgcctcagcctcccaagtagctgggaggctcccatgtgccaccatgcctggctaattttttgtatttttagtagagatggggtttctccatgttggtcaggctagtcttgaactcgtgacctcaagtgatccacccgtctcggcctcccaaagtgctgggactacaggcgtgagccaccacacctggcacaaatctacttattaatctgatggcacagtttagagcagtggtcatcaagcttggggaaatattcgaatgacctgaagaaacctcaagagattccaaagcctggctggggggctcacgcaagtaataccagcactttgggaggccaaggtgggtggatggcttgagtccaggagttcaagaccagcctgggcaacatggcaaagccccatctctacaaaaaatataaacacgagccgggtgtggtggcacacccatgatcccagctacctataaagctgaggcgcccacttgagccctagaagtcaaggctgcagtgatctgtgatcgtgccactgaactccagcctaggtgacagagggagaccctgtctcaaaaaagaagaaaaaaaaattctgaagcctgaacacaattcagaccaattacatttaaaatcaccagggctgaggccttaacctgggtatatttaagaagctccccaagagattctaatgtatatacaaggttaaaagccattagtctggagtagttctcaaattgtggttcctgaaccacagagcatcacatagaagcctggtagacatgcaaattcctgcccttctcagacccactgaattagaaacacagggtttaacaagcattctaggtaattctgactcacacctagtttgagaaccacccagctagagcgtagacttcctatttttttaaaattagagagcttggactgctgatgacagctgttttcctctgtaccatgcttctcaccagtaagatcagctatgaagctgtctcttcatataacgctagatctcctttaaggaaactcctgcgtagttgctgttgcagcatttcaaatagttccgagacgctgggcccacttttatcagtcagcctctaactgtcatctgtaatatgtttctggaagtgcctgaaaatcaaacgatagacttgtatatcataaggcatttcttttaagagagctaaaaaatcttttacatccctaatttcccctcacgtagattcaacttccaacaatgtattcccaatgttttgcacttgattaaccattatttcttcttatccttcacaaccgaacccacagttggctacctaaagcacactggctggccattcaaggtcaaagatttagcctggccatctggccatcttgttctcaattataacaagctcatgtaaacctacagttgctatcattagcatctagtttcatttttccattcatacttactattatgtacaaaagatgattaagtaatcatcttattgcacaaagtcagctgtaatgacatatctgtggtctcacagacagccttccccatttgagagtttgggaagttttgcttctacgcaacagacttttgttaatgaactaaaagtggctcaaggatgtcaacgtaccatgtctcctgagaaaggtgcatatgaggaattgaagttcctccccctggacctgactttatacctacaagaaggtgttagagggggccaggcatggtggctcatgcctgtaatcccagcactttgggaggccgaggtaggcggatcacgaggtcaggagatcgagaccagcctggctaacatggtgaaaccccgtctctactaaaaatacaaaaaattagctgggcgtggtggtgggcacctgtagtcccagctactcgggaggctgaggcaggagaatggtgtgaacccaggaggcggaggttgcagtgagctgagattgtgccactgcactccagcctgggcgacagagcgagactccgtctcaaaaaaaaaaaaaaaaaagaaggtgttagaggctcctttacatcttctctgttgatccccagcgcctcctgctctggtggctccttggatgtgtagaagctgtctataattcctcacttgttaagaaaccgtaacctcaaaacaarcaggccttgcaggctttctgtttccatatatttgaaaagagaagagagaggcatgaagcctcttttggaagcagtaaacaacaggaagcctccagagctgctgaggaagggaggcatcttaggagagggatgtccaaagtagtgtactttcgttatgatattctctgtgaattggaacacgaagaagctgaagtcagaggtcaattcattcatccagcattatttaccgagtgtctgctgctgctagggacacaaccctaaacaagaaacacttcctgcttcaaggaatttgcattccatggggaagttgaaggacaagggaagatgcaaccacaatgcagtgtgacaagggccgtgaagaggtgccgtggggtgagaggtggggggtgggggtgcacagtagaggaagggtcaaacctataaatctggtatgatgtagccatgggatggggtggtagagggacattatcccatgcaaagatctagatgtgagaaaaatactgcctgtaggaaactgcaggccgttcagcagggaagcagcctggagcggatggtgggaggggtggaggacggctctggaggggataaacagaagattgtggccggtcgcgcggtggctctcgcctgtaatcccagcactttgggagatcgaggcgggcggatcacaaggtcaggagattgagaccagcctggccaacatggtgaaaccccgtctctactaaaaatacaaaaattagctgggcgagatggtgtgcgcttgtaatcccagctactcgagagggtgaggcaggagaatcctttgaaccagggagttggaggttgcagtgagccgagaccgcaccactgcactccatcctggcgaaagagcgagactccgtctcaaaaaacacacaaaccaataaacaaaacccagaaaatcgtactgcaggcaaattaagagcaatccagctgcttttgagctcccaacttctttctccagttgcccacctgacatctctatttggatgtctccttaagcatctgaaatataaacatgccctgaactgaactctcagctctcgtccctaaatctccactaatctctccttctgggagtgctcaagctagaaaacttggagtcatttttgacattttttctcccacattctttacatccaatccatcactgagtgctgtcaagacaacttccagaaaatttcccaaatccatccacttctttctatctcccctgacactatcgctctgtataagctatggtcctatatgctgagccactgcggtagcctaccccagcctcccatgatgtcctcctcctacttcctccaaccaagtttactcacagcagctggaaggatcttttaaaactcaaattgggctgtgtattcctcctgctatcagcccttaaatagcctcccattatgtttcaaataaatgtcaactccttaatgtgtctgggaaggctcgactcaggctcattgttgtatacttatgcctccttggtccccctgctccagccacatcatttctttcagctcctagaaggagccacgttcccatgttggatgcatttcttccaactccttgcctggctaacttatactctgctttccaatcttgacacctccccacgcctgcccatgactttctcagtgtggacttctttaactccctatggtagactgctaccccaatgaaccctgcctcctggcattcacaccctggggtaaccctctccaacactgatctagttgctgggcttgtgacagaagacaacagaatcactcctgagcccactcctggacaagccattaattggcctgcccacttctgcttcctctcttctgatgctcccttttggaagcctgcttctatgctttgagaagcccaaaccacatagagagaccacgtataggcattttggtcaatagtctcatttgagctcccagctggcagctagcatcaactgccaccatattaatcatccctcttgggtgtcctagccttgttaagcacccagttgactgcggttccatcatatggaacaaaagaaccacccagctgagcccaggcaaccaacaaaatcaagagacatcataactgatttttcttttaagccaccaaattttggggtggtttgaaattcaaataatagataattggaacaatcc

SEQ ID NO: 95411 - DNA, 34399 bp, Homo sapiens
  misc_feature (1)...(34399): n = A,T,C or G
aagagtgggaagggggtgaaggataaaatactacaaattgggtgcagtatatactgctcgggtgatgggtgtacccaaatttcacaaatcaccactaaagaacttactcaggtyaccaaacactacctgttccccaataacctatggaaataaaacaactaaaataaataaataaaatgaaaaaaatagacccccacaaataatgggcagttgttttgagcaaagtttcaaaggcaattcaatagagaaaggatagtcttttcaacatacactgttggaacaactagatacccatatacaaagaaattaatctcaacctatatacctcaaaccttatacaaaaattaactcaatgcatcatacagctaaatgtgcaatgtaaacctataaaactaatagaaaacaggagaaaattttcatgatcttgggttaggccatagttcttagacatatgaaaagcacaatccataagaatgaatcatgtctattatcccagcactttgggaggccgagacgggcagatcacgaggtcaggagtttgagaccagcctggcctgcaaggtgaaaccccctctctactaaaaatacaaaaattagtcgggcttggtggcgtgcgcctgtaatcccagctacttgggaggctgagataagagaatcacttgactctgggaggcagaggttgcagtgagccgagatcaccactgcactccggcctgggtgacagagagagactccatctcaaaaaaaaaaaaaaaaaaatcttaaatttaaaaattttgctctgcaaaagacacttaatagaagggaaagacaagctacatactggggaaaaatactgtacttgcaaaacataccaacaaaggatttgtgttcagaatatataaagattttcactacaacaataagaaaacaaaacaatggggaaaagaagcaattcttcagagaaagatgggtggcaaataggcatgtgaaaagatcatcattagctgttggggaaatgtaaatcaaaaccacaccagttagaatggctaaaattaaaaacaaaaaatgacaataccaagtgctggtgaggatatggaataactagaacattcatacattgctggtgggtgtacaaaatggtacagacactctagacaacagtttggccatttcttgtaaataaacatatgtttactatacaacccggcaatccctctcctaggtatttaccctagggaaatgaaaacttaacatccacacaaaagagttcatggttataactgctatactgtgccacctctttgctgtttgctgtcctggaaacagcaggcgagagctagtggccttctcagtgtttgcttttctcttcaggttgccagctttactcagttacctgtctaacccacgtgggtatattaaattggtctcccaacgttaagtaacttgtccaaagttacatggtgtgtcagcaaagttttgaactcaggtctcctgatttgcagagaactgcatcagaaatttaaaaattctgtgtatctatgcatttatgtgtatatttagatgcatacacactctttgactcctccctgtacacagttctaacccaatatgataattcccaagtttgatcctttgctttctgtagtatactctttccttctccgattgcatctactcatagatttcttctcttattctttgcaaatgactgcaattctgattttcagcccctaatttctgactgctgtaagtcacttgcgtattgtggtgttacgaggtatacacacacatacatacacacattttcaagcacggtccctgactcccatagccttgttaagtcttttgttataatgccagttgtgttaggcctcaggggcaggcctcaggaaacagaatctctctggcctctcctgctctcctttcacctgccccaaggcagaactctaatcttgctgattgtgggtcttaaatacctcctgagagctcctgccccatcccttggaggaaggaatgctgataacataaagttcccataaaggccaatagaactgggtttggagagcttctagatagctgaccacgttcgtggaggttctggagggcatggaagctttgtgcccctcctcccatactttgccctacacatctcttccttgtagcctttgcaacatcctttataataaaccaggaaacatgtttccatgagttctgtgagctgctccagcaagttattcaaacccaaagatgggatcatggcaaccccaacttgaaagtggttggtcagaagttctggagtccaagacatatgactggtgccggtgtgtcttcctcaggtagacagtgttggaattgaataggaggatacccagctggtgtccgctgcttggtggtagggaggaaccccctcacatttggtcccagaattcttctgtgatgatgattgttgtggtggtgatgtaagagcagaggaaaaacacggagagttttcctggaacacatatccacctctcccccaaaaactgagctcacgttcccctagactcacctcatactatgaagcggcagctggaggaatgctgatggaaaggagagaccagttaggaagtgcctgtagcagtctccccaaggtgaggaaggcctacctgtggacggtggtggtgggaactgaaaggaggaatcagggacatttcctgagagtaagaagagccctgtcccttaccagaggtggggaatgaaagactcgaaagtcactgaagtgacttaggttttcttggagggctggaaagcagggagaattagaaaactgggcataaattgtggtgcctgtaagtgctgggtggagaagctcttttggaggtgatacatttagtttcacatagttgagttggaactgatgttgagacatgtaaatagagatggcggcagccggagatgttgaaataggtcctctggagtaaaaataaaaatctgactagtaacagcctggaaatggtcattaagcctgtgagacatgggtagaaatgagaatagagactgaaaaggcacaccagatttttagctgggctttcaagatccatttggcctggtagttttgttttttggcctattttcatacgtcagatgaacaggaacatggaaacgaaggcagagctgctgcagagaagggacagtgaggggagtggtggtggggagggctgcacaaacttcacccttcagccagattcttcttcctttgcctctaaatcctttcacatacaggtgaggaaaaggtcctgagggtgaggtgatttgccctaggtattaacatctaatcagtgtcagagccagaaccagaacccagtgactagcttttccattgtgcccagaaagttctaaagaaaggtttaaaaagcgcactttcatttagcttttccttttctaggaacacccctagtgcccaagtcagcagtttccctgcatgtgacagagggacacagtacccataggcttttggtcttgatggccttctcctggtcctgcttctctctctctctctcttttttttttttaatggagtctggctctgtcacccaggctggtgtgcagtggcacaatctcggctcaccgcaacattcgcctcccaggttcaagtgattctgctgtctcagcctcctgagtagctgggattacaggtgtgtgccaccacgcccagctaatttttgcatttttagtagagacggggtttcaccatgctggtcaggctggtctcgagctcctgacctcttgatccacctgcctccacctcctgaagtgctgggattatgttaattattaaatctaggaggaggacacagctgttcctccaccaggcagtggcgcccggcctggtccttctcctctaatggctccttcccaggctccacaggcccttcttcttttgcgtgtgcctttcatactccgcttgtgtgttctcatccaaattcagagcttcctcttagttaaaactgctggtgactcccaagtcaatttccagcccagacatcttctgagcttgaggctttggtccggttgcctactgggcatctccacctggatgccatggctcatgcctataaggccagcactttttgaagccaaagtgggaggatcacttgagcctaggagtttgagaccagcctgggcaacactgtaagaatccacttctaaaaaaatgaaataatttgcattttgaacaagcacttcaaataacatttccagccaggtttaggaccactattagttacaatgttagtccaataaatttggaaatctagatgaatttttttaacaggttgtaagtgaccacaggttgaccctgaaacctcataggttaataagcatagcagaaatgaaaaggtttttaaagatcttcctgctacaaagccaagtccagatagtctcttaagctgcagaaagaccataactgctatgtatttccccccaatttttttttatgaaagcttaaaattttaaacttctacaaagttttaatctagtaccatgaacagctgtgtcctcctcctagatttaataattaacattttgccatatttgctttatcttatgtgttttctttttgctgacgattttcaagtcaaacattctgatggttcatccctaatacttcctcattttctaagagtaaagaattgtcacaagcacaacactatagcacacaaaataattcagaaaagcatcaaatatctcgttcatatttaaatctccctagttgcccccaaaatgtttttatagtgttcttttacaaaccaagatctgtttcagtataaactattctggggcattccaaaaggtggttaagttttggatttttgttccacaagtctgacaaggcacaaaaacacaaaacacgaaaattaaaaagcaatctaataaataaaaatgcaaaaatcatagtctataggctgggcgcagcagctcacgcctataattccagcactttgggaggctaaggcagtagggtcttgagctcaggagtttgagaccagcctgggcaaaatagcaaggccccacctctattaaaagtaaaaaacttaaaaaaaaaaaaaaaagaaagaaagaaagaaaaagaaaaaaggaaaagaaatagctaggtgtggtggtgtgtgcctgtagtcccagctacttgggaggctgaggacggaggatcgcttgagccgggaggttgaggctgcaatgggctgagactgctgcactgcactcctgactggatgacagagtgagaccctgtctaaaacaaacaaacaaaaaaggatattagcaaagagatgacaatgtattcgaggactgacttgttgagggcatggcgttgaaccctcagcatctttcccgttggcctagcagccttgtagtcagattttacagacgtctcgcgtgcctaaaccaaccagggtcattccgtccccgtcacagagacttgttcaaatagctcaagcccatcagcatacggtgttaacctggccacagaggtgattcaaccagctagaagttcagtccttttgcggagaatcagcaaacgctacaaatcagggctttcctccctgaaaagtctggttgttaagacattcaccagcacaccacctcgacttaggccgttcccttttgccctttgcctttcgaggcatgctttttccggactgtgttgcaattaaccatttctcgttggtccgtcctggtgttacaggcgcactggaatgaacgcagacccttctctcctcccggccggggccaggagaagggggggggtttttattttatttggtttcatttgtagcgtagacaccgtacggaatatttcttatcgttcgctggatggcatatttcgactcgtttctttgttacgcgcttgcagctcatacttgacaggaacacgtacttgataataaaacgctacacaannnnnnnnnnnnnnnnnnnngtatatagaaagtgagctgacttgcaaaaacgcggttgggtctatagatcccccccccccggtaggacgccgcggtccgccggatctccagcgctcagtccgcgccgcaggtggtgcttgtctgcagagtcatgacctgtaagtggcgcggccgcgcgctgcagctcgagttcgggccgcggggggaggctttggagcggcgccggcggtggctcggccggctcagcccctcmgccccgcgtccccgccgtgcgcggccttccctgaggcgggcgtccgcgtgggtccgggatcgcgtggccgggcggccgggcgcactcccgggattccaggcttccggggtggcgggcgaggcccagaaagcaccaggccacccggccgcgccggcacccgccgcgtcctgcttgacagaggctgatggacgtgtatttctccacggtgtgggccgcggtggtaggatccaactcccttgggtgttttcaagttgcgtgacctcctccagccccgccctgcacaaaggtgcccaggcggttcttcgtctccccactcactttccagctccagattttgacttggattcttgctgtgtcacttactttgttcagtgactttgtgcagctttccccctgcaagtcccctgtttctttatttgtaaartgatgttaatgatacctcacacaatgatgttaatgtgtgaaggacctggcacattgctttaaatgttattcctttgttgtttccttcgctcacagtattttattctttttttccgccccttggtaaggtcttcgttgttagattatgatgaatattagggcagccttaaaagtcttcactttacagatgagatggagtgacgggcgtctcctcctcagcatgaggaactgcccagtggcggggtttccctgctgcagcatgtctgtagagtgggtcatttgcagaatgataggcagtcctaagcttagttgaggaccccgcccttgtgggtgagatgtgtaggagaggaagccatcagcgtagccatggtgagctttatctttcccaccctcggaagcacagacatggcccggcacgtggctcacgcctgtaatcccaacagtttgggaagctgaggcacgaggatcgcttgagttcacgagtcawgagttggagaccagcctgggcaacatggcgacaccttgtctgtactaaaaaatacaaaattagcccggtgtggtggcacgcccctttagtcccaaactacttgggaagctgaggagggagaatggcttaacgctgggaaatggaggggagacgtttagtggatttatctgctgttctgataacagctcaaaatatctgtttgccccagaataatcccagcttttatttcctgttttagtttcccttcagattctataactatttagcaggctgccttcagggttaaatttagtgcttctcactatatttaggatagatcaaggaatgggacatctgagttttccttttagttaaccctgagccaaacaggccttcatcagaggccagggtttgtcattgttgccttttctggagacatttgcgttgttacaggaaacacccaaaagagatagctctctaatggtaggattttcagactctggagcagaggtgggatgggragttcgggcaggccattactaattgaaggggtgggttgcccctccacacctgtgggtgtttctcgttaggtggaacgagagacttggaaaagaaaaagacacaaacaaagtatagagaaagaagtargggggcccaggggaccagcgttcggcatacggaggatcccgycggcctctgagttcccttagtatttatgatcattcttgggtgtttctcggagagggggatgtggcagggtcataggataatagtggagagaaggtcagcagataaacacgtgaacaaaggtctctgcatcatrracaaggtaaagaattaagtgctgtgctttagatatgcatacacataaacatctcaatgycttaaagagcagtattgctgcccgcctgtcccccttccagccctaaggcggttttccctatcttagtagatgggacatagaatcgggttttataccgagacattccgttgcccagggacgggcaggagacagatgcctgccttcctcttgtctcaactgcaaagaggcgttccttcctcttgcactaatcctcctcagcacagaccctttacgggtgtcgggctgggggacggtcaggtctttcccttcccacgaggccatatttcagactatcacatggggagaaaccttggagaatacctggctttcctaggcagaggtccctgcggccttccgcagtgtttgtgtccctgggtacttgagattagggagtggtgatgactcttaaggagcatgctgccttcatgcatctgtaacaaagcacatcttgcacagcccttaatccatttaaccctgagtggacacagcacatgtttcagagagctcggggttgggrgtaaggttatagwttaacagcatctcaaggcagaagaatttttcgtagtacagaacaaaatggagtctcctatgtctacttctttctacacagacacagtaataatctgatcgctctttcttttccctacactaataattcctgaagttttgcagagcttcatagattataatgtgctttggatcctttactgctgcgtcccaccagaccataagcaggaactatgtatccatcagggtccagacaggacatggaaacaacactagtaactcgaacaaggaaaattatttatttatttatttatttttttggagactgagtytcactctgtcgtccaggctggagtgcagtggcgcgatcttggctcactgtaacctccaactcccaggttcaactgattctcctgcctcagcctcctgagtagctgggattacaggtgcccaccaccacacctggctaatttttgtatttttagtagagacggggtttcaccaygttggccaggctggtctgaaactcctgacctcaggtgatcacctgccttggcctcccaaagtgctgggattacaggcgtgagccatcacacccggcggaaaattttatataaaaaattattatctggccaggcgtggtggctcatgcttataatcgcagcagtttgagaggctgaggcaggaggatcgcttgagcccaggagttcgagaccagcctgggcaacaaagtgagaccctgtctctacaaaaaattacataattaaaaaattagcccggcatggtggtgcatacctgtggtcccagctacataagaggctgagacaagaggattgcctgaactgagtaggtcaaggctgcagtggaccatgtttgtgccactgcactccagcctaggcracagaacaaggccctgcctcaaaataaaaaatattagctaatggaaagtgattatcataaaagctaaaagggaactttaaagaacagaagaaaagcaaatatgatgtatagctactacctccaggaagaaataagcttggaagagcccccaacctccttgctccagggctgagcacagaccttgtcagggctggctacataatttgtggggcccagttcccttgttcagatagcaagagaaaagtgctgttagcttttccttctgcagtatctctttcaacctctcatggtgttatttgctgtttaatrtcatgttctcttggacacatgaatacttatggggtaagtgcagacttttagaggtgcctgggaccyctgtcctgtgaataggcatgtgtgcagctcactggctgccaggttttccctctgccagcagcgggatcgatgtgctgtgacccagccagtagtggggaaactgagacasacatcttcccttcccatgagctgggctgctcatgggaaktatgtgagcagcttccaaggaatcacactttctgtgctgggacatactcagtatatggattggaggtagacgagaggcccatgaacaaacagtaagggacaggaccatattcaaacccagtctttttactttaagccatattctcatttcattccctacactgcgtagtaagaagctggttcactctagattcttgtgcctggcatgggactttgcccatggatattgctctatctccagatagattttagaytattgacattttggacaggataattcttcgttgtgttatggagggggttgtcctatgcattgtaggatgtttggcagtatccttggtctctattcattagatgccactcatacstcatcagttgtggcatcaaaggtatcttcagacattgtcagatgtccccccggggacataaytgccttccatttgagaactatggctctgtctgaatccagcagttcgatcttctgatagctgttttcttttgtctttgttctcagctttccgcttggccctcatccagcttcagatttcttccatcaaatcagataacgtcactcgcgcttgtagcttcatccgggaggcagcaacgcaaggagccaaaatagtttctttgccggtcagtatgggagcagccattctgttctagccactgtacacccaagcagaacrgtgtttgctagctctggttgtcctcttgtatcctggggtccagcagtgtcccttggagcccatagattgttccgagtctgactggaggatgaccttagcaagrttctttgtgagataggatgtgccaacacggtcataggtctttaggttttggatcttcctctttgttcagatgaggaagccaaaatcctagtataytgagggacttacggaaaactaaaatactcagtgcttggatactttgttccttatttaactaagtctttatagaaccagaacatattggttttagcactaagcctccaacattttttttttaaatgagctctgggagaacacctgtgatttgtctcctccaacccactaggctagctttgtagtcttacctgtggctacaggctctttacccttgagatgtcagtgtttttcttattagctgtgttttaacccttcgactgaaagcagagctagaagcagcagctatggcctcttacagcagaactttaaaatgggtgggtgttttgatctttttttttctctgccaatatttttctaggaatgctttaattctccatatggagcgaaatattttcctgaatatgcagagaaaattcctggtgaatccacacagaagctttctgaagtagcaaaggaatgcagcatatatctcattggaggtaacttcctacccacaaggtataatgacctaaacattagaaacatctgaatgagtcaggtgtggtggcgtgcrcctgtattccctacttgggaagcttcagcttgggaagctgaagcagagagtttctttttcttatttatttattttttttgaggtgaggtcttgctttgtcacccgtgctagagtacagtggtgtgatcatggcccactgcagcctcaccctacgaggctcaagtgattctcccacctcctgagtagctaggactgcaggtgtgcgccaccatgcctggctgatttttgtatttttttgtaaagacagagtttcaccttgttgcccaggctggttttgaactcctaggctcaagcagtctgcccaccttggccttccaaagtgctaggattacaggtgtgagccatcatgccaggactgttttttactatactaatagaggattgagaaaaaaaatttttttccatagaggccacatacataaaggtagctttatttttgtggttttggaataaatgtttaaaggttttatttgcttaaataaaaaataaacacagaaaaattctataaatatagcaaatacaattttttctgtatgatgatatattaagaattagaaatgaaggcaaagcaagaagcctggagatgaaactgcattcagtgatggagaggcttctgactttacgttctcatcttttgggacacagttttgttgcagaacctggtgaattcaagttaagcaatgggaaatttctcattttgccctaatgttacagattaagtgttactcaagatcatggctgaatttcaggaacagtttggttattttttaaacctgtctttggcatctaacctaatcatatcccatctacactctggagtttatctctgaaagatcatattcaagaaggaaaaaaaaaaccatgattaagtaacccatagaagggaatacttattctgtattatagaatgaggtgttgccttattctaaaaacaaaatgaataaataaaccgtaaaagataggttctttatttttggacccaagttatcaggcttttatccctttctcacaaaagaattgctctattctttttcttatggtatgtttcttctctcaatgaaaggctctatccctgaagaggatgckgggaaattatataacacctgtgctgtgtttgggcctgatggaactttactagcaaagtatagaaaggtaagtaggaagtgtggcataagaatttgttatctctaagccagcaacaatgtgtggaaaaaaaatttgctatgaagttccctagtccctctcattatatcacacatgtattagggttttgactgattgrcacaggtggttattcttggccatttgcatttttatataagttttagactcagcctgtcaatttctgcaaaggaacaagctatagtaattttttttttgacagaatctcgctctgtcacccaggctggagtatagtggcacaatcttggctcactgcwagctctgcctcctgggttcacaccattctcctgcctcagcctcccgagtagctgggactacaggtgcccaccaccatgcccagctaattttttgtatttttagtagagacttggtttcaccgtgttagccaggatggtctcaatctcctgacctcatgatccacccgcctcagcctcctaaagtgctgggattacaggcatgagccaccgtgcccagccaacctatagtaatttttattagtatttcattgaatatatagagaacactgtgggaagagttgcctctttttagtattaaatgcgtatacatgaccaggtgcagtggcccatgctgtaatnnnnnnnnnnnnnnnnnnnnnnnnnnnnnnnnnnnnnnnnnnnnnnnnnnnnnnnnnnnnnnnnnnnnnnnnnnnnnnnnnnnnnnnnnnnnnnnnnnnnnnnnnnnnnnnnnnnnnnnnnnnnnnnnnnnnnnnnnnnnnnnnnnaaccccatctctactaaaaatacaaaattggctgggtgtagtggtgcacacctatatagtcccagctactcaggaagctgagacaggagaattgcttgaacccaggaggtggacgctgcagtgagccaagattgcgccactgcactccaacctgggcaagacagagcaagactccatctcaaaaaaaaaaatcatatacatttagtatcattaagtcttcttgatgagttgacccttttatcattatgaaatatctcttttttttcttgtaatacctcttgtcttgaattctgctttatctctgctatcactatagccactccagccttcttatgcctaatgtttgctggtacgtggtttttccagttctttgttctcaagctatatgtgtttttatattttaagtggatctcttttgtcaacagcatataattgtatcttaattttttctttattctgacaatctgtgtcttttaattgaagtggttagtccatttatatttaatgcacttattgatatgattgaatttagggatagagacattttacttttttttccctttgttcatcttttctgtattattttggattaattgaatattttttagagttctgttttaatttatctattggctttttagttatacatcttagctttttttttttttccagttgttgccctgggaattatcatatgcatccttaacttttcacaggctacttaagagttcatattatatcatttcatgtgaaatttaaraaccttataatgatataggtccatttttctaccccactgcccctgccctcattctttatgctatagttgtcatttgtattccatgtatatatgttataaatcccacaaaacaggaatacttgatttaaatagtcatatgtwttttaaggaaattaagaagaaaaaaatctttatgtttacccaaatatttatcatttctggkgtttttctttccttcctgaagatcctccttctatctggtatatccttcaraccaaaggatctcatttaraatttttgttctgaggatctgttagctaggaattctgttagtttttctttatgaatatatctttacattgttttcattcttgaaagatatttttgctggaatagaattttggattgatagttttcctttttttccactagtagttgttatctagcctttttttttttcttccctgatgagaagtgagtagtaatttgtattgttccctcggatataatttgttgttttttctctccttctttcaagtgttttcataatctttagttcttagtattttgactctgatatgcctagatgtggtttcctttgtctttgccttccttggtacttcttgaaactgtaaatttaaatctttcactgtgtttgggaagttttttgacactattttgttaaatatttttctgttcctttttcttatggagctccagtatatgtatattatatttttaaatatttttccaaggtcaycaggctctgtttttctgtttttgtctttccaatactttttcctwctcttctacagattagataatttctgttgatctttcagacttattcactgtttcttctgtcttcttcaatttcccgtaagccaacccagtgaaattttaaaaaattgagatattaaaattttcagttctgaaatacccctttgcttcttttttatagtttttattactctatgatattttctatttgttcattaaaagcatatttttctttacagtgttgagcttagttagtttctatagctgctttaaagtctgataattatcacatctgtgtgccacagaatgagactattaggcctttaaaaggcccctgatgtaaataaactcatatccaagcaaacaacaagaaaaaaattataacatctgggtcatggcaggatctgtgttcatttgattgccttttctttgcagtttggatcacacttctgtttctttgagtatctactaatttaagattgtacagtggattatatattgtagagattcaagatgctattacagtcttccaaaaagtgttgaatattttgttttaactgatggttaacttggccgcacccaaacaccaaactcttatcttctttgaaacgtgggcagcaactttagctgctctgttctatctggttgttctgccccacttctatttaactcagtgatcagccagagatttagaaagattttatatgcagaatttagggctctccctctttgctttctccatttcaggatttccccccttggtttccagctctggttcttcaagccagtgtgattatgggtcattttcaccactacttatcacagcaactgggaccttgcttcagggtagcagctgtaaatagcaccaggaagttcacccagggctgttccctgcttccacatgtctgtgttcttctcttcagattttgtctgctttgttttggtcattcttcagtgctttaagtagttgtgccttttattttgtccagagttcatagttaaccacaagaaaactggtctgataggagctactgtgtacctgctggaagaacagccagcattggactattaacccaactctttgaagtatatctttttagtattaagttttccagtccatgaatgtggtatatatcctgacatttattacgctttctttactttctctcaatttctttttatagttttttgggtataattttgtttaacatttgtgagatttattcctcattggtgtttttagatgctctttcattttctgtttttgtttttgtttttttgagatggagtcttgctctgtcgcttaggctggagtgcagtggtgtgatcttggctcactgcaacctccacctccctggttcaagctgttctcttctttcagcttcccaagtggctgggattataggcatgcaccaccatgtctggcaaatttttgtatttttagtagagacggggtttcaccatgttggccaggctggtcttgaactcctgacctcaggtgatttttaaatgcccacctactttccacctctcctgtcaatttgtcagtttgattctgataagtattttttttttcttttttttttgagagagagagtcttgctctgtcacccaggctggagtgcaatggcgtgatctcggctcactgcaacctccacctcccaggtttgagcaattctcctgcctcagcctcctgggtagctgggactacaggcacgcacaaccacccccggctaatttttttttctatttttagtagagacaaggtttcactackttggccaggctggtctcgaacccctgacctcaggtgatccgcccacctcggcctcccaaagtgctgggattacaggcatgagccaccgtgtccggcctgattctgagaagtctttatttagcatttatatttttaaaaagcaacatattagttacctcccatgagaaacctagaggttgatttgcagactgctagaaaataggggttataaaaggtacagtatcatttttccagttccctgtggtagaattcattttgataaggtgtcagccagcttgtggggtggattataagcagtttgggggtgctgtttgtatagttaatcttagagcaccttccgtatctgcccggggaaagatattgtcattactgccatggaccctgctggaaaagaggtaaccaaatccattatttgtgatgcagatccatctgtttgacattgatgttcctggaaaaattacatttcaagaatctaaaacattgagtccgggtgatagtttctccacatttgatactcgtatgtaccagataagtttgcctctttagcaatctcagtagaagacaatcaggtatttatttcttttttgtctctctccratttcttcacataacctaactgaaagaccataagtgagaaaggcagagaatcatcacagatctggaaagttcgggcttatttgagaactaaggatttgacacgattttgccctttgatttgattgtagcttcctgttayggcttccagagtatacctattaggctacagttgagtacctcccatctakataataagcattcaattagaatgaatttctcatctttastccgctgatgtaaatgatgtctttatgagatgaagtccaagtaggaatgagcttgtaaattatctctgtcctyaggtcctgtgttaatttatccctgtcagtgttttgtgatcattatgtcatggaggatttcccctgccacaccatgctgtagggagttaacttttcatttgtgcattttctgtttggaaacagcttactgcagagtgggtctgggcatctgctacgacatgcggtttgcagagcttgcacaaatctacgcacagagaggtgaggcagtgtaatagctgtgttatgtgggtgcttggaggcttggttctaggctggtctatgtgggatccttagtcaagaaaagctgggagagggctctttaatttctccatcttcagccctttcacccccatgaggcttcccagacttttgctgtgtatggatgacagggtttttggggggttgtaattaaacacatcatgtagctaaggtaggagctgtgctcataaaggtctggtctacccttgagtccttgttactgtgtttggagagtcacttgaagcccagtagaaatgaagtggatttcaccactcagtacccctagacattgggtacaagtagaaatgtggtctgtgatattttggtccagacgaggagaaatgtgccagtatctgggaagagcgagttcaaaagatgtgggttctagttccaactcttccctttaattggcacagtactttgctaaaatgatttcacctctagagcagtgtggttctcagtttagtcacaggaatgatatgaggattaagaaragagaacctataaagcccctcgtgtggtactcaacaaataccagcatccttactagactgcttgaagctacttccaaatagactgtcacttaaccaagtgaagtgggtggaaatggtttgactgcctgctcagaaggtggaggtgcatgggctctggggtcagtagtctctgttgagccatatatcaataagcsttagggcaactcctcggcccctaatttcagttgaaaagaattacaaaacgtggtcattggccatgtggagctgacatatggagctgagataaatttgtttttttttgtttgtttgtttgtttgtttttttgagacagagtttagctcttgtcgcccaggctggagtgcaatggtgcaatctcgactcactgcaacctccacctcccaggttcaagtgattctcctgtctcagcctcctgagtagctgggattacaggtgcccaccaccaggcccagctaatttttgtatttttagtagttatggggtttcaccgtgttggccagactggtcttgaactcctgacttcaggtgatctacccgcctcggcctcccaaagtgctgggattacaggcatgagccaccgcacccagccagagctgagagaaatttgaatgacagttctctaccttatttttgtttgtttgttttgaggcagggtctcactgtcacccaggctagagtgcaggcgtgatcatggctcactgaagccttggtctcctggactcaagtgatcctcccacctcagcctcccaagtagctgggactctaggcatgtgccaccacacctggctaatttttaaattttttgtagagatggggtctctctatgtcgcccaggctttccgtcctttttttaagtgaagttgataccggtgggctaggggaggcccccaaacaccagtctgaccttgaccccagccagtgtccatgctattgacactattgcaagaaggaattcaaggatgagtcagaaaatagtggaagtatggagatttattgcaaagtgaaaagtacacactcaaaaaagggagggtgtgtgtactcaagagagtcatgcgcaaggaggtttgggccatctacctttatgggtttcctttttttttttgagacagagtctcaatctgttgcccaggctggagtgcagtggtgcgatcttggctcactgcaacttctgcttcacagattcaagcaattctcctgcctcagcctccccagtagctgggattataggcgctcgccaccacgcccagctaattttttgtatttttaatagaggtagggtttcatcatgttggccaggctggtctcgaactcctgacctcaggtgatctgcccacctcggcctcccaaagtgctgggattacaggcgtgagccagcgcacccaccgcctttatgagtttctttaccaaggggtgaaatattcatgacgcttcctagaaaaaggtggagatttctcggaattgtgccactcattttttcaccaaatacgggtgttccagaaactatcatggcacgggtgggtgtgtgatttagtatgttaatgagcttataatgaggataatgaagtcctaggtgaaacctaggtcaaacccagcaccatattgagtccactgggtcttagccctagtttctcagggtcttagcccctagcgtaggcagctatttcaacagtttctttttgctagtcatatgaaactgctgcctggaattttctgttctcttgcgaccgtcctgtattatttctgtctcaaagtcacatgtgattttggtcatcaacaccacttttcttgtgtgtccatatgtgtgtgacttacgtgttygtattaaaggaattcagagccatatcttaattgctgctggcactgtctgacttggctgacatctttttatgtttgggaaagtttgagttcagttcctgctagataaggaacagtggggaggactggttttgttgagtgctcactgcatccactgttctttggcttttctctccccaaggctgccagctgttggtatatccaggagcttttaatctgaccactggaccagcccattgggagttacttcagcgaagccggtaagaaaggaaccatatattcaagcctctcggcatgtcctctttgtagaaagatttccggttgggtggaggtgccagccttcctgatgtggattctgtccctgactcaggatgcccttgtatccaaatgcagttggaaaggatgaagctataaggaggacttctactgcacgtcactttctcctcagaagccacaataccaacctcatggattttggaaactgtacttttttttttttttttttctttttaagagacgggtcttaccattgcccaggctggagtgcagtggtgtaatcatagctcattacagccttgaaatcctgggctcaagagatcgtcctgcctcagcctcctgagtagctgggactacaaacatgcgccaccatgccttgctaattttttattttttgtagagatagagcctcactctgttgatcaagctggtctcaatctcctggcctcaagcgatcttcccgcctcagcttttcaaagtgctgggattacaggtgtgagccccaagccctgccggaactgtggttttggcattttcaatattcagtgtattagatgggaagggatttcatttttctgtgattagatgtggattggtccctcttaagtcagttccagcaacttttacagagaaattgagaaccacagagcttatgtcttcagagccccagaagccaattaaaaggcagggattagtttagcttgacctagggagagatttgtggtctgtacccagctgattctatgccattcagatcaggatgcttatcctaccccctccttcacaccatcctactagtcctgagggtactgtgccaagaaactcatgagaagctcttgttcttctaacctataactccagggctttgcacaagcatctttggcaggtcacaggtgcctttccttagtcttctaaggctgagaggtggtgaagggcaaatagcataggtggacataagatggaagggaaaatgaatgtgactgtgagtgtgtctgtctgtctgtaaagtgctctacagcccatgaaatgctggtctgagatgatggttttctttagaatttttaaaagttgaagtaatacaaaaaaagtgtactaattttaagcatagaggttggtgaatttttgtgtattcacctgccaccaagatgaacataacagaacatttccagcccccgaggatgctcccttttttgcccctttctagttagtactcctccctctgcctagaggtagctgctgttctcacttctagagatggtggtaatgtttaatgtaagggaaagaggttttagctggttgcatggtggaagatgggggtaggggtataagatgccatgagtatcagtgaaggtacagttttgtcaaaagtgagaagtttctgggatactgagatgacccagcatgggtctgttaagtctcgagggctccgaggtgaggtgctttggtgtacctggactgcgagctgcaatttttgttctatttgaggtgstgggactgccaccatgggcatggaagcgccatgtggcctgcaaggtgtattgctctcataaggccactccattctctccggccaccttgacttgctttaaccagagaagctcttctcttatgttagcttatagcaggctttctcagcagtggcactgttgacatttaggtgtgtaattctttgtgtgggggctgtcctgtgcatggtaggatgtttagcagcatctgtggcctctacctgctcgatgtcagtagcatctccttagtcacgacagtcaggaagatctctagacattgtcaaatttggtgggcaacattgctccttgctgagaaccactggcttatgcagtaaggtaactttgcacaatgtgcaggttagttacatatgtatacgtgtgccatgctggtgtgctgcacccattaactcgtcatttagcattaggtatatctcctaaagctatcyctccccsctgcccccaccccacaacagtccccagagtgtgatgttccccttcgtgtgtccatgtgttctcattgttcaattcccacctatgagtgagaatatgcggtgtttggttttttgtgcttgcaatagtttactgagaatgatgatttccaatttcatccatgtccctacaaaggacatgaactcatcattttttatggctgcatagtattccatggtgtatatgtgccacattttcttaatccagtctatcattgttggacatttgggttggttccaagtctttgttattgtgaatagtgctgcaataaacatatgtgtgcatgtgtctttatagcagcatgatttatagtcctttgggtatatacccagctaccaatgactttcttcacagaattggaaaaaactaaagttcatatggaaccaaaaaagagcccgcatcgccaagtcaatcctaagccaacagaacaaagctggaggcatcacgctacctgacttcaaactatactacaaggctacagtaatcaaaacagcatggtactggtaccaaaacagagatatagatcaatggaacagaacagagccctcagaaataacgccgcatatctacaactatctgatctttgacaaacctgagaaaaacaagcaatggggaaaggattccctatttaataaatggtgctgggaaaactggctagccatatgtagaaagctgaaactggatcccttccttacactttatacaaaagttaattcaagatggattaaagacttaaacgttggacctaaaaccataaaaaccctagaagaaaacctaggcattaccattcaggacataggcatgggcaaggacttcatgtctaaaacaccaaaagcaatgacaacaaaagccaaaattgacaaatgggatctaattaaactaaaagagcttctgcacagcaaaagaaactaccatcagagtgaataggcaacctacaaaatgggagaaaattttcrcaacctactcatctgacaaagggctaatatccagaatctacaatgaactccaayaaatttacaagaaaaaaacaaacaaccccatcaaaaagtgggcgaaggacatgaacagacacttctcaaaagaagacatttatgcagccaaaaaacacatgaaaaaaatgctcaccatcastggccatcagagaaatgcaaatcaaaaccacaatgagataccatctcacaccagttagaatggcaatcattaaaaagtcaggaaacagcaggtgctggaaaggatgtggagaaataggaacacttttacactgttggtgggactgtaaactagttcaacccttgtggaagtcagtgtggtgattcctcagggatctagaactasaaataccatttgagtaaggtaactttttaaagagaaggttccatggctctggcttccttctacatctgagttagcctgaactatcctattttttaaaagaaggatctatctacttgggttrgaaaaatgtcagatttataatgtaygatttacctctttcctgtctattgactacagggctgttgataatcaggtgtatgtggccacagcctctcctgcccgggatgacaaagcctcctatgttgcctggggacacagcaccgtggtgaacccttggtgagtaaggctaagtgagaataggctcagtcggagcttgagcttgagtggtggctcgttggcagatgggttttctggttcctgagcagccaggcgctcacttctcactcccatttccccacatatcctgccagctttctgcctgtctctgtgagaggagcttccatttgaaaaccatgtgagaagcaaatcaccctgctctcatgatcaagcacttggccttagccctcttctgagtttctggtgaccttcactgtcagtcatacttggatcacatggggaaacaaggcagcagtgacaggcaggttgtagtaagagactctgaaatttttggttaaaatttaagttggctgactagtcccagggtaggaatgagttacagggtgaggactttgcttccagcataatgatcagaggagcagtcaggatggttcaataagtgaaactatgaccctctccccaacaaaagggtgaagcattttattactcagtggagccagcacataagcctgcccagacagaattacagtcatacgctcatacgcattccttacagtctacatttgtacagtttacatcctactttcacaacatggtctcaacttgaactctcaggaaattgttcttattaagcccagtttatagatggtagaattacagaggaagcgactggaattccagatgtagcggctagacccagtgtttgaatccaggatatttgccttcagaacttggatgtattccacactagttctctgtatgaaagcacacacacacactggtatgtatgtctacatttcaggatgagtataccagtaacaagactgagaagagttaaatgttactgtggggttcctgagggttctgtcttctgcctttataggtagggctcagagctcaatgtgtgtggtggggaggccttggaagatatgactagtgtgagattccagttggcctcctgcacattaggcttggggacattgaargactaagttgacttgaaaattttcttgaacttgcatcaggttccactgtccagaaatctttgaatgccagggcaaatggggaagaatcagaaaagaattcagttacgtgtcataaatggtggtgcttgtatttgtaactcatttgtgccaaaagtctgtctgtggctatctggtaaacagaatcagttgttatgtcagattattttggagaaggttcatttctctaggtaagggtttgaacccttgctctgggccaagagactagacactggagatagtttcttttttctttttttttttttttgagatggagtttcactctgtcgcccaggctggagtgcagtggtgcaatctcagctcactgctgcaacctctgcctcccgggttcgagccattctcctgcctcagcctccgagtagctgagattacaggtgcacaccaccacgcccagataatttttgcatttttagtactgatggggtttcgctttgttagccaggctggtctcgatctcctgacctcaagcgatccacccaccttggcctcccmaagtgctggggttacaggcgtgagctaccgcacccttcctggagatggttttacaggtcagccttaccctggattgatgaaggagtgtggctgttccctagtgcagggctcctgccagtgtgaggttaccctccatccccccatgccacttctacccagtcgccagaggttgaactctttccctcaaatctgaaactgaagcccattaacacaggggttcaggtatcacagccaccagggcagagaccccagcagatctggggccctgcctaggcccagcttcaccactctcagggagggtagcagcccaggcaggtatgaagagtgggtctggactgccattgtaaagggggggtccactgaaatgcactcatgagggcatgagatggagcttcctgttggtggtaggtagctctattgccagatctttataatcatcagataaccaccgtytcctagtgatttgcaatttatgaaacatgatccataattttatcactaagccctcacagagctcttatttccactttatagattaggaaatggagatttaaaatgccttcccataaggkcacagagctatttaaatgatagaacataaatctgtacgactaccttcttgttttcaatctcatactttcccctttggcctgtgagcttgggaggaaaaaacagagaccttgaatatcaccaaacatcartgaatccactcattctcttctgcatctttttcaggggggaggttctagccaaagctggcacagaagaagcaatcgtgtattcagacataggtaagattttcctgggcatggtttaggtctctgatgtccccattgttctgaggccagactccatggctgggaagtccctgtcatttggaggggttcctttatgccccttctcattgatctctggggatattctagggtctggttctctggccaadccctggggagtgtatcagcttgaattttcttggtttggtttgaaatgatgccaggccatctgtgcacctagataagacctatgttactaagttacttactaagactctggtggtttatacagtcaggggaagaaatccccttggttagtgaggagttgcaaattattaatagtgcactttcctgttttttgcagacctgaagaagctggctgaaatacgccagcaaatccccgtttttagacagaagcgatcagacctctatgctgtggagatgaaaaagccctaaagtttatgtttctaatgtgtcacagaataggacgatatgattctacaacataatcaactccctattaaattctttaatgaagattttttttttaattcggccttgtccttcctaggttctctattgagatgagaaagcctcattatgctgacattttccacgccacattaaatagttaaaaaggatgcagcctggagccagagagcagaaagctgggctggttctgaagcttcttccatacttaagttgcctccaagcagtttgtgaaagtatcagatcttggtatcctggtgattgattcacctaatataaatatatttgtgtcatgaacctcttatcccgttgctggagttgtaatctccatcatctagaaaacgtggtctggtgctattcttttccaagcagtaccttgaagttccatttttggttcatgagtagctatagaacgcaaggtgatacatctttggtgtttgccagagaagttggcagccccacccctcctaccagcctttgcactcttcaaatttaaaaaggagctacttatcaaccccaggcccttctggtcttagaggaaggactgggccaacaaagagcaccatgggagaatggcagtggtggcatttagtgaagacaatttagtatgaatstctgcaaaagatttttttgatagcgttgagtgtctgaaagtcccattatttttcttttttctttttccccagtaacactttctagctccacggataaggaatcactgaacctagtagttcttagacagcttggtttgagaatccttttgcggttaaaaattagggactgagccaggcgcagtagcatgcgcctgtagtcctagccacattggaggctgaggtaggaggatcccttgagtccacaagtttgagttcagccagagaccctatctcactatatatatgtatctcaaagacttcaatgggtttttgcttacatgggccagtaattgttgaacaaccagctatttgagaaaaagccctgattttgctgcttttcatggtgtaaatacttaaccatggctgagtttgagctatctgcatgacacctctaaacacagagttgggaatagatgtgcacaatcagctctggggagctggtgcaatcctgccctagcacaccactggtttaagatagatatatcatatagatatttaccatttaccatattggaaagtaaaatggagaaaaatttaaaacacaagatacatgagcacacattccattagctattaaggtgatggacacggtgtccaaatgacacggtgtcatttaacttctggaaaacaacactgtgtactgagaacaagagaaagacaaatgacttttttaaattaagtttttaatttacaattgatgcataattttactttaaaaaaataagtgtgcaatttggtaaactttgacatatacagctataaaccactccaatcaagataacatatttaccacccccaacagtttccatgtgctgtattataatccctctggctagtcctttgtcaatcactgataaattttattactatagattagcttgcattttctaaaattatataaaaatgaaatcatgccattagtgctttttctgtatgtcttctttcactcaaaatcacttggaactcaaaattacttctttcactcaaaatcactcaaaattacatactctgtatgtcttctttcactcaaaattacttctttcatttttagacggaagcatttagacctcaaaattacttggagattcatctggtatgtgcattaataattcataattcattccttttttattgctgagtagtatacaatttgtttatccatttatctgctgttggagatttgggctatttccagattttggctgttgcaaaaaagcaacctcacagatccttttaaaggatgtcaggtgctttcaggtaaccctagactatagtaccactgctctctatcctagcaggcacactgaaagttaaaccttgtaatagtgcgaaatcattttcttttttaaaaatatattttcttacttttatatattttactcaatctcatgacagattacattttcttttttaaatagaaagtcttactgtaaagcccacatctgtataaaaaaatgaaagaatgatctggttgatgtggatgtgtggaacctaggaaccttctcttggattttctcttattccccaaaaaacttcatttcctctaaagagctgctcagaagtttgaaaaccagtggacaagccatcctagctgtcttgatgctagagaagcaaagacgctttacagagatgtagcattcctgtaacaggtaaggcaggtggatgctaaactttttacatttcttttttttttttttttttttttgagacagagtcacgctgtcgcccaagctggagtgcagtggcatgatcttggttcactgcatcctctacctccttggttgaagcaattctcaggcctcagcctcctaaaagtagctgagactacaggcacgtgccaccatgcctggctaatttttgtgtttttagtagagatggggtttcaccatgttggccaggctggtcttgaactcctgacctcaagtgatccacctgccttagcctcccaaaatgctaggattagaggcgtgagccaccgcgcccggcctaatttttgtatttttagtagaaatggggtttcaccatgttggccagtctgatctcgaactcctggcctcaagtgatccaccagccttggcctcccaaagtgttgggattacagacgtgagccacggcacccagccttttgtttgtttttgtttttatgtatttcattaaatgaattgtccttttagtggtatatcaggagatcttgccttctggtactcttgaaaaatatgaaaagaaacaactgaagtaggcatctcctataattagtatgtagcattttattctcagaaaatgtgtggtaacctggccctggattttacctttttgcaaagtgatatccgaataaaatgaacactagattcccacttggagtggaagaacattgcagttgaggccttgggtaagttttaactgccatacccctgtactccccgactttctaatgaattagacaatgatgttttatttttgttttttgtttttgcataatactttgaagtctgctatcacaagttgtgaacctctatctcttgcagtttaggtaaggcaacacatttaatgaattcacatttaagtgaattcctcacagggatgacgacctctgttgaaataggtcaggatgtgcagtttgtggtgaaagttctacttgactttgacctagctgtttgaagctgagagctaacagataataagtgttgcactggttgcaaatgaataaataagtaacattatggggttttaaatgaccaaggagtagattgtgacatcgactgggtatttagggaaggactccttcctgataccaaaagttaggtctgtgcaaagtacaccaagtggaaaaaagtttagacaagagtttaggtttcaagataaatgttctgctctattggcactggttttaagtcttttgtgctactttttaggcattgctgtgtaagttttggtggtgcgtgggtacaatgaagccaggagggatagaaagggaaatgatgtgtgtgctgcaggctaaacaggggctcttccttatgcctcataaccacctgtgtgtgacagtttcacatttcctatcaaattattatcttcattcatttctacttgtgaatgaagttcggagactaagaaaaagccagctgttggaatagaaagcactttaggataaaatggtcttgttaaaatcaccaattaaaaagttaagcccctgatgtacaaataactaaaacacatacatacaaagacagtgcttcttgttcaatgatttacttcacagctgattcataatcaaatgaacaagaatctgcaagaacagaacatggtgggcagggtccagtaattccaaatgttgtcatcctagctcttcctgaagcatattgaatcctccaagtatatcccgttgtgctaactaggctttaagtcttttgtctgtagattcattctcaaagtttctccctcagaacaaagagcacgccatcctgtaaagtactcttcctgattttttttcacccaatttcttagtttctttcaattgcttttcagaccccggcaggcagattctgccctcatctgtccagtgacactcttctggcagattactaaagaccgatttgtagacctgtccatgtggcctctctcaacaccattggtgtgaccttgctcatactgcctctctcaccacttaacattgtcccttagatgttaaaggcccttatattaatagttttattttagctcctttacattttattttgtcctgaggaatctcagctacatgcatggtcttcaatatatgccgataattctcattcacatagctctcctgttggcttttccccactcgtttaaaaacaaccacttcactttgctggactctaccttgaatgcctcattttcagctcacactcatgctgtgcctttatttagatttgttgtggttgtttccccacattctggaagctccttacctaaatcctgtttattccttaatgcttagcacaatttattactcttgtttccatggcactacattgtacttctgttttagagactaccttcctctgaagcatatgacaggttcatttactatccagcccaccaaaactcagtttttgagctcctctatgttcatctttttatggctaaccctcaccatcatgagtgcttagtaaatgttgagttggaatgaatttattcctacaggttgcacttgctctctcaccaagtgttctggccaaataattctggaatgatttccttaccttaagggagtctgatctgggaagagcctgggacgtgatgtaacttcatatgctgtagagctgaatattcatttacttaagatcttagctccattagaaagcagtgaaagcagtgttaattcagaggccgggtatggtggctcacgcctgtaatcccagcactttgggaggccaagatgggcagatcacttaaggtcaggagttcaagaccagcctggccaacatggcaaaaccccatctctactaaaaatacaaaaattagccgggtgtggtggcacatgcctgtgatcccagctactcgggagggtaaggcaggaggaggttacagtgagccaagatcacaccactgtactcctgggcaacagagttaaactgtatcaaaaaaaaaatgcagtattgatttagagctaaggtcacctgatgctcaggccagtaatttctccctgcatcatgctgttgtctaaggcagacactgtaaagctctacactgctgaaaaactaagcttgagatgcataaaagaacacatagagatggggagtcagttctccatacattttgtgagtagaggcattggtgttttgttccaaactatccaatcgagaatgttcatataatgacagctttggaaggtagagactatcttcctctggatcataggacaggtttgtttactatctgatacagtcaaaatagtgtttccctctaatgcgaaagtcaggccagtttgcttgtgacctcattagatttgggctgtgacgcaaacccactgcatgtgcagtatccacctagcttgccctgtgtcactcccatgggatctgtggctcaaactcatgttgcttgctatgttctaaataattaagtctgttgtctgacccaggagtctcatgtcttctgccagcattcagaaaactagttttcaagaagggtaacatcttagaccttttacagctcttgacacagagcaatattgagaaataaaatcaggtaaaagttatttaatatagcagttcataatttaggccatggatcatctctgcagagaatcctaccatgctgcattcttgctttaaacctttcgccctctaaaacaatgcccaagagccaatgttagtcatggtcttcctgtatttgctctaggtaagctgtttcatagccttccaggacaacacttgcacaggttatctttaagcaccaacaaaagaaatggagaaatttgagccatgtatcctgagctctgaaaggcagcaatcatcttgaccccaagcatacaccatgttcagcttcctccccttggccaggtaccacagctacttctatcccagtgatcagcaggccctccagcatgaagacctttgagaaggatctatagctgtcaactcctaatatgatttgtgcactatcaccttgaagtaaaccagactagttattttcatgctaagagtctgaaaacagtgccttctttctgatgtctcttgtagaatattggcagagggatctcaatttttactttatacctgaagggcagctttttggtctgatagttatagtgcaatcattcatattttaaatcacaaatacccccacttgttgatgaaaactccagtctgtggcatgggtgtacattcactgcctaaaccatctttggccaaaatttgtgtgtatatgaagtcattctactttagcatactcaaaggcattcctttaaaccatttatctgcttgtacacaatagccaaaggaatatttgttactatggctgatgtaataaactatcatcacaaatttagtggctgaaaaaaaacaaagttattctcttttacttctggagtccaaattcatggggccaaaatgaaggtgttggcactctgctctagggcaggatccgtttcttgccttttccagtttctggtagttgccaacattctttggcttgtggccacatcacctccagtctctgcctctgtggcaacactgccatctcctcttctgtctaaaaccttcctcttacatagacatttgtgactgcattttaaggtcaccagatcatctaggataatctccccttctcaagacccttcactacatctgcaaagcccattttttgccaactaaagtaacattcacaggttgcagggataaggatgtggctgtcttttggggaatcattactcatcctatcagtgtggtaaagcttgcaagtaaattaaaattttgtcactttgttcacaaatcaatttagcagaggatgggaataggactaattataacccgtatccccacaacaactcctaagttatttccttataaatacaaattccatacaggacagtcttgggtaattgttattctatactcctaagtttcctggtttggctatattgtcctcctgttatagtcttataacaattagttgacttctacaggtacaaactactatttaaactacaatttgagttcccagagggcagaaagttctgtctgaactgttttacagccaaagttgctttttattgttttgggatgtattctctacttataccacaattttcgaggatgattatttcaggtatgctttctgagagactccacgtggttgagaactatgatcaatctcactggtgaaaccagattcaaaataaacttatccacagggtccatgtctgattggcaagcttccaggctgctgtgcatgtatgggtaaggtagaggcaaagaatgaaataagttggctctaccagctctccgtggagccttgtttcacagtaggaggggtggatgctctcaagaaactccaccattcataccaacaaacttactttgcttcatatgctaacatttcctgtatgttcctattttc

SEQ ID NO: 95412 - DNA, 25621 bp, Homo sapiens
  misc_feature (1)...(25621): n = A,T,C or G
ctgcctgcctataaaattggctgcagtccgctgcctccttgactttttggatgtctttctctctctctctctctctctcgcaaagagctgctctcccatatcctttttctgtctattaaactttccactccttaactcacccacatgtatctgtgtcctgaattctttctccacacacaacgaacgccagggtatataccccagagagtatacagccttcacttgggtgtacatgggtacttgggacccaggatgagtagggaagtcagtaaggagtgtgtcatagtttcaaaattcttttcagtaacttaaaatcttaaaatcatgttatgttaaactaagtaatagataatcatgaaatatctgaaccatttaagtaactttaaaaactgaaacattacttattaaacataagtttaagtttataaactttggcattttatttttaatatgatacagaaaacaaaatatatttcaatctgttaatatacaaaaaattgaggaaacatctttctaaaaattttgatttttatctacgaatacagatatagacagttcaaaattacttcccatgtttttcactggaaattagtatttctaagagttaaaatggtagtcaatatacataattaaaactaatagccataagagaatcaattctacatacaaagtgtataaaaaaagtaagatgtaattttggtgaagaatgttataagacagatatgaggatgttgttttaactcttagaaatccttttatcctatttgatgaccatgaagttttgattgcggtgtaaagtggaatgaagtgactgacctcatttctagaagattctagtgggccaatgctcagctcccaacttctggactgtatgctctaactatgggggacttgccttgatccctgactttgtcctctggctccttgagtttaggtatccactgtgttgaggggggtcgaggtactcccggaccattggtcactacactccgatgggtggtgtcggccaaagcatttcatagtgcggttacagcaagatccattcttgctcacacgtgccagcagcagtggtagtggcagcatggtaggttgcacgcttgtcagctgaggcagagtgctagcaggtgccagagtgcctgcctcccttcatcataggggtggaggcaatgcagctgtgggggtgggagcttggtggagaagcctgattgcaattgtgtgcatggtcatactggtggtggtattggcttgggggtagggtgctggcagacaacacaggtctgtgtgccttctctgtgccctgtaacaggagtggttgttcggggcaggtgaggatccactgttctctgtgcctagtttcactccctcagcagtgttagcacaagagtggggcactggcgggggcagggctggctggctctgtgcctgccaagtctccatctgcagtgatggtttgcggagggaggagtggcagactgtactcccgccacagcagtggcagggcacggtgcacacatactcgcctgctggtggatcaaggaaagcaaaatctgcccattcagacacatgccagcaaagcaatgtgaggagttgcactgggccctagggaagctgcagtgtggagagggtgcatgcaggctggtgcgtaggcatgggggccgccatgctagagctcctcgcaggttaggtatagtgtgccagtgcagaagctatgatgtagctcccagggcgctgcaagcaggtgtggccaggctggggccctgggagaggccggcagactgaggggtgctcaggttggactggccctatttgatgggcaagaccaccctgcagagttcaggactgacagttctccaagggctaaaggctcctatgggagcaagtggagcctagggtgatggccatccctggccctgctctgctacagatgctccaggaccaaaccctctgggctccacatcggctggtttgctgcctcctatttcttctctaagcagctctccctgccaacttgtgtctatggtggctgaagggtctccttctgctggagttccagagactcgtggtgaaagtgagttgctccataccagttcaactcacctgttcccctggagctgctggggcacagggacaacaccaggtatgcagcagacccatgtagggttcccaggtttccccctctcagtccaccttctgtgtgttccctctgttcactttcagtgccttccctttgaagatcttctaggagtataccagtcatctcggtcccttggtggcagctgttttacgtggctgcatctagtcagccatcttgcccccgctcaaaaacttcttactgttaatgtgggaaaaactgaatgctattcctctaagatcttcacaaggcaaagatgcgcactcttgccatttctattgaatacaggactgtatgtatgagcaagagcaattagtcgagaaaaaaataaaaagtacacaagcccttttttcatgtgtgttggccgcataaatatcttcttttgagaagtgtctgttcatgtcctttgcccactttttaatggggttgcttgtttttttctggtaaacttgtttaagttccttatagacgctggatattagacctttgatggatagattgcaaaaattttctcccattctgtaggttatttgttcactctgatgacagtttcttttgctttaattagaaattatagaaattataaattactttgggcagtatggccattttcatgatattagatagctcttttgtttaattagaccccatttgtcagtttttgcttttgttgccattgcttttgatgttttcatcatgaaatctttgcccatgtctatttcctgaatagtgttgcctagattttcttctagggtttttatagttttgggttttatatttaagtctttaatccatcttgacttaatttttgtataaggcttaaggaaggggtctagtttcatttttctgtgtatggctagccagttctcccagcaccatttattaaatagggaattatttcaccattgcttgtttttgtcaggtttgttgaagattagatgattgtagatgtgtggtcttatttttgagtttctctattctgttacattggtctatgtgtccgtttttgtatcagtaccacgctgttttggttattgtaaccttgtagtatgatttgaaggtgggtagtgtgatgcctccagctttgttctttttgcttagcattgtcttagctatccaggctcttgttttggttccatatgaattttaaaatagtttttttttctaattctttgaagaatgtcagtatgtcagtggtagcttgatgagaatagcatagaaattataaattactttgggcagtatggccattttcacgatattgattcttcctatccatgagctcaccatcactgatcattagagaaatgcaagtcaaaaccacagtgagataccatctcttgccagtcagaatggcggttattaaaacatcaagaaaaacagatgccagtgaggctgcagagagataggaatgcttttccactgttggtgggaatgtaagttagttcaatcattgtggaagatggtgtggcaattcctcaaagtcctagaatcagaaataccatttgacccatcaatcccattcctgggtatatacccaaaggaatataaatcattctattataaagatacatgcacgtatatgttcattgcagcactattcacaatagcaaagacatggaatcaacccaaatgcctgtcattggcagactaaacaaagaaactgtggtacatatagaccatggaatactatgcagccataaaaaggaatcagatcatgtcctttgcagggacacggatgaagctgaaagccattatcctcagtaaactgacaaaggagcagaaaaccaaacactgcacgttctgactcataagtgtgagctgaacaatgagaagacatggacatagggaggggagcaagacacactggggcccgttggggtgaggagggtgggggtatggggagggagcgcatcaggaaaaatagctaatgcatgatgggcttaatacttagatgataggttgataggtgcagcaaaccaccatggcacacattgacctacgtaataaacctgcacatcctacacatgtaccccagggcttaaaataaacagaaacagaaacaaaaaaaaaggaagtaaaaaataagcctaaaaggaaaaagtaaaattttttctatttgccgatgacgtgatcctacatagagaaaactcaaaacacgtcataaaaattgttaaatccagtaaagtagcaggatacagaatcaacatacaaaaatcagttgcatttctttacaccagtaatgatctatctgaaaaagaaatcaggaaaacacaatccatcataatagcatcaaaaagaataaaatagagggtggaacaaggtggccaaatagaaccttccagtagtcattcccctgcagggacatcaagttcaacaaayatcctcacgagcccaggcggcacagtgtgaagacagagtctacctccttaggaagtaaaaggaatgttagtgtgggattttgcattggaggctagtgctgaccccactgcagtggaacacagcactgggcagagcctccaaggcccttgattctaggctggaggccacagagggagcatttagacccccgccccgggtcagagggaaatctgctacctcagcaggaggaatccaagttccagtccacttcacaaccacctaactaaagtggccttccgccagaccctaaaacaaagatttgcattcaggtagattatttggaagatgatttaaggacgtaccagtgcaggagttgtcgcgggacagtgagaccagggcagtttgacaatcaataaagggtgcatcattggcaagctacctgtgaacaaagggagcataattccactggacaacaccaggaggcagtgttatacaagcctaagggtaattccacctgaccaggtacagcacaaagatatgtggcctccaactcccaacatcctgggctgaatagtggtcccagacccatagttttcaagtctatctagcctgcctgaggacatgccaagagaaagccttcgcatagagtcccgagttcacgtggcaggacgccagaggcatgttctagaacagtaggtgccgaaggcacagcacaaggaaacactcactggtggaatgttctcaaaacaaagaaatgataaatgtttgaagtgatagatgtgctaattatcatgatttgatcattacacaatgtatgtatgtataagaacaccacattgtaccctgtaaacatgtatattgtgtcaataaagaaacaaaaattatgttgtatagagaaaaatgcataagaaacagcaagagttgtagatcaataccatgaatgtaaataaaaaacaccagcataaacaaagccatatgacatatatcaccctcataccacacacatggggctctttcagacacattgcccagtgccttcaggtagagaggccagtgggaatgaggatgatggatgaagggaagaaaaatttttaaaagaagtctaatgggaactgatgaagaaagtataccataaacttggagtgtgattaaagccttccatcttcctcttttgcctcctctaggttaccagttctgcttttcctggacctgttccaagctctcacgttccacatcacacatgggacatctagtgtcaggctcccagagagcaggaaccaggtgaaatacaagagcacagtcctcccagccggtggcatggggataatcggacaatacaactctccacccttttttatggtaagatatgaataaggggtccacaggagcaacctgagtccctgcaactacatttcccaggggcccctggggtaaccctaatgtgactctgggggcggggccagttggacatccaatgagagcacttcccctgcagactttggaagtgagagcacttcctcatagaccttggatgtgggaggattgcattcagtctagttcctggttgccggctgaaataacctggtaagtggaactctgtaaggggctttgaaattggggtttaatcctatctcaactgtgagtacaggagagtaggttctacacgatgtctacatttcaagtataaggttgctcagaaagtgtggctggcacatacttggaagctaatgctgtcactactccacagcttagtggtgacagttacaggtcyttgattcaaactgttgggtttacagtcacagccactttatagctgtgagaacttggcctagtcacttagtttccctaaaactcagtttctttttcagtaaaatggagctacgagtactgcttacttaaaggacttgttgtgaggattacatacgtgtattaaaagataactaatgtgtttaaggcaactttctcaacrggatttccctcttggttacttgtaacagtgaygctcaccctcctctgtccccagtggtgtgtgtcccaaaggacccagttaatcctacaggcagcaagctcgtaataattcctgctcctcttgcactagctgataaaaagyccctaatgatcctggatgtccaggaagattgaattctgttgtttgcaatgcctatgggaattccagagggaagtttttgtttttttgaggcagagccttgccccattgcccaggctggagtgcagtggcgtgatctcagcttactgcatcctcctcctcctgagttcaagtgattctcctgcctcagcctcctgagtagctgtgattacaggcacccgccaccatgcctggctaatttttctatttttagtagagatggggttaatttttgtatttttagtagcgatggggtttcaccgtcttggctaggctcatctcgaactcctgacctcaagtgatccacctgcctcggcctcccaaagtgctgggattacaggcgtgagccaccacactagggacgaagttttattatggccgaaggacacttactggagagggtctccaggaggtatgaatgacaaaaaaattaactccttcaccgtcagaccgagagcatcaccccctgaacatggacttgcagaattccacagaagagaggagactggcctagacagacagccccaggagctgagggcccaacaggctttctaccctggatgctgctcccatgccctgacaygaggcccactacaatggtatacttgtttgctctttcctaattaagaaacaaacaaacaaaaaatcagacatactgtttgctcttgaatgcttgaaacacaaaacaggtgacaccaccttcctcctcaaaaggaactttttaactgtcaactttctacstgcacgctgcccagagacttattttgtctggcccttgctgtcttcagcagtagcagctgtttttctttagatttgcttttctggcctggtgcaagtaacccccaccacctgcctggccccagtcggcattaaatgggagcagtgagtggccttctggacaagaacaactgytgaatgatggtctttgggtgcggctagtccagcaaccccttttcatccagaggcccagtgagctggcttaggagggggctaggttgtagtgtcaatttagtgggattccatgcccttctttcatggtggtagaggcaaaagaaaagagaaggaataggaaaagaaaagaaaagaaaagaaaaaacacagaaagaaaagccactcattggctctccttgtaattcttctaatcattaatgccagaaatctatgcagcaggcgtagatgattttatctcagtccacaattgtacttgtgctgattgtagccttaaggccttacagccctatctcataggcagactamctctgggttaaactgcttttaattcttctatgttgggctcttgtttataacttttttaagagaaagaatacaggtttctttagcaataaagaaaaagaaaaccactgctgtatatttaacacacatcgattctagagacctggaattgaacaatgagttctgcatatcaacctgctctccaggggtaccaatccaagaatgtgattattgaagtgccaagtcacatagggataaatcacaatagttggtcaactgttgaatcttgatccttcaactaaacaatattcatgaactctgcagaaaaacaccagcattttgctcaacattcaggaccctctagaagttgcctcattctactctcctttcttacctttcttttacacagctctccaaaatgtccacaaaagtgacttaagtcaggttcccccaaaccagacaccaagacaagaatccatgtgtgtgtgactgaaggaagtgctgggagagccccagctgcagcctggatgtgaactgcaactccaaagtgtgtccagactcaaggcaagggcactaggctttccagacctcctactaagtcattgatccagcactgccctgccaggacataaatccctggcacctcttgctctctgcaaaggagggcaaagcagcttcaggagcccttgggagtcctccaaagagagtctagggtacaggtccgaaagtagaagaacacagaaggcaggccaggggcactgtgagatggtaaaagagatctgaagggatccaggtaagttattgaaagtattctttctgtgctaaccccagtcctcaatccttgccagccagccccgtcttccctcttaggtaccctgagcaggctctattttatgcccttccatacctacggtggaaaccaatagggtttttttttttttcagacagagtctcactctattgctcaggctggagtgcagtggcacgatctcagctccctgcaacctccacctcccgggttcaagtgattctcctgcattagcctctcaaatagctgggactataggcatgtgccaccacacctcgcttttttttttttttttaattttttattagagatgggggtttcaccgtgttggccaggctggtctcgaactcctgacctcaagtgatccactcgcctcggcctcccaaagcgctgggatgacaggcgtgagccattgcaccaagacccgataggtctaaggggtctcatttgagtcattgtatataaatttttttttcaatgttttttgtctaaaaaactttagacagggaatgcactctccaattaccttcaactgctacctctccttattttattatacctagatacatcttgccttaacatttcaataatttaaccagaatatgttctgttaaaaatcttttcattggcgggccatcagactgggtgactcctgtggtttcattttcactcattttactgtttaccagtaaacagtagaaaastagagacttcaccaatcagaaactgtcaactaacctctaactagggacttttcactctaaccaaccaaatagcttttctttgtctcactcctgcraacattttataaaagtttctctcctgccctctcctttcctcagcagagcattgagccacctgtagtctggtgctgcctggctcatgaattgctatctgttctaataaactttaaaaaatgttatacctaaaaaattatcttttaacaattccagtgttgacagtactggattggactctcctagactctggtctttcttgatcttcagatcaaatttttaacgtcatatttctttttttttttttttgagatggagtctcactctcgcccaggccggggtgcggtggcactatctcggctcactgcaagctccgcttcctgggttcacgccattctcctgcctcagcctcctgagtagctgggactacaggcaccygccattgtgcctggctaactttttgtatttttagtagagacagggtttcaccgtgttagccaggatggtctcgatctcctgacctcgtgatccgcccgcctcggcttcccaaagtgctgggattacaggcatgagcaaccgtgcccrgccctaacrtcatatttctatctccatataagccaaaatggcttgttcaaaagccataactctcataacttttctactctttgttctgtattggaaggagtcagtgttcaccaacactcctttagtgtgacctctctactttttggttttcatattcatctacttgttcactggccatgaaaccgaaactatcaggatagctcagttattgcatttctcaagctcttttatgtttgatattacctttatattcatgttgcctttatgatcaagtgaaatactagccagratatttggagcaaactctttcccttcaatactttgaagatacacttctattacttcaccagtggatatttttgtgtaacattctcttgctgtcctgatgttttctctttcatgaaatattttctttctctgccagaggcttgagtagttgtctttaattttgacttttaataatttaacaaaaatatattccagtggcaaacatgttgtatcgaactttcccagaattttctcttttgttttttagcttcaatttcttcatcatttcaggaaaatatttatctttacatacatttttcttaacttttaaatccaggggtacatgtacaggttcgttatataggtaaacttgtgtcatgggggtttgttgtacagattttatcacccaggtattaagcctactacccgttagtaatttttcctgatcctctccctcctcccaccctccaacctgtgaaaggccccagtgtgtgctgtttgcttctttgtattaattaattctcatgatttagctcccacttataagtaggaacatgcattatttcatttcctgctcctatgttagtttgctaaggataatagcttcccgctccatccatgtttccatgaaagacatgatcttgttctttttagtggctgcatagtattccatagtgtataagtaccacattttctttatccagtctgtcactgatgggcatttaggttgattctgtgtctttgctattgtgaagacatgatcttgttctttttcgtggctgcatagtattccatggtgtataagtgccacattttctttatccaatctgtcattgatgggtattcaggttgattctgtctttgctattgtgaataatgccatacatttttctattgcactttttgcattctccacttcggaagcaccaattgtctttgcattggcttgtccttgactgcgttctattttattctatcttaattgctttatcatttcattagcctttagtaggaatatcaagcttttctgccacataagcaatgtgatacgatattgtatctatatggttcctttctgttcatcattatgtattctgttgattaattagttccatttctgtccttaattagtattctaaggtatgaaatctttcttttcataaaactattattttatcactttatttttagctgttttttattgagtttatttcacatggtccatagccccagatacctgtacaattttttttttcagtttatttttcttcttgaattggttgtggtttttttgtatataacttttgcatgttatgtcttttcttctaatcccaatctcacagtattttgattttgttagttctcatcattttcatgtatgtatagctctgtttccaccttttatttgctgcttgaatctggtgtggctggtgagatgtccagctggggttggtgtagacttgtcaatagaggaaaatgacgagacgagtctcaatcattttaggagatttatttgccaaagttaaggatgtgggcctgggagacaggtctatgcctttctctgaagatgattttaaggactgcaaatttaaaggggaaaggatgggatatcgagaagcaccgttttcatgtaagagctgggtagggaaaatagtgattcatggcctttggctcagtgaatgtgctttttttgcataagatgacataaacaaaaggggcagaggaaaaatgcaaggactctgcattttacataacatacctggtggctcagatgctactcttttagctgtggtttcagccagttggttaccctgactttctgtggtgtctaattttgagtgacctgggatttttataattgccaaacgttttggttttagagtagcttctaacagcgctgatacttgctgcccattttctatgggttgccctgagtaggttaaatatcctctctctttccatagcatcccaaagttatgagcaaccccaaaagcttagcggctgtcagtgtaaatgtttgcagccttgtcttttgccacttgacaagctcgagtcggggcaatcaatttggctgcttgaaccaatctggcatggggaagaggactggcttcagttacctctagtaaggaaaccacagcatatcctgctctaaaatgtccattttctcatcttcaataagacccatctgtataccattctatctcagcattatccagtggcatcgcttataggtctgtcctgggggtgagaagttggtcagtcatcagaacacagtcatgaggggtcttgttggaagggcctggcaagagagtggctggattaagatgatagagcaggaaatagtaatattgggagaagataaaagcaaaatttcgtaagaggctaagcagttgacagacagatactgggtatgatgagaatttagaagggtctcaataggatgtggcacaaaaatggtaagggggaactcataagaactcataattatttcttcaacagacgtgtacagaagggccatgctgttattactcttacacaaggaggcagccctcgagccacagggtccagctgttggctataatagcctaccggtctctgatgatcaccatgtttctgggtcagtaccctggatgcagtacctccagtttcacatacaaaaagggagaaaggcaacttgtagattgggtkctgtgagtctggggaattagtgagaatttcctttatttgttatataactggttttccctctggagtccccatgatgagatcaggttgttcattttttaggtatgcatatggagggtgagccacaaaggagaaatttggtatccagtttctacaacagcctgccagtccccgaaatcctctaagttgtttcttagtgatgggcattgggaaagctaaaatttctctcacattatcagggttaatactcagtcctttgaccaagataatatgccccaaatacttaacttccggtaagcacagctgaagtttgtcttcagacgctttgcgtcccttgctggctgagtaaatgtagactatcttcctgggaggaagatgctgtgcctggacaaaggagaaggtcatccacatactgaacgagtgttgagccctggggaaaaattaaatccactaaatcagcttttagtatttgggaaaagtaagtgggactttctgtatacccttggggcatgacagcccacatatattgccattctttccaagtaaaagcaaacaaatatggctgtctggatctacaggaatactgaaaaaggcaccgcagagattcacaactgagaaatactggctggtagtgagtatagctgataaaacggcatgtgggttggggactactgggtgcctgggtattacaatattgtttattgccctcaagtcctgcacaaatctccattttctcctgctttgtttctttacagggaacatagggctgttgcaggggctggtgcagggaataatgagcccctttttagatagtcttgtataataggggcaattccatttgcggcttcctgctatagagtgtattgtttaaggctaggcaggggtttctttggatttatctctacctttattggagtggctgagaatattttccctatatctgtattgactgagaccgtaagtgggaggagacatccttgagcaagcgttcctcttctggtgttaacaggaagactggggaagctaaaaggagttttaccgtttcctgctctttattccagtgttttctcttctcctctattatttccttctgtgtctctatttcatattcccggccacaagacgatgtttcaacactactagtactaaattgtggtacgttgtcaggacattttgtaattcggtattcttggtctcctggccccaattctaaaaaaagttcacgttttgatgaaaaaaagatatgggcattatggatgttgaggagatcacagctcaaaagattgacaggggccccagggcatataagaaacatatggtacctacggagcatgtcacacacaattagagcttgcggcgggggagctgaacccgatggaattgtaaggtataggtttggacttaaaacgtgagatcattttattasacgcagccaccatgttaattctttcattactctgaggaatgggctttctaaatcaggtgggatttrtcagagatatagttgtgtctgtgacaattaaggcagttgtaagctcatgatttattattatattaatgtctcccaatttgtttgtcatggtgaagttttaacagctcactaggagttaacttgtgggcaaaatatgggggaggcatgtggcttttcatcttgtagccatcttattcaggaaccaaaaagggggaggcaggtttgcatgacccacttactagcttgacttttccctttggctaaatgagtttcgggggtcccacaatttaatttcctttcacagactcctcagttttctttagtggaggtgaggggaggtggctatgacaagagatgctctgatagcggatcttctgtatatagatggtccttgtttcttttgagtagcatcatacattaagggccttaccttgtttatctgcctcaacatgccgaattatagctgtacctagaggaagaccaggtgctagcactacatcctggtctttgatgtgtttggtatatgtcatggtagtgactgggggcatggaacttggttcacccttccttgctgatnnnnnnnnnnnnnnnnnnnnnnnnnnnnnnnnnnnnnnnnnnnnnnnnnnnnnnnnnnnnnnnnnnnnnnnnnnnnnnnnnnnnnnnnnnnnnnnnnnnnnnnnnnnnnnnnnnnnnnnnnnnnnnnnnnnnnnnnnnnnnnnnnnnnnnnnnnnnnnnnnnnnnnnnnnnnnnnnnnnnnnnnnnnnnnnnnnnnnnnnnnnnnnnnnnnnnnnnnnnnnnnnnnnnnnnnnnnnnnnnnnnnnnnnnnnnnnnnnnnnnnnnnnnnnnnnnnnnnnnnnnnnnnnnnnnnnnnnnnnnnnnnnnnnnnnnnnnnnnnnnnnnnnnnnnnnnnnnnnnnnnnnnnnnnnnnnnnnnnnnnnnnnnnnnnnnnnnnnnnnnnnnnnnnnnnnnnnnnnnnnnnnnnnnnnnnnnnnnnnnnnnnngtattaagcgcctttctgagagctctcagtgggcttcctaagcacgttcactctgcctcctttaagtcttatatttatgatcaagatgaaagggagggatgtatcactgcacagagattctacaagtggatatataaagctaataatgttttcagtgagctcttctctggcaactactttccaagtgctttcagcattccaccttgaagcacaacgttaataatgcacaatttcttatgttcagccacagaatgttcacgtgtgatttggttacaacatattgctctatccaggcctctaacaaaactgacttctttcaaatggacttgcagttgctgaattccaaatcaacactttatcttaaaaacagaaaaggaggggaagggtggagggaggggaacagagagggtacaagaggcaaaaaaagaaaaagaggaaaacaaatgcttgtaaacaagttaaaccaaataaaagagatataaagtaatttcttaaaagaaggaatgatattctaagcaagaatcaaatatccaggtatgtataaaccgccttcgtccttttagatcggcttctctctcttctttacatactcagtacaaattctaggtgagggggcagagaggggttggcattgtctgactaaatacatcttgttctctctctgagtggtagaactttagagcttgaccaaatgttacgaaagggtgctggtggaagttaggatgagaagaaatgcaatctaatagatttggagaaatgatgttgtagacaccaagaacagagaaagttggaaactggcaatatggggaggatagctgggtcagaaaggaaaaataggagaatatagaagaaatgttatgagaagggaaaataagagatgctccacttatcaccattcatctcggggcaggtccctttgtacaaggtcatcctcaggccataccacatacaaaagagttatacctgaggtctgtacagcactgttacartcatagtctcaaaaggttaaggctctatgatggcaggtttaaaaaaccttttctaaaatatttaacaaaataaggggcatttatttttttttggttcacattacctgaaagttaaaagatagctttcggcttcattcaggtctttcctcattctaccttctgttgtttttcatctcttggtaaacttggtgaactctttgttagtgttgttcttcagtaggttctcaccaatagctttgaatgaataccccaccagcttctactcaccaatagctttgaatgaataccccaccagcttctaccttgtagcagaatgtacacgcttaggtttcagcaaaagttcctcagtaaagtctcagatctacttagatcatatgttatccatgagccaagcactggtcctagagcatatgtgttcaaattggtcccacctagtccatgtgactatccataaggcgcaatatgggcagcctgttctctacacagtatccagaaacatcactttgattgtggcaaacattgctcaattacaacccttctctcaggcctctctcatttacatttctcatttcacttacagtaaaaaccaaaatgccagtcttagctccaaggctgcagttgcctgtcagatctcatctcaatccactctccttcttactcatgtgctccaattacccttgcttcctgaatgttttttgaacgctcaaggcagtttccagcttaaggccttgttattttctgttttcctacttggaacaatcctcctcacgcatatccttaggccttattctctggcatccttcaaatcttagcgagtgttttttttttggtgtgttttttttttttttaaaccaactaatttaaaattggagctctccctctgtacttactgggtcctttctttactttagttttcccagggcacttactacaatctaacagattgcatgttttatccatgtattcaatttcctatatatgtcactccaactcccactaaaatataagatttttgagagtaagcaagcactagaacagtaggaaacacattatagctattcagtgaactatttcttgagttaatcaatcaatggatgagtgaatcaatacagttctttgagcggraaactttgtataaggctcagctaaaagggaaattgagtgggtcaggtaccacggatactatacactctattgcatgattctcctgcctacatcagaagaygtttataagcctattttaaaggataccagttggaatctctcttttattaatcaccaagagaaccatgaacaagctgtttatcatttgactcatcatttaatcttgatttccagcttctcacacttgaaagaagacataatacatttctcacaggattctgggactattaactgaacttatgtgtgtaaaaggaattcatacaatgaaagcactagaaataattattatacttataaccattgtatttttacatgtttaaaatatagccataattagcctactcaaatccaagtgtaaaagtaawatgwtttgctttcgttttgttttccttgcttaggggatcatggacattgaagcatatctkgaaagaattggctataagaagtctaggaacaaattggacttggaaacattaactgacattcttcaacaccagatccgagctgttccctttgagaaccttaacatccattgtggggatgccatggacttaggcttagaggccatttttgatcaagttgtgagaagaaatyggggtggatggtgtctccaggtcaatcatcttctgtactgggctctgaccactattggttttgagaccacgatgttgggagggtatgtttacagcactccagccaaaaaatacagcactggcatgattcaccttctcctgcaggtgaccattgatggcaggaactacattgtcgatgctgggtttggacgctcataccagatgtggcagcctctggagttaatttctgggaaggatcagcctcaggtgccttgtgtcttccgtttgacrgaagagaatggattctggtatctagaccaaatcagaagggaacagtacattccaaatgaagaatttcttcattctgatctcctagaagacagcaaatacyraaaaatctactcctttactcttaagcctcgaacaattgaagattttgagtctatgaatacatacctgcagacatctccatcatctgtgtttactagtaaatcattttgttccttgcagaccccagatggggttcactgtttggtgggcttcaccctcacccataggagattcaattataaggacaatacagatctaatagagttcaagactctgagygaggaagaaatagaaaaagtgctgaaaaatatatttaatatttccttgcagagaaagcttgtgcccaaacatggtgatagattttttactatttagaataaggagtaaaacaatcttgtctatttgtcatccagctcaccagttatcaactgaygacctatcatgtatcttctgtacccttaccttattttgaagaaaatcctagacatcaaatcatttcacctataaaaatgtcawcatatataattaaacagctttttaaagaaacataaccacaaaccttttcaaataataataataataataataawaaatgtmttttaaagatggcctgtggttatcttggaaattggtgatttatgctagaaagcttttaatgttggtttattgttgaattcctagaaaagttttattggtagatgagtaaataaaatattgtaaaaaaacttattgtctataaagtatattaaaacattgttggctaatataatttgaaaaaaagtggttttttggaagacttaggatattatggtgctacataatttttcctcgatgctctcttcctctcatctttcttgtctcttaaattactttacttccttgcacactttgccatacaagaatgaacatgagcttttcttgtgtagatctgagttgaaatcctgtggacactgggcgaattactttttagatctgtagctctgactcctcaggcataaaatgggaataatgcttttacagtttagtggcggaactaaactcccaaaattatttgttatatggatcaagtaataaygtcagtaatgtttttggtacaaagtcattatttaataaaagttattgttccatcttgcttgcccccccacccctgtcatctgcctgcttctttcttgattaaatattgataggatattagatgcccaagatctaagagtgtgttctgtgcttcagaatctgtatctttgcttatctataattcagattttctgtttgtggattccagtatcaggactatagtttaacttgcagacttgatcttacactattctccctcttcgacgtgtgatcattgtaataaggttaagagaaaggcagggactagaatgaagaaattttagttaagagaacaagatacattgtaacatcggtattttatgcagcaatttaacagttgggagatgctggtgtggggggatatcttaggaagaggtagaaatgagacatggcctcagtgggaaggaaggatgaaagatatatttcagtatttgatggcttgctgtcttccttactgtactggccttttccagctctgctgctatctggcagcaatgccaggtcatttcttgtactcttgggaagaaatacgtttttcactttctgaccaggaccatgcctgtggagtagatgttgacaagaaacactgaccagatcaaaatgtgtctcaaggagaatggcacaattttgtgcaaatgaatcaaggaagtcttattgcacaagagtatcctggaacccagtgcaattgattttttagaaaaatatatcacataggggaaaaaaactggaatatgttgaaggagacgtatataatatttagcatccagattgatgacttctgccctaactatgcaatgttaacttttctcagatgaaatctaaatgagtgaaggagaataatctcgccaattcatttggtcagagatcttaagaagccccctacttacttgtgtttgtccaaactgttgtctctgtttttggtggccccttggagatcagaatgtgccatgtcctgtcaagaccccaagacaagtaaggtagaatccaaacattttatatgtagctggaaaagtgggggtgttggatgtgtatttcagtttcttcaatcattacggtgaagctgagcgtgaacctttatctcccattctctctgcactaagccaaggagagaatctgtgacaaatgcctgtactggtgtttaggttgtactctgggggagatagctgctagaagttggcccaattgtatatttgcctgtttgtttccagtgtctaaggccactcagaaatgcatagccccattgactcccagaactaaagagacagtcccttttatgagaggtcattaaagagacagtcctttctatgagaactatacaagttgtggctgttggtgtgtggaccaactacctccaaaaaatatgggtagacttggaataatcactggagtgagctagaggaaaggctcaggaggtgacatccttcagctcaggcttttggagggttactgtttgtctaccccattacctcaccaatgcaagttcaacggaagctgccaagtagccacttaaaaaaatgtgcaataggctgggtatggtgactcacgcctgtaatcccagcactttcggaggccaaggcgggtggatcacctgaggtcagaagttcgggaccagcctggtcaacatggtgaaaccccgtctctactaaaaatacaaaaagtagccaggtgtggtggtgggtgcctgtaatcccagctacttaggaggctaaggcaagaaaattgcttgaacccaggatggggaggttgctatgagccaagatcgcaccattgcactccagcctaagcagcaagagtaagactctgtcaaaaaaaaaaaaaaaaaaaaagtgcaataaaccgcttctggagaaaaaaatgggggttgtgcattccagccttttttttctgcactacacccagagagtgtactctttggaaacgcacatctttgttctgtgaccgagagaaacacgtatgcctagtctcctctactgttagagcccggaggcttgggatgctgtccttcatggggaagctgtaaaagttggggcataaggaaaataactgccaattgaaaatactatacttagcaaatctattcttcaaacatgaagaggagataaaaccccaagacaaacaaaagctaaagccatcaccaccagacttgtcttacaagaaacgctaaagggatttcctcatctgaaaggaaaggacgctaacatgcaacaagaaaatatgtgaacgtataaaactcactggtaagagtragtacacagacaaatttataatactctaagactgtaattgtggtgtgtaaaccacaatatctttagtatgaagactaaaagataaagctaccaaaaatgacaacaatttgtcaggagatgggcaatataaaatgatgtaaattgtggcaacaaaaagtcaaaatatgggaggcatggagtaaaagtgcagagttttaaacttttttttattggcttcctttctttgtgctgaatgttaagtttccatcagtttaaagtaacttgttatagctctaagatttttttgtaagcctcatagtaaccacaaaatgaaagtttgtcatagatatactaaaaataaaaaaagagtaattaaaacatactcccagagaaaatcagttaaccacaaaggaagatgggaaggaagaagaacagaattaaaaacaaccaaacctgggcatgatggcatgtaccgacagtcccagatactcaggaggctgaggcaggaggatcacttgagcccaggagttaaaggattcagttagctatgatcacaccaatgcattccaaacttgttgacagacagagaccttgtccaaaaaaaaaaataaaaaataaaaacaaacaaaaatctaggcgtggtggctcatgcttgcaatcacggcactttgggaggccaaggtgggcagatcacttgagcccaggagttcaagaccagtctgggcaccatggcgaaaccctatctctactaaaatacaaaaattagccaggcatggtggagcattcctgtaatcccagctacttgggaggcttaggcacgagaatcacctgggaggcagaggttgcagtgagctgagattgtgccactgcactctagcctgggcaacagagtgagactctgtttcaaaaaataagtaagtaaataattaaaacagccaaaaaacaagtaacaaaatggcactagtgtgtctttatctagcaataataacattgcatgtaaatggaaaaagttaaaagatgtagaatagttgaatagattttttaaaaatactcaattatatgctgtctacaagaaactcatgtaacctataaaggcacatgtaaagtgaaagtaaagagatggaaaaagacatgccatggaaaccaaaaatgagcaggaatagctatatttatatcagataaaagagacttctagtcaaaattgtgcaatgaggcaaaaaaggttattacataatgataaagggatcaattcagcaagatggcaagatgatataacaataatatatatgcacccaacactggagtacccaagtatataaacataaataaatctaaagggagaagtatacagcaataaacaatattagggaactttaacaacccactttctacaatggacaagtcatccagacagaaaatcaacaaagaaacaatggagttaaactgcattctagaccaaaaggacataactgacatttctaaaacactttatccaattgctacaaaatacacaatcttctcattagtacatggaacactgtccaggatatactgtatgttaggccacacaatgatgtcaacaaatttttgaagtcaaattcatatcaagtatcttttctaaccaccatgaaataaaactgggaatcaataacaagagggatttcggaaagcgtacgaatacataaaaattaaacagcatgctcctaaacatccaataggtcaatgaataaattaagaatgaaaattaaacattttgtgaatcaaatgaaaatggaagcacatcatatcaaaacttgtgggatacagcaaaagcagtagtaagacaaagtttatagtaatacatgcctatcaaaaaggtagaaaggttttctataaacagcctaataatgtactttaagaaactaggaaagcaagaataaactaaacccaaaatagtagaaggaaaggaataataaataccagagtagaaaaattaaatagagactaaaaaaacagtacaaaggtcaactaaatgaaaagttggatttttgaaaagataaaatcaacaaaccttcatatggattaaaaaaattacaattgatgcgacagaaatacaatgcattattgtaaagtattatgaacaagtatatgccaacaaatttcaaaacctggaagagatggatacatttctggacacttacaacctatcaaattgaaccatgaagcaatagaagacctcaacagattaataatgagttatgagatcaagcgtaataaaaaaattccacatcaaagaaaagcccaggacttaatggcttcacgctaaatctaccaaacatttaaagaagaactaataccagttttactctaactcttcagaaaaaaatgaagagaaggaaatctaaattaattctatgaggccagtattaccctgaaaccaaaatcagaaaaggacacagagaaaaaagaaaactacaggccaatattcctgatgaacacagacgaaaaagattttctacaagatactagcaaactgaattcaacaacacatgtaaaacatcatcaccataatcaagtgggattcctcctagagatgcaaagatgggttaatatatgcaaatcaataaatgtgatacatcacattaacagaatcaagagaaatcatatgattatttcaatagatgctgggaaagcattgcataaaattcaacatcccttagtgataaaaactctcagcaaattggttatggaaggaacaaagcttaaaacaatagaaaatatatatatgacaaatacacagctaacatcatactgaacagggaaaaattgaaagcttttcctccacaattagaaaagacaagaatgcccattttcagcacttttattcaatgtaatactggaagtttcagtcagagcaattagacaagagaaagaaataaagagcatccaaactggaaagaattcaaattattcttctttgcaaatgacgtgatcttatatttagaaaaagccaaacactctacgaaaaaatggtttgaactgataaatgaattcactaaagttgcaggatacaaaataaacatacaaaaattattagcatttctagatgcaaatagcgaacaacctgaaaaagaaatcaaggaagctattccatttataataattacacaaaaacaaaaacctagccacaaatttaacttaaaatgaaacatctctcattgaaaactataaaatattgatgaaatacattgaagaggacacaggaaataaaaagatattccatgctcattgattagaaaaattaatgttgttaaaatgtatgtattatccaaagtgagctgcaggttagatgcaatccctatcaaaattctaatgacattcttcacagaaatagaaatagattctaaaatttgtagagacctattaaagaccctgaacagccaaagcaattttgagcaaaaagaacaaagctagaggcatcacactatctcacttcaaaatgtattataaagctttaataaccataatagcatggtactggcattaaaacagacacatagaccaatggaatagaatacagaatccagaaataaccctaggcatttacagccaatttatttttgacaaaggtattaagaacatacattggggaaagaacagtctcttcaataaatggtgctgggaaaatctctacatttttatgctgagaaaagaacccagagtaatttaattttttgatttaattttaattacaaaattaaatcaaaatggattaaagacttaagtgtaagaactgacactatgaagctactagaagaaactat

SEQ ID NO: 95413 - DNA, 40678 bp, Homo sapiens
catgattttaaagtctgttggtgacgtgccactttgggaagatgtggtcaaaggcagcaactactttcacgtccactgttgtcattcaaggcttgctgcagtagaattaccagtgtgggcaggcatatctactactgtggggaggcagatctgaatgaaagcgccagaagagaggccaggccacgcacgttctgtgaccttttcaactatttactgattagatacatcatacatctctccttccctagggagacatgaatggaggagacggcagagaaaggtggacattttcttccaacaacatctgatgctagatccaggtttggtgacacctgaatcttatgcaatttaagtggtcctccttaaggaaaagaatacaaaattacaagcataaaatttagtaaaaggttgggaaggggcatgagcaagtgaaggtactaaaacttaaacttcatagatttgttgtacatccttctcaacaaaggagaaatgtctattttcatgtgtgtatcagttaggatgctctcagatacaataatttaacttgtaagcaaaccaacttgtccaagattcaataacagagtagtggctgatgtaaatcaagagtccagttgttggacaggatctgtggttggttgatctagcatcttgacaatgtcatcaatgacccagtttctttccatctttctactgtgtagtccacagtatcaatttcatcttaggtggctcccttcaggtttatagcatgcatgccagcagcaatggggattcctagcttcctctttcatattagaagggagaagacaaggccaagcatggtggctcacgcctgtaaccccagcactttgggaggctgaggcgggtggatcacctgaggtcaggagttcgagaccagcctggctgacatggtgaaacctcgtctctactaaaaatacaaaaaattagctgggcatggtggtgggcgcctgtaatcccagctacttgggaggctgaggcaggaaaattgcttgaatccgggaggcagaggttgcagtgagccaagatcgggccacctcactccaacctgggtgacagagctagactccatctcaaaaaaaaaaaaaaaaagaatagtattactgattcccaaatagatgatgctgaagttgtttatacaattgacattcagaaatatattccatgctatcagttttttagtttttataattcttcaggtgaagtaaataagcaggcactgaggaaaatattatcaaattcacaaaaaatgtggtaggttgttacaaattccatcgtcattcagatcagatcatgacatttagagagaggctgcttcacaaaaacttgcaggagcatttttcaaaccaagacctggtttttctgctatgaacaccaagtataataacagaaagccgctctactcatcgactggaacatgccttatataaacctcgaaaaggactttttcacagggtaccttcagtggttgccaatctgggcatgtctgaacaactaggttataaaactgtatcaggttcctgtatgtccactggttttagccgagcagtacaaacacacagctctaaattttttgaagaagatggatccttaaaggaggtacataagataaatgaaatgtatgcttcattgtaagagaaattaaagagtatatgcaaaaaagtggaagacagtgaacaagcagtagataaactagtaaaggatgtaaacagattaaaacgagaaattgaaaaaaggagatgagcccagattccagcagaacgagagaagagcatccaaaaaagaccctcaggagaacatttttctttgtcaaacattatggaccttttttccagattctgaattcttcatgcatgtgttatgtctttaaaaaaacagacatgtttctaaaggtagctctaacaaccaccaccatctcgatgtagtagacaatctgaccttaatggtagaaaacactgacattcctgaagctagtccagctagtacaccacaaatggttaagcataaaaccttagacttagctgacagatggcagttcaagagatgacggcggacggatcacgaggtcaggagatcgagaccatcctggctaacacagtgaaaccccatctctaatacaaaaaaattggctgggcgcggtggctcacgactataatcccagcactttgggaggccaaggtgggcggatcaggaggtcaggagacagagaccatcctggctaacatggtgaaaccctgtctctattaaaatacaaaaaattagcccggcgtggtggcaggtgcctgtagtcccagctgcttgggaggctgaggcaggagaatggtgtgaacccagaaggcggagcttgcagtgagctgagatcctgccactgcactccagcctgggctacagaggaatacttcgactcaggagaaaaaaaaaaaaaaaaaagagtgttcacggctgttagacacacaagacaaaccatctaaaacagatactgatagtagtaaccaataaaaaagcatccaaaatgagcagcccagaaacagatgaagagattgaaaagatgaaggttttggtgaatattcacggtcacctacattttgatccttttaaccttaaaaggagatttttttaatttggctgatgggtaaagtcaaacatttccattgtttttactaggttgagctacttgcagtaatacaggtaagttcatttgtttttactatattcacctctttgcagtaatccacagataagtcttagtgcatttattttacaaagtactttttcaaacatcagatccttttatttccaaaccttttttcgcctttcaataagttgttgagggaaaggcttacacacattctttagaattggaaaagtgaggccaggcacagtggctcacagctgtaatcccagcacttagggaagacaaggcaggaatgattgaggccaggagttagagaccagcctgggcaacacagtgagacccatctctattaaaaaaaaaaaaaaagtattagaaaagctagaatagccttattttcacaatgtggaaagaaatttatatgaaatttatctgagtcattaaaattatccttaggtgataattttttagaagtacattacagctagtgttgccagataaaatgctggatctcacgcagtacctttgcaaaacatgatctaaaatttaaatttgtcctacatttgtacttgctaaatctggcagccttaattattacacaactataacgcaacacaaacaataatctctcccctagtttagagtcctttgcacgaaatttagcaaatccttaattttgagtacagtacaagcctggtaatccagtgtgtttgggataggctggtggaactcagaactgatacatatatacatacatgtctatcacattcactgtctattaggtgtaaatcatctttttatgtaaaagacactactggtttgaggatagagttgtctaggaatgttttgtcctgctgtgacagcatcactatgcatcccagtgtaacattcctacaaagggaagatctcttaaccaggcatacttacatttgctagttagaaaaccattctgagcagttttaactccattcagttgaatggtgtactacattgtatgagctatttgtggaccagatataaatgactatcacccagaaccactttcattcaacatatgtaaaatgtgatgagtgttaacattttaaataagcgatctgcttaatgaacactgattggtatgaaggggaagtgtcattctttacctcactcctgaaacacttttctatccaaaggttggtttgagtcagtattggcatcatacaaccacttactataaaataagtttactggtggtaatgtgatggaatttattccggatatctgatgttataaactttagggtccctgaaatatgcaggatccttgtatgtaactggcataaaccctgtaaagagataattaaagttcttgacaaagcataatgagcaaaatttcagctagctcaatacagttgttgaggtgctctttcttacccattgtttgagctctcttaattgcttttgtgatttgtttcttcccacaaagacctgtaaaataaaaagcttccttattcataaaaaagtcaatatttaaagttaaaaaaatgtttatttctcaaactgaaacattatttctctatctcttgaccttttagtacacgtttttgtatattcggttttactaaatcaagtcaaacctgttccaggtaatgtgatgttatacatgataggtttcatttagggtggggtggctaagttgcaacccttttaaatcaaggctccacctcaggaacctaggaatgttaggtaggagatgaggaagtccacagcttgccaagaacttcagctattccataaacaatctgattacatatcccgactcttgcacacgaaacaggttatccaagtcttaaacttgatgcttttgtgcagtatgaaccaccctttccgtggacataatcatgcatttgcacatttaaataccattttctatgaacagatcagtatgccaaaaaccactgcaaagtctcctacacacaccttgccttgactttctgtacatttctagtattaaagaatggtgtaggcaaaataaagatatatgtgtaagaaaaaaaagacatgcatgaaatggtttaattttagggaactagatttatattttatctgaaaagagtattaataatatataatagacctttgaaagttagacgcatagttctgcgaaagtggtgcctaagaatagtatgtcaattgacaaattttttccataaagaatctgattttgctagactacctaatcaccaattaacatcctccagtagggaaaaaaatatgcttggtgacatgtttaaatcgctctcaagagtactgaagatgaatgatcttccaatcaagtagctatttgatttagtaataacaactaaaagatgggaatcctcttcttcgcacactcattttaagctccaaggtaattccatagattcaacatttaacacgtatattcaatattacacattttttttccggagtgaaatggctctgaatgccttacagaatttgccctgctctccttaactaaatactttgtgtattaatacttctttcttcttttccccttgttctttctgtgccagacccacacacgtctgctgtaattgaacatgccaggcacattctccatttaaagccttttaacagctgctgtctctgcctagaatactcttacttgggcacacacaaaactagcttcctggtctccctcaactgtctgctcaaacttcacctccttaatcatgtctatctgtccctcttatttaaaattgtaactctaccacttctgatctccacacttgatgcccctggcctcccttttcctccactgcatttatcactaacatcccatataattttcttaggtattatgtttattgcccatttctcaccgagaacatacgcctcagggtggaagaagtttgtctttttgttgttgttcactgcttatccccagtgtcaggagacatgcttggcacattgtaggtccgcagtaaatattttttgaattaataaagaatatttctaccatctgctagcttactgttcatgcaggagctcaaatgtgctttaagcatgtgatatgtttcaaaagtcaaacttcatccttagggagaacactgtcatcttctcctcctttaaaaaaaaaaaataggaaaaaaagcaaaacaaaacatcaccttctcatttccccacctccaacaaaaagagtgttgagttttctaaagaaataatacaaatggataaaactgcaatttgttgtcctttctctcacatgcaaaaagaaaagaaaaaatactgccgagatttcggcagcgtgctgagcttcatcaaagcattaaaacaatgctgcttgagacgtcagaggctcatccaggaagtgcaacccagagggcaggatttcctgctggactttgaaatccaacccggtcacctacccgcgcgactgtgtccacggatggcacgaaagccaagcgagtccccctgccgagctactcgcgtccgcctcctcccaagctgagctctgctccgcccacctgagtccttcgccagttaggaggaaacacagccgcttaatgaactgctgcatcgggctgggagagaaagctcgcgggtcccaccgggcctcctacccaagtctcagcgcgcttttcaccgaggcctcarttctgggatttggcarctttgctgtgaaagcccaagtgggtaaccaacagcttggaggacccgagtggattcgattctctctcactcctcggccactcaactgctccttgtccctgactccgcggtggggatgaataactcaactcatttcgggccgcttttctcagagggcaaagatgggtcagggtgggatgttacattagtgttgagactctttggatccgtttcgtgggtaccgaggacgcctgggtacgcgggacaggctgcacccgcctgctagaggcgccccatcgaggcgccacgggtgaagctcccggccccacctacggggcggggctccggctcggtccgactattgcccgcggtgggggagggggatggatcacgccacgcgccaaaggcgatcgcgactctycttctgcaggkagcctggaaggctctctctctttctctacgccacccttttcgtggcactgaaaagccccgtcctctcctcccagtcccgcctcctccgagcgttccccctactgcctggaatggtgcggtcccaggtcgcgggtcacgcggcggagggggcgtggcctgcccccggcccagccggctcttctttgcctctgctggagtccggggagtggcgttggctgctagagcgatgccgggccggagttgcgtcgccttagtcctcctggctgccgccgtcagctgtgccgtcgcgcagcacgcgccgccggtgagtgagcttgagccgaggcgcagagaggggcgtgcaggtgcgggcgcggatggaggcgcaggtgtggcggcrcgagcgggtacaaggaacacctcgtgctgggcagcttctttacgggggtctgtggtttcgtgcacaggggtgtgggtgcagagcgggctggcgaaccccgtcctcggtagattcggtgctacctgcaactagaactcctttaaaggaaatcctagtctctgcaggatacctgggtgtgattcgcacattcttagatttgagtgagtgtacttgaataaccagttccaggcccttgcattttgaagtgtttaaataaaatgttccggtggacctgtgtgcattactcaatcaaggacagactgcctgatggtcaggtgctttctcccgaagaagttcaggagttcagcccaggatactgcagggccgtgggaaacgctgagtggtcccaagcttgggcggtgcgagcagcccagagcaggccccaaagggccccctgtggccttttgcacccaagtcatgggatcgcctgtcccgtggctctttcccacgagcaagtcacagggctacggacttcctaactgcaagagacagtgagggacgagcgtgactctttcattttacagaagaggaagtagacctagagtgagaaaatatttagccagaggttacactgttgtttactgaacatgcgtaacgtccgagcctcttgacgcccagtactctttcataattcatttctttataaagcaatcagactgcgtttgtctttgccaacagaatcggataagtaggaacctggcgcatctggcctgaggctagatggtgatggtcttgaatagtttaggtaggttattgaaagtggaagcaagatgtgcattgtcttcttttatacctgtaaggagaaattctttaaaatcatggtgggatatgatttagccattaaaattgatataatgttcagcagwtaaaagtagaatccagaatagtatatacagtttttcctgtaataggaaaatacacagaacatgtatgtggacacgattaaaggccttaaaataaaattgctccattgtgggtagggaattaatttgcttgacggtagttggttttatgggaattgggagagactttgatactttgatactgtcagggcccttcattgaaagaccaccaggaacacaccataagctgaacaaattgggtttagtgttctttgaggcaaaggagaccacacaccatgagcgacggacggtaggttatagraaaaaacccattacagaatttgaacttcggttgcatgatttggggtaagactgaggaaccgggctttgctgtagatagaatgctgttagaaggtggggcaattctgactgagtaaagaaggaacagccattctgtttagcacgagaaggggatgtttggtgttttgtgcgttgcaggtgcccttgtttttgtctgttcttagagaaaatcttcaagtggcattgctttgtcttggtgtgtcatgtctcagaataatcttatccgacgtaggtatctgtgggattgttgatgtccaggaggaaaacagagcttacctggctgtgagtgtcagatcggcttgtaataatattgagagatagctgtgggactcagagcagtttcaggtgttggaggctgttttttcttctttctcaatagctttatttattctagcaaaagtattttgatagctattttcagaagaagaattaacaacctctcaatggatataatagttcttatctagaacagcgattatcaaagtctagtctggccactggtgtcactttgggaagctgttttcacaggttttcaakgaaactggaaaaataagaatgcaaaactaaaattattaatttagaatgttaatctttactctgattgtatggacttcaagttttcattgttgcaaacgtgttcttaaaaataacggcagaggtagatgttatgtgcatggaatttgttttgttttaacatctccatttggcagaataaaaatttggaccctcctgtgccaaggcctcattaatttttttttactggcctggaaaatcctgggatccatgcactgaaggacctttagaaccttacagaagtttagtgacttcattctctgagaagaataagcagtttttcaactggagtcattatatgataaactatagcctcatggtaacaaaagatatttcaaaagtactttcaataaatatgaataatgagaagcagctttaaattggaaacaagtcatttgatttagaacatctgtaaggattttttgtgtgtttgtttttgaggcttttcacaatattcgtatgtgaaggtcctcctgagttattcttcattattgaattttttaggagtctattaagagatgatggtgaagacagtggcacaagaaatgtctggagagatagcgccagatgacatcatccagggttctgtagactcttattaaggattcagaaatttatcctaaaaaatgggaggatctggaaccagccaatgggaggccattagatggttttagacaagataacattttcactttaaaaagatgagtctggattggaggtcagcaagggtagatatgaggagactagtccagaaaagaaaacagggtgcgttgaaggatggtggcgccaggggtgagggagagaagtagatgttctagaaaaaaatcaggagggcgaatgagctgaaggaatcgttgggtgaggatgagggagtgaggtgtcagcgtgacctgcacattgctgaagtgcttcgctgggcgaatggtggcatccgttccaggaaacatggggaggggaaagcttgggggctaaagaatgaggatcgttttcatttggggtgtatgttaaatttcaggtggcagagagrcatccagcaggccactcggactggcactcagaagagagacactgagagtcactggcataatgatattatatttgaagcccttggagcagatgaacttacctagaaataggatagagaaagagaagaaaagagaactaggcaaaggctaagtaacttgcacatgtatgtgtcaagaagaggagaaattgccaaagttaaaacaggacaggccgggcgcggtggctcatgcctgtaatcccagcactttgggaggccaaggtgggcagatcacgtgaggtcaggagtttgagactagcctggccaacatggagaaaccctgtctctactaaaaatacaaaaattagctgggcatagtggctcacgcctgtagtcccagctactcaggaggctgaggcgggagaattgcttgaacctgggagggagaggttgcagtgagccaagatcctgccattgcactccagcctggacaatgagcgaaacttcgtcacagaaaacaaaaacaaaaaaataggagagtaagtggaacaggaagctcagggaagagactgggacaggttaactatgttgaatattattgagatgtcagtggtattatgatgttgggcaactggaggtcattggtcacctcgactggagcagtgttgggggcagaaaacagcttgcggtaggctaagtgtgattggcaggaaaggaactagaggggagagatggctgctctgcgtaataaatctgacccacttcataagatgtgcgaagatgaaacgtaatggcttagtaattaattgccaaagtaaacttgtaaactcatttttatgcatcagcttctcatackagttaacagcgtatgtcarcattgttgacattacctattgaatcagctttagcaatgattttcacgcagttgccagaaatctcatagaccccatctggcctaggaatttattgcacttcatctgcttttccctacttctcccaaagarggaacacacaggtgtaatccattcacttattcaacaaatactgcttgcctactatgtgccagaytcctaaacgctgggaatgcgtcagccaatgagatagatgaggtccttcctctcatggagggtttattcacattcctttgacctaaatatcagtagcttaataggatgccatcccatcaaagcccagaagacaagtgaaaacattttcaagctcatgtgaattcttrtacacgtaggaaacatgcctctttgtattcagtgtttctgctgagttgtayataagaggacattataggaaaaacttgtctgcaaaatagttgttgatgaattcaagaattgaatgaatgaaaaattgtctkgctagagttgtttggcttctggtgggtatgaaaactgacatgaggtatgtaattttagattatcyttcattgtctctttctgagtatttcaataagacaagcacacaagggctttctggacttttaaaattcaytattagaagcatacattatttcattgagggtctcctaattctttcgggctcaaatattttaaggagctgtacaagttatgccattttttaagggtatggcgctttcattgagaccttaatatgttctctttatatttttgtkttttttttagaatgttgtgttcagtagctctgtaattaatttctcttaatgaatggggaggacattcaaagaggcttaagtttctatcaaataaccagaaaaattagagaattttytgacccaaacagtcttttaaaagcactttccagagagttttttttttttttttttttttctgagatggagtcttgctctgtctcccaggctggagtgcagtcacactatctcgtctcactgcaacttccacctcctggcttcaggcaattctcctacctcagccttccragtacctaggattacaggcacatgccaccagctaatttttgcattgttagtagtaacggggatttcgccatgttggccaggctggtcttgaagtcctgacctcaggtgatccacccacctcagcctcccaaggtgctggaattacaggcatgagccaccatgcctggcccagagagtttcaaatgcattgaaatatcagatttttaccacttatcttcactcttaggagaccactgaggggcagggagaaaggtagggaagggcagggagagagagagaaagagaggtactgtggggagagggttagagagaattgattctaagttggattttgtttcctgtgatagggtgtacatagtataccatccagaccacataatctctcttcttatcatctgtttctaatctttacctatcatctatttaagtttttacctgccttaatagagttgtctgttattaaactgtttataaacttggggatagtaaggaactttaaataacattaagtaagttcattataattctgttttagggctactcgtgggttttgaagctgtgtctccctgtagaattcttttttgagggggaggaagtagctcttttttccaccctacccctaaaactaacctttttgcataaacgacttaggcgttcatgccatgtgagcccctgaaatactgtagtctcatagctgccaactttcttattttctgtcacatttatcctatttccttgcagccaggttctatgccaatttcacgtttgtttattgctaccaagagtcgttatcaacctcagactcactccacatgtattgttgctagcttgctctttagttcttacctctggggcaggtcacattctctcctaatactagacagagcattttcaactttgctcacagttgtctagtaagaaatgtgcctgtaatttgatgtttattttggctttggaacccagggcgtgcaaatgtcattattaggaagggatagsagtcattacrtttcacttaatttgccgagttgatkctagtgatcaccagaagccctgaactacgcgcagattattctgttaggaattaaattgaggcattggttttattatctctgtgggaagctgtttgatagaacagggaaagccattgactctgattctgtcaccagctgtgtaactttctacaagtcactaatggagcagggtcttaagtccacaacatgatcataaaattaagcacttgggttaagtacccatcacagtattcccaactcataggaaaacaatggtcagataaacaagaaaatgtaaagcggagtatctcctcacagcagaacttatttacaaattttacaaagtaaaattaagttgcaacccctataagtctctaagtagctcatttattagcaaaataaggaaagccatttaccaatggtggattacctaaattgtattcgattgtagtagcagaagtattgtgtccagggaaaatgaaattattttacatgtcattgagaacccttgtcctggactttgggaagaacatcaatatcaattaaagaacaaagcatktgatttttgagtgatttttcttgactgtcaacataccgataactgatcagttgttgatatttattagatgatcawtgccaagtttgaagtgactgaagagttagcctctgaatcatctgtataaaacaactacaggcgaggatgttttcgaagaagctgagaaaataatgattgagtataacctggaatggaatctgctaagatctataaaaattgacagtagtaaaaatatttgtgagtagaaaaaggcggagttgagcaaattcacaaaacttgtgaacatgcgaggtgtttaaagctcatggttatttattatagtattccttttcagatattttgkggaaaatattggaatctcacatgtgttattgaaccggcaatataaaccatgagcttcatttgctcttgtggatataaccgtcatcatttctgtgaattatcagaaatagaggccggatatcctgatgtctcttgtgacagagccattagatagcttgctagctgtaaagttttgcagtctttgagttcacagttgagactgaagtttttctaaacgagctgcccccagccactattactgaacacgaatggctttggaaattagcttttgctacagacttgatattgtttcttaatgaattcaacgcaaaattaccagacaaagccagacatatgtgagaaacttacagtgtggtaaggcaaatttgacagctaatgtttgaatcacaggtaatgtcaacctactttatatattccccatgttatcaaaagttaaaacaagrtgctagacctccattcttacacagctgtccagcagatacattttctgtgctcaagctacagttccaggagttttctgagctcaagctacagttccaggagttttctgagctcaagctacagttccaagagttttctgagctcmagctacagttccaagagttttcttacctactctactttatcttattttggatttgtacttttttaaaacaattattttactttcacagaactggttctccagaggaaaggagataaaagacacttgatatgttgaatgagtaacaaaagartcataaatctgtgtggactttttttgataagtttaggagaaggttccattttgccactaagcttggacaacttcccctaaaagagtctgttcattccttgtctcaggcmgtgacgtcagtgttgggggccgtcctcacctcaaggagcgcagagtctggtattracaaggaacgcaaacagatgattataaagcagtgtcataaacatgttgatgagagtgtgcacaaatgctgtgggaggaaaggagggtatgaatattttcatatggaagatagatgaagacttcacaagaaagaaaatgcttgaactgaatcttggaagttagaaccagcagttcaccaggtggggaaaaggcattctagcaagagggaatagcacagacacaggcatggaagggtgagagatgataggaagtgcctgcgtatggctataaatactaaggggagtgtcaggagatgaggctgggatggtaagttaccatggaaagatgatgaagggccctgtgctgtgtgccctgaaaatctggtttgggaggcaaatcccaggacaggttgcaacacacatggctgrtaagtgcagataatacatcctatcaggtcatttacttttagtgctaagtcagcctctctaacataaatattttccatctactttgttacatttgttcgttactcaatatatttgaaatattagagccaaattataacacctagcacttttacaaattgaattgaaactgaaaatccacttaatggtttaggattttagaagttttcttggaargaaaagacttattttaagaggcattgaaacgtataaaagagcaatatcagacttgatgttgtcttcacagattaactacttttgaaattgcttattccrttggcaagcatttgttattttctgaaacttaattttctttgcttttyagtggacagaggactgcagaaaatcaacctatcctccttcaggaccaacgtgagtaaacatcagatgatcaaaactccctttgacctttgtgaagttttttctgtatgtaataattgctcataaacgaacgatagtgaataaaatcttaagtcatgtttcccattccgagacagaggtttgtttctcagatttgtttattatgcatttggctgagatcttggacaaatatgaaaatatcttccgattcaaatgcccgtcgctagactatcaaaatcatcggaaagaaaaggattttcagccagacgcggtggctcacgcctgtaatcccagcactttgggaggccgaggcgggtaaatcataaggtcaggagatcgagaccatgctggctaacagtgaaaccccgtctctactaaaaatacaaaaaattagccaggcgtggtggcgggcgcctgtagtcccagctactctggaggctgaggcaggagaatggcgtgaacccgggaggcggagcttgcagtgagccgagatcgcaccactgcactccagtctgggcgacagagtgagactctgtctcaaaaaaaaaaaggaaaggattttcattctccactcaattctcctgtctaccatgaagggtttttctcatctttgacaaatgtaagggctgtatttgaaatgacctgtgattctctatggtgcctggatataaaccaccaaattatattgtaacaaaaaagcataggccctcatatgtgaaacgttctcaaaataaaccttggcacaacaaagctgtcgaggacaaaacaggattggaacacctaagaggaggaccaatgtcatgattcagtgtgtttaacattaatatttttagtctagattttggtctttccaaatcctcagtgtttaaatgggcctgtgagaaagccataataacagctcacagacccctcagagtgtacagaacagagaaaagaaggaacaggtatagggggtggtgatctttttctcctacactgccctttcgctgaaagtagcctgctgtttgtagggggaaacagtacaactctatctagtgatatcaagatgacattttcagttcgtgcaacattccaaattacttacgttgtactgttgttgtctaaacgatgtattttaaatagcctctgtcccagatagcgtgaaactgtaataaactaagttcttttgacttactcgcctttatgtagaaagaggccagtatttggcaggaagcaatttagaggtaaccagtttggatgttgtttggggccagtgttcattccagctctttcttcaatggcctgctgtctgaaagtcttcctttctgtcatcactggcatcattctggccttcagtgacatgtctgccttactgattrattatgtctctctgttggtctcactgccccaattcattgaacatttaatgaggtgccttccatgtttgaggccgtttctactcccttttaggtgcactttacatgtgtctataaattgaatgccctgcaaaccataaacctttcctgattaggcattttactgactcttattgccatgtgcatgtgagtgtgtgtctacctatgtgcatacatacctacatgtatacatacatatgtactccaaaacacatacacgtgtatacatggacataacttgtatgtttctttccttgccttcattttttcgctagctttctttttatctcactagcctgctttcctacacaaaaagcctcggctttgctcttatccttctcttctctcaactctatcaatggatcttgagatttaggagataactgtggtatttatgtacctttgaatgacaaacagacgttctgttcctttgagatcatccttttcaattaagtgcgtagatttgggcagcatccatgggcagatatgagggaagaaaaagataacctgtttggccagcatgactagtcaaatcaatgctgaagataaargaactgatagccagatcacccctgartccatctgagtcccattcagcatttctttcccactgctcacgggatgcctagcacttgctctcttatttgtatatgtgtgtgttgtgtcacytggactagtttccatgccacctaggtagccatgtgggttcaggtgatgttgctgatattatgaatggcatggacattgcaaacactaagtctcaaaaatgatgaaatgatatttcttgtttgcagtgaagtaggaaaataaattgtgatgactactgttgattgaataccaatgctgctaagtgttttttttatttttgcatttttcatatagtgtcttccctgctattataaggtggatactcttttattcttatggggaaattgaggcgtacaagttaaatactgaaatgttttagaaaactgtttaacgagaggtaaaatgtgcaattatggctaagctttagtcattaaaataatttggtttattagattaaccagttctctcaaattckaattagtgcaggtttgatggtagagaggtttgtggggtctcatcatccccacttcattgtaatcccttcattgtccgttgtgttgtgttcatcccctctcatcgcrtctctgagatccatgaacctacccaggactctaggctgaaaaagaatcaggaatttatggcggrtatagaggcatgatttgggattggttggatgttatgaggtgaggagcrgctgattggagttcatagggatgagatgcatakctccaacaggccactgagttatctttgctactagacatagaaatctaaatgcacagttgaagggagaggggagactagtaatacctgcccataatatggggaacaataattacttactgaattgtgggacaaaattttacatgtgaaattatggtctgtcagaaatggaattaatttgttgtgatgaaaagyttttttctagaatataagtattgtagcatttcatgtagatatcagctcctaagaaaatggggaacttgaaaatgctttgagaagaacaaaattcgttcactatgattttgtttaaatgtacatttccaaaatygaatatacttttcttttctgtctaaatcacaacctgaatgtctgctagttaacagtttcataaaacctcatacatataccagggccccaagttacacagcattatttagagaaccaagtaattatttatgayagtggaaatataaatagaaccacagttcatgacttaggtaataacccatccccagctatggacataagtctagataacatttctatttaggagactggtatcattgtggcacataccagagtcaccctgccagtctcaggagcagatcagtggaacagatgatggttatttttaggcataggtttatactgataaaccactaamtggcacacccttaaaagctatttcagtttagtaaccagggccagaaaataatgttcctatagcaacaaaaatagttgtagaattcatccaccagaaatatggcccagcttcactgataagtgactggatgttgctatatcctcagaaattgctgcacgtaagttaaagagtaggargttggaggatatgacagaatacagcttgggcttggactttgtccagaaaaatgagaagagaagaggtatatagtagggaagattaggatggctgacagaatcatgaaggttcttgaarctgatcgtgggaagataatacatgttgccatctggggcttaaaaggtgatcttcctgaaggcaacactggagacattggtttggcaatagtgttacactctctgagagagaattctgaaactggaaaccaattggagaattgtctagagcccagactaaatctttgcagatatttaggagaaaaaaaaaaatggcaggtatttcccgtcagtgataatcaggttagagctcttaagccatagttgattttttcatagaaaaccaattcacatgaaccttccctactagatmattctattccaggatttctgtgaccgcttatgattgtgttctcaacctagaagcactaggtagagaatgaactttctttccaaattttggtttgggtaaccaaattctacactgytgttaagactttgcctctcatatattcttatagatgtatctaactgaccctcacaaaaaaccctttcatcatttcaagrtgatacacctctcattacaggtacagaggtgcagttccatggtacaccataaatcttgacttaccaccctacaaaagatggcatgaattgatgcttgacaaggcaccaatggtatgctatgatgcttaaatcttttatttctttatttttatttttttwtattttatttctttatttttatttattgattgattttttttttgttttgagayagagtctcactctgtcacccaggctggaatgcagtggcacgatctcagctcgccgcaacctccgcctcctgggttctagcaattcccctgcctcagcttcccgagtagctggaattacaggcacctgccaccatgccggctaatttttgtatttttagtagagacaagattttgccatgttgtccaagctgatctcaaactcctgacctcgagtgatcctcccacctcagcctcccaaagtgctgggattataggcatgagccgccatgcccggccatatttcttattttatttatttattttccccccaaggaccgtggagattctatattaaatcttttatttctaactttattaaatattattgtatttttaaaagaacacttcatgaaattacccacagaatagtttaaaattgtgcttttgatacctttctgccctatacgttaagtgacagcagaggaaaagaggtcattcctctgtagcctttgttcttttttgtaaactttacctttgtttctttccctttatgtcatctcccttcatgtaaataattaagaatcaaattcactttaaagataaaattagacttactgtattaatgtattaatcgaggccaggcacggtggctcatgcctgcaatcaatcccagtacttttggaggctgaggcaggcggatcacctgaggtcagaagttcaaggccagcctggccaacatggtgaaaccctgtctctattaawagtacatgggttaggccagggcgcggtggctcatgcctgtaatcccagcactttgggaggccgaggcgggtggatcacgaggtcaggagttcgagaccagcctggccaagatggtgaaaccccgtctctactaaaaatacaaaaattagccaggcatggtggtgcatgcctgtagtcccagctacttgggaggctgaggcaagagaatcgcttgaacccgggaggcagaggttgcggtgagcagagatcgtgccattgcactccggcctgggcgacaagagcaaaactccgtcttaaaaaaaaaaaatacaaaaattagctgggaatggtgatgcacgcttgtaatctcagctacttgggaggctgaggcaggagaatcgcttgaacctgggaggcagagattgcagtgagccgagatggtgctactgcactccagcctgggtgacagagcgagacgctgttttaaaaaatatatatataaattgtcaaatagcactctcttttagctacatatgggtaagccaaaaggtaatcttgacagcatttcattatgtcttttagtaagcattttatttatttttcagctaaaggttatagtgaattctctgaagaatatgataaatacattcgtgccaagtggaaaarttatgcaggtggtggatgaaaaattggtaagaratattatttctcamaataaatgttaagcacatagaaaatgcgctgktatttatttaaaggcataattcagcaacctcttcgcagggacttgggcaaatctgcatgaatcyagctcactgtcagaacttcagagggacttaaatttggggaattggtaatattagggttacagcatagcaaattatggtttcgtaaaaggggatgggactacgttacgacattgggcaaataaacatatttcatctgggagtgtggtatttccttccctttatgtagtgagttcactactgaagacttggttttttttcttaagtgtctcagggacatccagagattttttttttgtagatatgagcaaatgacatactcagcctggccccttattctgtagagttcctcagtagctctgaccctgaaactcatttgggctgagtgtttctgtgcaatcaccaaaccatttcattttcatcctcatcatgcaggaagactccatttctcagccctgtttttgttgacgcagaaccaatgaaacacctagggcctggcccctagaactgttaaagggatcctcattgctcttgatggcagattttgggcattaatgacatttggggttgggcagctttttttttttttttttttgagacctcatctcactctgtagcccaggctggagtgcactggcatgatcatagctcacagctgccttgatctcccaggctcaagggatccttctgcctcagcctcctgagtagctgggactacagtcacgtgccgccacacccagctacttttctgaatttttagtagagacggaggcttgctgtgtcacccaggctggtctcccaactcctgggctyaggcgatcttcccgcctcaacctcccaaagtgttctcccaaagtgttgggatcgtaggtgtgaaccgccatgcccggcctgggttggatatttctttgtcgtgggcttgtctacattccaggatgcccggcctggggtgggtgtctcttttttgtggggctgtcatgtgcattgcaggatgtttagcagctcaggatgcccggcctggggtgggtgtctcttttttgtggggctgtcatgtgcattgcaggatgtttagcagtgtccctggyccttacccactggatgctggtaacaccccctcagttgtgacaaccaaaaatgtccttagatgttaccaaatctcccgtggtcgagaatcattgccctagcggctgagtgctgtggccacatcctccctatgacacttgtacctgccaagcaccaaacccattatccctcacgtkcatgctctcggagcttttgtttcaggctatcctttatgttcatacttaccggacttcctcaaaacaaaaaaatgctggcaggagcaaaagaggatgaggcccccacgttccccgtatgccttaatctcccctctactctgaatgttatcagggagggcaacattgcagagagtttttgtgccacgccttggaatcggacaatactgggttttaaggctggatcagtcacatactagccttgtgtcctagggaaagtttcttaacctatgaaacctcagttttctcatcagggagaataataattactaatatatatttcatatggtggttgtaagggttaaatgacatactgtgtataaagcatagtgcttggatgtaataagtgtttaataaatacccattacgtcacatttgtttgttaaatggctggaacattccacttgggkaatgctttgagttcctagggaraaaaaaaatatgtttaggtgacattacatgtaattaccaagttggttaaaaaagtgagattcgtgaattttaagcagattatctcagcaaaaggccgtgaacttaagttgtgatctggatgttagtagttgccattgagaataaatatatgatgtccaccactgaatttgctcaatgtctctggttygctaaaagaatgcagttacttcatcttagctgaagatcagccattaaccatgacacagggctatggatagaatagtgcaggtttatctctgtgagtgtgggaaggaaatggtaagaacggtatatgccagtggctagagggtgaattcgtgcagagagataaggagtgcttgttaygatrtttttgtggtgtgggtcaggttaggtcatccaagtggaattactctcgttcctgccttctctggagaatgatggaaaaataaggcaggaaaaacaatctgagaatctggtctctgtataggggcccaatattcagtattacatagaatctttttataactacatgatgtaaaaatgctttaaaaaataattcctatcacttattatgatagcagtatctagaaaaaattatatgtccaagaactagatttcaaagcatgcttttattatatttgtttatattatattatatattttttattrttattatgttaaatgcttttattaatatatttgttttccagcctggcctacttggcaactttcctggcccttttgaagaggaaatgaagggtattgccgctgttactgawatacctttaggtaaagttcacttagaagctttaaaaaaaaaagtaattaaattcttttacaagtttccrttgaggtgtgatatacatacagcaargtgcacaggtcttagatatacagctcagtgaagcttcagaaatgcatgcatgcatgtagccatgactcagatcaagatacggaagagcccagcactccacgatgctccatcatgcccctttgcagaaaatactgcctcctccagtaaacactattctgatgtcactatagattagttttgcctcttcgtgaactttgtataaatagaactgaacaatatgaactgtcctgtgtgatttcttgtatttcattatgggtggtgtgctattgtatcaacagggtatttgggtggttttcagatttgtgatattaacaataaaggaattataaatattgtagtacattttgggggtgtctgggtactcattttctggatatatacctaggaagtgaactgttgtgttatagagtaattgtgtgtttagccttatagattctgccaaacagttttccaaagtgattccagcagttgacaatcagcagagtatgagagtttcagttttctcctcttgataattctcctctcgatagtgtcagtctttttttttcctttttttttgttagtgtcaatctttatttgagcctttttgttgagtgtcgcagtatcgcattttagtttcaatttgcatttccttgatgattaatgagattgaacagtttattgacttttttttttttttttggttttctttgtttcttttggagaagggcttgtgaaggtcttttgcccttttaaaaattagattgaaggaattttttacatactttgaatataagccctttgtcagatatatggattctgaatatctgctcccagtctatgaccttcatttttattctcttacttttgtcttttgatgaacagaaatttttaattttagtgaagtctaatatctcagtcttctcttttatgagtagtgccttttgtatccatttaaggaatcttggcctaccccaaagtcatatatatatgcttatatattttcttctagatgtttaatgtttactttttacatttaggcctatcatctattttgaattatttttgtatatgctatgacttatgggtcaagcttcaggtttttctcatgtggtatatccagttagttaaacagcatcaattcaaaaggctatcctttcctcagcaaattgcagtggtgtctttgatataaatatacaatacatatatatatacacacacacacacacacacacacacacaatgtgtatctgtatatacaatcaggtgattgtatatatgttgttttgtttggggaattaagtttcatttacatatttgtctttttgtcttcccttatatcaatactatttcacctcagttactaaagctttatagtaagtcttcaaattaggtggtataattcttccaactttgtttttctcaatatttatttaagttactgatttctctgagcagtatcttttattttcagggagaagacctcrcatgycattcgttaaaattattcttagatattgatggtttgggaagctatttttaaaatttcaatttaagctttatggcatgtaacgaaaaatattttccccacgaccccaaaagttttatctttaagctagcaaagcagtagtgtcattattttaaatagccaacagtaccttcattttatgagatgattgagaatttgtgaaaatcagtagtatttatcaacaaaagtggctagttttgtgtgctgcttctttaaaaaaatcatttaaaagatagcatactggaaatatgtacttgctgcctttatggaaagcaagtctaattcctttattatgtaaagaactctagcaactcaataccaaatagaaataccttatggattaagaagaataacatgatgtataagtggtgtaaatttatataattattataaattattataaatgtataataaaataactagaatttcaccaaattagaaatttaatggaaataaaatacacattggatttgggtgaaaaaaacatgttgagcttaacatgttaatgttaaatgggacagaaatacaatgtgctgcctacttttgaattaaatgctaaatagcagtattatacattttgggaaaatattcaaaaaataaaataccctagaatggagtttcttggcagctctgtactaattttaatagttcttgaatctcctttttcaccttagaaattttagtcacactttaaaaatctgggcaaaatatatgtccagcaaacagccaagagccagatgtattaaatgatcatatttacgctcccaaaagaaaattcaaaatgaagcatgttgataaacattttggatgtgatgttggagaacaattgcaacctgcccagatgttcagctcgcccgaaggctgcctccttggtgacttgtttcatcttgagtctagagagtccaggctggggaagaaaaccacctccagccggccgttccagcacagcccyactggccaaagcacacactcacacaatgaaaacactgaaactttttcttaaaacaaatttttctcccattgtcatggttctgtatattaacacaaaattttcttttctcataggagagattatttcattcaatattttttatgaattatttaccatttgtacttcaatagtagcagaagacaaaaaaggtaattgtgcgctgagggagggtgggcagcatgaagcactacatraagaaaaatcttctaaatgaaattagaacttctgaaatttgggcttgctatgtaaattctgtrtatgttgcatacagctttttatttcttggyaaaattttgtgattgtastgaaaattttccttattttcagactactgtactgcctattaaagttgatttcagacatgcaaaaaacctggaagaaatgttgcagggctagaaacattcttctcttcctcatagtttacttctacccatctacatgmtttgatrgaagtgctcgcaggaggtgcttccttatcttcgtgtatgtcatgacatctgtccttttcttgaggcccagaacacacattctcccatcctttcccagccaggcaacccaatggataccagcctcactttcccgtatttttcctgactggttcccagagtacaaagcacaggacaacttcgctaactcaccctgatctttgacctatactctggktataaatctgcctgtaccttacccttgagatgtcctgctctaggggatgatgcctgaagggaaacatttgatgaatcacagtaattgaggctcagatttctgtgtcctggtagaaccatgtgatagtgaaccaaaacatgaccattgattccttttcccatattctgatctwacctggaaacccgtgctctcagattttgtggggttatctggcagatagayggtgacaacagtcccatctggtgaaggcttaggatattaggatgtttcttacttcttattgtttgaagaaacagttgtgaataaaaattaatcaaaattagaggccaggcacagtggcttacacctgtaatgccagcactttgcgaggccgaggygggcgratcatctgaggttgggagtttgacaccagactggccaacatggtaaaaccccttctctactaaaagaaaaatammaaaaaaaaaaaaaaagtagccaggtgcggtcgcacatgtctgtaatcccaactacgtggaaggctgaggcacaagaattgcttgaacctgggaggcagaggtcgcagtgagctgagatcgcaccactgcactccagtctggccaacagaacgagactctgtctcaaaaataaatwaattaatcaaaaytaattgtccagctttgatttagaatcttaactgctattacacgtctcttctgtctaccttcaaataggtcatctaatacatgggagaaacatggattttggagtatttcttgggtaagtaaagaacaaagggtcaggcatggtggttcacgcctgtaatcccagctttttgggaggctgacacrggtggatcacgaggtcaggagttcaagaccagcctggccaagatggtgaaaccccrtctctactaaaaacataaaaattagccaggcatggtggtgggcatctgtaatcccggctacttgggagcctgaggcagagacttttttgaacctgcgaggcggaggttgcagtgagccgagatcgcgccactgcactgcagcttgggatacagagccagactccatctcaaaaaaaaaaaaaaaaaagaacacagaactgtttygktctgtaggaagagtaggttgtrttatattgatgataagtaagtcccaagtcacacccaaaatgtgatcataagtgaagataaatggattgcttgagtgctgagacaagagggacatgctcttctattttatgtgtccatcttgacctttctgaaaaaataagaatattgtaattagcattctatgtttgaatctgaggctcactatttataagctgtgtgatattgagagagttacctgacttctctgaacctcaattttatcatttggaaaacagaataawtataccatattgtaaaggtcttgttaggattgatcgtggtgactcggtaaataaagctcctagtgtaatgcctggccctcatcatcatgttgatcattactatcactgtgtttctgaaatgtcactgaaacatgtcttttataggtggaacataaataatgatacctgggtcataactgagcaactaaaacctttaacagtgaatttggatttccaaagaaacaacaaaactgtcttcaaggcttcaagctttgctggctatgtgggcatgttaacaggattcaaaccagtaaggagtctgttgttacataattatacaggtagccttctgtcctgttaccgttatgtaaaagttgaaatctaagaatatgaggacctaaagggaatatgaagccccatttcacccccttgtacttcttgtcacttcataggtatgagatctcgtggtagagaagagtagaaaggaaacggaggtttctgagcctcttctgggataaagagcatgtggctgggtgtcaagggctgggagtcacaatctgatttctagtcctgggtcttccgctcacttaggcaagtcaggcgttcattctctgcccttcagtttcckgtccaaaaagcgttgccagtgataccccacctacttatctcacatactagaatcaaaaatgctttgaaytttttaaaaagccttttatggttttgatttatttttgccttccccattacccaagctaggcctttatatcccactctgaagtacagtgagcgacagggccttaaagcgcatggttgatgtttctgacttsgttgctttgtcttyttctcagggactgttcagtcttacrctgaatgaacgtttcagtataaatggtggttatctgggtaagtagagcattctcaagtgaaatgggaatctcagagcttttttatgaggaaggctggactgtgccttctggttacaaagtccaacctcttccggttcccgactggttacaaagtctaacctcttctggttcctgactggttatatagtccagcctcttccrggtcctgactggttacatagtgtcacctcttccggttcctgacaytgtgttcatctcttccaggtattctagaatggattctgggaaagaaagatgycatgtggatagggttcctcactagaacagttctggaaaatagcacaaggtaaagtgtttcgttgctttactattaaatatttattttaaattactcatattaaaaaataaaaatatttgtcaagctccagcttaatcctttgaggaactattgcagaatttcttargtgaacctctgacactcatgtggaattactcatgttttcttygtgcagactgtgtgttttatagcaaataaatgaattacttaaaaagcactagggatactgacattatgaaaggcacctatgaatatttttggtgtacagaaaaaaaatgacccacacacaaaagaacagtcatacagtaaaatcttcatttaaatggtagtacagaccaggcacagtggcttatgcctgtaatcctcaygctttgggtggctgagatagacagatgacttgcacccaggggtttgagaccagtctgagcaacatggcgaaamcccgtctctataaaaaatacaaaaattagccaggcatggtgacacgtgcctgcctgtagtcccagctactcaggaggctgaggtgggaggatcacctgagcccaaggaggtcgagactrcagtgagctgggatcagtccactgcacttcaccctgagtgatagagtgagactctgtcttaaaaaaacaaaataaataaatacaaaatgtactacatattaacctgtaagttatatcttgccttggtatagaaatcttacaatagcaaaactgcctttccttcattcagccagcactgcgtccaaataaatgggcatcaatcctatttttaatacttcccagggaataagatttaatgttagtagtgttctttgataacccacttcaatttttaatagtcctaattttcaagaaggtttactttctgttctctaagtcctacatactgtaatattatttccctttgttctgttgttgagtgaaaggcatggacagtaagggtggaagatgatctcttgaggccactttgtttctccttcagattagaggggcttcctaagattcccrcttcccatctcagtgttcaccatacagggtcagggattgcttttcccagaggcattgctcaccatccttttttagaaaacacattgtggctggccatggtggctcatgcctgtaatcccagtactttgggaggcgaaggcaagagtatcgcttgtgccaaggagttcgagaccagcctgggcaacagagtgagagcccatctctaaaaatagaaataaataaataacacattccttagatacttgtttttctttagtttctacagagctaaacatttccgttctaagtcatctaaaaatgtttcccaccatcatcctcagcaaactaacacaggaacagaaaaccgaacactgcatgttctcactcataagtgagagctgaacaaagagaacacgtgaacacagggaggggaacatcacgcaccagggcctgtcrgggggtggggtgaaaggggagggakagcattaggacaaatacctaatgcatgtagggcttgaaacttagatgatgggttgatgggtgcagcaaaccaccatggcacrtgtgtacctatgtaacaaacctgcacgttcagcacatgtgtcccagaacttaaagtaaaatttaaaaataaatgaagttatttactaaaattaaaaaaaagtttcatttttctttttaaatgtttctatatagttatgaagaagccaagaatttattgaccaagaccaagatattggccccagcctactttatcctgggaggcaaccagtctggggaaggttgtgtgattacacgagacagaaaggaatcattggatgtatatgagtaagtaggtttgttaaagcaaaagaagtagaaacaaaagcatacactgatatactttgagttttaaggcakgtagcctaagarggaatctctccttttgtatctagactcgatgctaagcagggtagatggtatgtggtacaaacaaattatgaccgttggaaacatcccttcttccttratgatcgcagaacgcctgcaaagatgtgtytgaaccgcaccagccaagaggtacctttgcagggtcatctatagaaagaaactgttgccattaaagattcccttggttctggcatttttctttggccttcaagtaatttataaacgtyctatttttcatagtatctctagccactctccactratttttttgtttcgttttctwaacttaaagagcaaaattgtgctgtactttccttttctggttctaatgctggataccactctgaagttgaataacaaacaggcaagaatttaaaaaggggaaggagagagaggaaagtaatccattaaaactgttacctgtrtttctaacagtgactcccacagaaactccactgcggggatggaggggaggttgattaaagaatgtcttggtttctggtggcccatgtgtgtagataaggctgttggcttctgtatttaacttactgaacaaaactattttcttgtgttttagaatatctcatttgaaaccatgtatgatgtcctgtcaacaaaacctgtcctcaacaaggtattttaaatgttatatgtatatttgccttttagrgaaagaatttggccctatgttttatctttctctgttatctttgatcagtttgagcacaaaaggtgtgttcagcttaggactgaktttttattaaaaaatgtttttgtgtggctaaaactgtattttggaatacaagaaagaaattgatcactgaggcttgataggtcagaatattgtttatagctttatttacatagcatttgaattaaggctagcattttactcttattggtatctattaaaaatctcacactatataactaacacctaaatgtcaacaaaacaaagtctgcagtccattttcagacagagctctgtgtcttggtgggttccggtttcccttaaactttactacatctgtttatcttttccctacactgtagttttaaaaaaatgcaaaaagtttcctatcatcccaccactcgctaacaatcattccctgaacgttctgaatatgcccccctaattwtcccatttgttccttcttttcttggtccttctccacagctctccctaaagtaaacatgccgcctttaccctgccaggacaaatccctccggcctttagcatccaggtcaccctggctctcacaggaagcctgccttcagttcacgggccctgccatacttgcgttttgcctataccatctttgagcaagtcacaatctcgtgacttgtgtttgggtgkktgccttgtgatctgggtgcctgcagtttcccccactgtattggaaatgctttaaggatagggatagccaaagctccacggtttttactccataggacaccggcaggtctcccaggactgccagctgtgcgtcaaggagggttaaggcagtcttaaagcattgggggtggagcaatgtgctgtcaggaataagctcctataaggarctggagattctttcctgagcctgtttatattcattacctgaaacagtgatcctgttgaagttgtttgctttagytatttggtgagactttagctaattttatatgattatactatrttaatataaatatatasattatataacatgctttgcatatattaagttatattatttaatattaaataacttctaaagcaaattctacaagtatagaaatgctaatatatatcagaacatctctgaattgaaaacgtccttaaagtaaaaataacttttctttcagctgaccrtatacacaaccttgatagatgttaccaaaggtcaattcgaaacttacctgcgggactgccctgacccttgtataggttggtgagcacacgtctggcctacagaatgcggcctctgagacatgaagacaccatctccatgtgaccgaacactgcagctgtctgaccttccaaagactaagactcgcggcaggttctctttgagtcaawagcttgtcttcgtccatctgttgacaaatgacagaycttttttttttccccctatcagtwgatttttcttatttacagataacttctttaggggaagtaaaacagtcatctagaattcaytgagttttgtttcactttgacatttggggatctggtgggcagtcgaaccatggtgaactccacctccgtggaataaatggagattcagcgtgggtgttgaatccagcacgtctgtgtgagtaacgggacagtaaacactccacattcttcagtttttcacttctacctacatatttgtatgtttttctgtataacagccttttccttctggttctaactgctgttaaaattaatatatcattatctttgctgttattgacagcgatataattttattacatatgattagagggatgagacagacattcacctgtatatttcttttaatgggcacaaaatgggcccttgcctctaaatagcactttttggggttcaagaagtaatcagtatgcaaagcaatcttttatacaataattgaagtgttccctttttcataattactstacttccyagtaaccctaaggaagttgctaacttaaaaaacygcatcccasgttctgttaatttagtaaataaacaagtcaaagacttgtggaaaataggaagtgaacccatattttaaattctcataagtagcattsatgtaataaacaggtttttagtttgttcttcagattgatagggagttttaaagaaattttagtagttactaaaattatgttactgtatttttcagaaatcmaactgyttatgaaaagtactaatagaacttgttaacctttctaaccttcacgattaactgtgaaatgtacgtcatttgtgcaagaccgtttgtccmcttcattttgtataatcacagttgtgttcctgacactcaataaacagtcaytggaaagagtgccagtcagcagtcatgcacgctgattgggtgtgtacatctgtgttggtttggaggaggggggttattatcaagaaatacaagctgaacatcgtatctgaattaaataacaagggttatgtaagtgggttattaaatatgactaaayggtcacaatcttactcttacatgactgataccacctcttaaccagatactatcaacccaatttgcaggtgtttaaaggcagtttttcccccagataggtggtgcttccacaaaactttagtgattccaagattactttagtgaaacgaggaattataagaggatttacattaaaataggatttaattaatgaaaaaaaaactttactcagattttctacctcttacataaatgaagtcaggtcaacttgatgtatttttttgttaatgtaataacctttgatatgcctgatagtaaagaggtgagatgctaattgtttcagaccgatttctccggagtaaatcaaagtttacaagaaataacaggtattaagattttaggaagtaattgtttagtggtaaagcagttttaaaataggatatacaggatgagcctgtttatataacactttatatatgtacttatgcataactagatacacatctagaatatcaaaagatgactgggaggatattaaccaaaatgctgactgtagttcctactggataatggcaagtgctattttaattttgagaggacaaaacttagtagccattggacattaatgagactctatttttagaaatactataaaaaaataaggtccaggttggatccaaaccatgggctccatctaatttccctgccaagttttcgggagtttgattgtgaatggaaggctgaatcctacctgtattccttcacacatcgagctcctcagtcactcatcttaattagagctcttgcttatccatttatgtaccaggccttgtgattgayaaggtgcttgacctagattacctcctcagcaaaccccggtatcacttgtaatcacacttgccagccatggaagtaacttgctgaaagttgcattaacagaagggcttagagccagggttttagccaggtctgtccaactcctgcgctcttatgacacccgaattcttgactttacaagtaggattgagaaacagctctgtcctatgagacccacacttctgctgccatggaccaggccacccwgctgagcctggacaccactgtgtcactgccttctacttgttctgtgtcaattattaatgttcccatagggatcagaaaccctttggtgttaggagctgacaggtcacctgtttttgactaccctgagtctgaatcgtgctcagcttgtggggaatgcgttaagagctcctcagtctttctgtggctgtgacccaggagtacgtgaaaaatatgaatagttcagaaatttataaaaagtcactataaaacctcacacagtcattattgaagttagtctcacaaagtgaagcatagtttttgtttattggtgacaatttacaaaatacttgccagcttagcctcacatatgacagatgtgaccagcaggctccagaccwcaccgagctgcatgctggccccgtctacaagcctggggaagtgtggctgggctcctcaaccttcacaacttggggaggttgctcagctcacatgaaaatcagtcctctctttttccctagggcactstgtccctcttatgttgataaagtgggtttcccagccaggtggcacaggggatgctagactggtgtgcgttgggcaattctctgtggcagttctggacatcttcaaggatgcttgtctaggcagaggacagatttgtttcctgactacggtaataaagatcatcatctacctgtagggcaaaggttggatgagttgattggagaagcagcccatcttataactcgaggggtttcctgagcttggggttcctcagctgtgatacagatgatacatcataaattgggttgtcayacatcacctccttgggggacttggggtggggggcaaatggcattcccagagtaatacagtcctttgcctttggcccaggagtctgccagcatccaggaagctgtggcaggctaggtcawtagcttgcaagcagggtaaaatctcaggcccttcacagggccgcagctttggggcagctgggcagggtctaggcataccagcctccaggctgcctcccacagccccggcttcctctggggctccttgaagggcagactgggacagtgatacggtttgggcctgtgtcctcacccaaatctcatctcgatttgtcaagggagggaccaggtggagttgattggagcatgggggtggtttcccccatgctgttctcgtgatagctagtgagctctcacgagagctgatggttttaaagtgtggtgcttcctggttctccgacttgcttctctcctgccttgtgaaggcgtcgtctcccgccctcttgccttctgccacgattgtcagtttcctgaggcctccccagccatgcggaactgtgagtcgattaaacctctttactttataacttagcastgcgaaaacggactaatacagacagagtgggatagactgcatccctctgtgttctcacaggctgggaagggaggtgtggggcatgcaaggtatggagaaagttagtaaaaatcactggccctgtggaccagaagagacctgggccaactaggttttgcctctgtcaaatacaaaatcctcataaggaaacttaaccattcagccctcactgggggcccccccaattgtttttcaccaagacccaaacttggcttggtcgtcccggtcgtcagtggcagcaataacacctggaacttgttgctcccattgcaaggttgagcaatagcagctggcctgcagatctcacagacaagcggcctgtggcacaactggagtttatgttccaggtgcgcagaatgccgcacacagccctgctgcagaggtgggagggaggcgcataggcactgcggtctcctggtggattcagctccaggcagcatcccaaacattcacttcacatgtatctgattactgtgtccatttgtagctgacaggccaatttggaggcatctcagctggctgcctatgactgttgttaacaattcaagtgctttctgcaaaatagggcattgttattttaaaatacttcattggaattttttgttttgttttgttttgttttgtttttttgagacagagtcatgctctgttgcccaggctggagtggtccagtggygccatctcgcctcacggcagcctccacctcccaggtgcaagcaattctcctgcttcatcctccagagtagctgggattacaggtacccaccaccacgcccagctaaattttgtatttttagtagagacggagtttcaccgtgttggccaggctgatctcgaactcctgacttcaagtgagccgcccgccttagcctcccaaagtgctggggttacaggcgtgagccaccatgcttggccgatatggcaattttgattgaattcaaaactcttcccaagataatttagtagtacatgtatcaatgaaagttaaaaaaaaattagttttcaaatataattccaatttctgtaaattcttgaatgcttgtacaacactgctttaaatttatcactcaattaggcatacaaattgatccttaatgatttttcaaaaatttgaggagatcataaagtctcggccaagaattgtgtataacaatttcaaatagaaaataggttataaaaacacgttaagaaaatggccgggctctgtgactcacgcctataatcctagcactttgggaggcagagacgggtggattgcctgagctcgggagttcaagacaagcttgggtaacatggtgaaaccctgtctctactaaaatacaaaaaatcagcttggcaaggtgccgggcgtccgtaatcccagctactcaggaggctgaggcacgagaattgcttgaacccaggaggcggaagttgcagtgagccaagatcatgccactccactccagcctgggcaagaaagtgaaactctgtccaaaaaaaaaaaaaaaaaagtctatagttttgcatttttatgtgtaatatctcccctgatgctttatcttctgttcattacttagacatttcataattaatataaagaaaatgtaatgaatttttcaccaagtccatatatcccctctcgtttacaaacactatccttttcagtatgtactgggacatacaaacaggccaaaaggtaacaaatctcacattgtttccattgcttcatcaccagcctgggtgaccagcgacacatgacttaactccttgcatccccatatctgcctttgtaaaatgagggtttagatccaattttctctaaggattcctctagcttgataaatctagatttaaattgtgtctcagttgcgcagggaatccagtagcagccgacacccaggtgtggttggactcgtcagaaccattgtagtctttgttagtcatacacatgcatgggtgaaatctagtcaaaactttcatatcaagtatttcaaaatgatgctctacttggcagaaagcacatgcagtttgggcagtcacgggcaggtagccaagatgcctccaaagtggcctgtgagctgcaaatgacagtttctacatgtataacatatacaaaatatgatgtatattttagtagagatggagtttcatacatatatacaatttatatatacacatatatatataatttgtacacacacacacagatttacagtaaatatgtttaaatttgaaaccatagtacctgagttcaatgccaaccctcactgaatgtcagaaaaacatagtaaggctgtgcatggtggctcacacctgtaatcccagctctttgggaggccaaggcaggagcatcacgtgaggccagaagtttgagaccagcctgggcaacatagtgagacttgatgtatactaaaaatcaaaaaataactagctaggctttgcagcatgcacctgtgtcccagctactcaggaggctgaggcgggaggagcacttgagcctgggagatggaggctgcggtgagctgtgatcgcgccactgcactcaagcctgggtgacagagcaagattctgtctcaattaaaaagaaaaaaaaagacatttacattatgctctatgatagtctagtggcctacacaaattctgctcttcccatgttgtggatatgaaataatgaggcagggttgatagcattatttcaaaatattataagaagtagcagttctaagaagtcaactgcaaggctatgcatgtccaaggctgtgtgtgggtgagtgaaatcgccttatgccaaggagccataaccaaggggaaattacttgatgcatacaccagttcttgcttttcacctgctcggtacaatggaccatacatattaccaaatggaataagtaagacttttcatcttagttactgagaaaaagtattccttggtaaagcaaacacccagtgattggctctgttattaaagaattaagtttactgtcttactatagaaaatcaagtttcagtagttgagtttcattacatttttgtttctgattgttacagttgctgggtgggaacaatgtgtaaagttttcacttgtttgctttcaagggtactgacttcataatatatagacatatacacacacacacatatacacacacacatattcatgtgtgtgtgtgtatatgtctctgtcaaagacacatatgcagtagtttttaagttattacattcattgccaatgagcaatggtgtatacaggggaagatgaacttgagacttgttctggtgttgtctctggcactcagttttcctatatttaaaatgtgaaggaagtaaggcactatgaaagatctttgatatctgcaaaatttttagggctgtcaaagacaagggactgtgaaaagttgacagccctttgttgtttgactgggttttttaaccaaaagaatatagaaatctatagcgatcatattaatatgtattgaataatactactgtcttatagaccagataaaaattaatatttttcaaatcattctccatgtggaaaatctgctatagccaaa

SEQ ID NO: 95414 - DNA, 29463 bp, Homo sapiens
gagaattaggggcctcttttcatcctaaaactgttgttactaatgatacactctttaatccacctaattatgagtttcagctactttcttccttaatctggttgggtataactagccctaaaataggtaacagcaccagaaagagatggaaatccttaaacatggtgttctcatacttttttttaatttgcccatttcttcctgcagcccctacctgaaaatctcattagatatcaagtcagtatgtatgagggtgtataaatgagaggtaatctgatttgaaaagtgggtaacttcaatacaattacaggacaaaaatccatctaagtcagtttaaaaatctttagccttatgttaggtttcaaatatttgcgattccaagttcagattaatagaagaatcaaatcagaagataacttagcaagtatataacatgaatattatcaccaaggttgtattaaccttggtgatattaaccattaaggttatattaaccattaagagttatattaactcttaagagaaaactatttctgggggtgatcttatcccctgccaagtgagcttgtttttatctttaaactcagagcctttatggtgataatatgtattgtggatctcctagaggggatttagtcccaatgaattggatcttctctccagtggacagctgttatttttgcctacccagcattcatttcctgttcttaaggtgacagcacccaatttttctctaggcatttatccaattccccactctcagttcttgtggtctgacctccaaccccattcactggctggggaagtgaaatagcagacacatggcccagacctggcccgtaaaaacccagtttcctctggccagttaggggtaggcatgtaactcaacctgggtcacaataagcatcagccctgggacaggcactgccactactacaaacgctgataaactaaggcttcaatttttggagaaaatgaactgacaagaaatccaacatagaaagaaacaattctgaatgatggaaagatggagatttctgaaaacattagttgaatacctaaattcacctgtccctgctagaacactggtcatttagttacacatgtcagcacataaattctcctgggcttaaagctaaatcaaattgattttctgtcatttgataccaaaatcctctcaaatacaccttccactggaacaagttcagtttagaaaaactcaaggctatcctaagaactggcaatttttaaggaaagttaatgtggagagaagcaccaaggggcacacacttcaaaacagcgatgtgttctggggtaaaaagagagatccaaagtgttgaatatacatggcttttaaaaataaggttagtatctccttatccaaaatgcttgggaccagaagtgttttagatttcggactttttcagattttggaatatacttaacagttgagcattcctgatctgaaaatccaaaatccaaaatgctccaattaacatttcctttgagcttcatgttggtgctcaaatttctgatttggggccatttcagatttcagaaacatattcagggaaagataggatcagaagtgagtacggcagtgcaaaaagaaccaggtggtcagggaattgactctcctggcgagtttagcctttcctttcttggttcagggacatgtagggggagctcagaaagattggtcctggtgaacagagagatcaaaaactcaaagccacctccagtgaggaaacttagaattaataagcattctaatgtcaggaaatgttttcaaaatagctccctccctccatcaaatacagacacacaaaaaaatcagtgagtacaggataattgtggaagctagaaatgggtgcatgaagtttattctaactacttttatgtgtgtttaaaaatgtacatataggccaggcgtggtggctcacgcctgtaatcccagcactttgggaggccaaggtgggcggatcacgaggtcaggagatcgagaccatcctggctaacatggtgaaaccccatctctactaaaaatacaaaaattagccgggtgtggtggcaggcgcctgtagtcccagctactcaggaggctgaggcaggagaatggtgtgaacctgggaggcggagcttgcagtgagccgagatcgcgccactgcactccagcctgggcaacagagcgagactccatctcaaaaaaaaaaagtatacataaagtttttttagaaaagaaaattcaaaactttagagaaaatcaaatctggaaaaattagaagacctaaggaaatatttcgcttttgaatagaaaggagaatggcaagtttttagtgaactttgttttcaaagtttgcctgcaccatttattacatgctacgctgtctaagttttaaagaggtattatgaagtgctgaaccctttgaaatgaaaaacccagaactgaattatagtcctcgtgtttcctgaagcaaaataaccctcaataggttatcgtgagcttcaactgagttatgatcacagtaaactattactctgtaaatctctaaaccataaagtactatacgcatgttaagaaaataattttaaaattatatatctgaaaatctgtctaatgagcctcataactgaaactactgcaacattttaatagaagagaataatgtagaaaagtttacaagagttgctctcaaaattcctatcatgtcatagtacaggataagcagccagtattttgagaaaactaccttaggcatgagagatttttttttttttttttttcctgagacagggtctggctctactgcgcaagctggagtgcagtggtgcgatcatggctcactgtagcctcgacttcctgggctcaagtgatcctcctaattcagcctccctggtagctaagactacaggcatgtaccaccacacctgactttttttggcttttttttttttttcttttgtagagatagggttttgccatgttgcccaggctggtctcaagctcctgagctcaagtgatccacctgcctcaggcctcccatacccaaggatgcttaattactgaaaagttactacaagatcatactaatagggttttgccatgttgcccaggctggtctcaagctcctgagctcaagtgatccacctgcctcaggcctcccatacccaaggatgcttaattactgaaaagttgctataagatcatactaataaaacttttccaatacttaagattggcagaaggctgaagttccttgtggaaagccttcaagcatcaataatgaacttgtaaaagaagtagctctaccctgaaaagagtatgatttcttcactctattgtcaaaggtgaagggggcagcagggaaagtctagagattaataaagagagactttgttaggagaaactattgtaacagaggctcctagcctaagggtgcagcatatgttttctacgcagataccataccaaaaggaaagttaagttggggcaggaaatgtttgtggttaggagttaggcacaaggggcaggggcctggaacaaaaatgaagtaaacacattagggtgctgggaagttcacaaaagttagggcctagctgtccccagtcaaaccagcctaaagttatgtcaagaacaaaatctgatcactattgatagaaccaatatcagatgatactaatccatgccctgcttctctcaagaaaaatatctaaattggggccgggtgtggtggcgcaagcctgtaatcctagcactttgggaggccgaggcgggcagatcacgatgtcaggaaatcgagaccgtcctagctaacatggtgaaacactgtctctactaaaaatatatatattttttaaattagacaggcctggtggcacgcacctctagtcccagctacacgggaggatgaggcaagagaatcgcttgaacccaggaggcggaggttgcagtgagctgagatcgcaccactgcacactccagcttgggcgacagagggagactttgtctcaaaaaaaaaaaaaaaaaaaaaagaaagaaaagaaaaatatctaacttggaaaacaaaacataaacctcatttggtgactttggtggtttcacagcagtaataaaagtgataaggtctataagggataacactgtaggcgccttctggcactaaagtttcatgggtccttgccatcaggctcaggtgttactagcaattcatccaaaatgcagttataaaacacctactttgagccaggaactatattttatatttattttatttattttttagaggcagagtcttgctttgttgcccagactggaaggcagtggcccgatcacagctcactgcagcttcaaactcctaggctccagtgacccactcacctcagcctcccaaagtgatgggattacaggcgtgagccaccacatctggccccaagaactgttttcaatgatagcattttatttaatattataaaattaatatgaagaagttgctactaaaagaagcactttagcaaataaaatttaatagatcaggtagaaacactgacttcaatcttaatttgggtggctgatcaggtaacctacaattgggcaatcagagatgaacaataattttgtatgctatctgcctgactacacaaggtacttttatgtctttttgtcaattacaagaaaaaattatccctgggcaaacaaatacacaaagataaaagagcaaaaatcctacccacaggcaactataagatagaaaaaaatagtttgattaacgacttgaagtgctgaacaaacatttaagaactttggcagaaatttctgaaaattctagtccaaccgcgaatcaagaaacacaggtaacactatgttccgttactgggttagagaacagaacagttggctagtttggctaactcatagaaaacaagcaaaccaaccatgctctggtccaacaatcatcagagcacgagtttctcctactcagagtcggtcccatgggggaaaaaaaagccacacaggagcgggatctgtagttaaggaagataattagaggacgattttcctttttttatttctctgtattttgtaaagcaaccaccgaggtaggggcggggagggagtggttaatattgcggatattaagatataaataaaggcagatgaaatgaagttagactttcacaaagaacgaaaaacctacgaatgctcttggcctcattaacaaggaacataagcagttccagatgaggaacccataacaaacttcaaataacgaaactgtagggagcaagggagtccgtgagagtattttaagaaactgggacccaggaagactaagttaacggatgggatatcatgctgtctatatttctttacacactgctatgctttattaattaggttacattataatgttaaataactagaagcgctgggcatttaaagttcttccagaccgccctaaccactcaaattatcctaattagcaattttttttaagttaaagactatttcaatcgcaatgggtcggtttctatttcaaagatgtaaaggagtcaacattctggcacttcctcttggccggcaggacgaggttgacaaagtcggccagacaaggtagggttatgggggctgcccagtcccgtgggtctctaggcagtgtgttctctcttccgaggtgggggtgtccccggcgcgaggagctagctgtggtcaccgaagcccacgaccaaagcggggcgcccccagcgcttggggccgccttgcctcggcccagccgcgcacctggacccctaaggcagcccccttcccggsgctccgctgtcccgcggccccgcagcaccgcccagcccgcgccagacccgcctccagccgcagggaactacctaccgtgcgccggcccctgggctgaaaggcctctgactacgggctatgtaacagcgccaccaacgagcgggayggacagagcgactccttcckacttccggaggaagcggaacgctaccggaaatcgcggggagggtcaaaggagacccggtctccgaggctcatggcgatgctggtcctagtacccggacgagttatgcggcctctgggtggccaactttggcgcttcttgcctcgcggactcgagttttggggcccagccgaggggactgcgagagtcttgctgaggcagttctgcgcgcggcaagcggaggcgtggcgtgcctcggggcgcyctggctattgcctgggaacccggcccctcagcactgcgaggccgccacccccgtggtcgcagaagggccccggagactccacgcgcccctcgaagcccggggtgagtgcacacctggaacccttctggtgctcgtcgcggctgtcggccagcccagcggccacatcccacttgrtcgtaacctcagacactactccgcctcccctaaagttgtccttagyttgcgcgccttacctgggtcatggaatttcatcctacatttcccgtgccttgcgggtagtcccagttctccacagagaacttgagactttacaccctctccacgtggctggatgccccgacttggattttatgttagcgtttccatcaaaaaaaaaaaaaaaattaagtttcaggttttcttaagggtatgaacctaaagtttaccgtgattgagaagtcagaggacttttataatttgtcacttgagccccatccagagttccatgtatacgttgaaattgaaacaaaaagtgraacttagttatgtgtggatctgcctttttcttggggttctctcgagttctaattctgacccagaaataacttgagagccactaccctgtggtaagagaagtgggtttttggagctacgggaaggttaatgagttaggcctagtctagttggccaacatcatcttcatttggggagttgaataagggtacaaagaaataatgggtgtaatttgcaagaagctccacttttagattcctcttctactttggcattgttacttctggaagccagagttaagttaacctcccaaatttcgtttggtctatttatctcagtatcagcataagcagataattgttttttgtgtgtgtgtttttggattttggtttttgttttgagacggagttttgctcttttgcccaggctggagtgcagtggccctatctcggcccactgcaacgtccgcctcccgggttcaagcgattctcctgcctcagcctcccgtgtagctgggtttagaggggtccgctaccacgcccggctaatttttgtattttcagtggagatggggtttcaccatgttggccatgctggtctcaaactcccgacctcaggtgatccacccgcctccgcctcccaaagtgctgggattacaggcgtgacccaccgcgcccggccataattggttttaaagtcattactggagctagggtcacacatagtaacaatcgtggtacttgagcttttttttttttttttttttttwtttatttacatgaagagaactgacttagggaactttcccctggagatgaatgcctttgtagttcagatcccagacctaactgcatccacagaaacttkgagcattttctcatccctgaaacattttgcacatttaacatcatggcctgtgtgtatgtatattaaaaactactttaataagtttgtatggttaaatgtttgcatcttactagaatttttatgtttgaaatccctgccccagtagcctgtttcctggaagtctttagcratcacatttgctattggaggagctttactggctggaatgaagcacgtcaagaaagaaaaggcagagagtaagtagattatcatctgctcagccctgtataaaggtcttcctggctatggactagcaccttttttgttgttttttagctttttgttttgaaacaactttagatttaccaaaaaattgcaaagatagcataggttctacatacctttcacccagcttcccctaatattaacatcttgtataaccatgacacatttttcatgactragaaattttaaatggcacacaactattaaattacagattgtatttggatttcacttgtttttctatcaatgtcttttatttgttccaggatccaagctaggataccactgcataacaatgttaaaagatatactgtggatagatttgactgggcaagatgaaatctggagggtacgaagatgagtaagatgtagtcgagcctttgaggtgcacacggmagggaaacagacacagaagtaaagkattttactagatgcgattctgccaggccagaaggaagcttaccatgttgtgagagcaaaagcaagtcccagccttgagatttgagaaggcttcctagagatcaggcaaggagcatagtgcgagtagatactgcatgccctctgtggatgagggggaggtgaaaagagcctggtcaggaaatgccaggaactgctctggattagcatcttgaaatatttagaaattatttataagaactttgcattttagtgaatatcctaggacttttaagatttggtttagaggttttaggtaaatctttaaagtattgcttaaatctttccattctttggagtctcttttgataacattatatacaaaggttaatgattaaatctgggaattcataggctttaggaacttagcagtgttaagttttgtactgacatacatatatatgagactctttggcataataagtagtattgggtaagattttcatagtctaataagcagtaagtttctttagtttcacaaagaaacaaaagctaggaaagttgtggcgggaaaattctagaatatggaagctttttttgactttagtttggaatttcaagtrcaattctaacgtttgttttatttaaaaaatgtattattaaataatctgaaaagtcttcctaaataatttgagagtatttatttgctgacatgttgcgtcattagctccaaacactttttggtgtatttcctacaaacaaggaccttttctagcataaccacaatacaaccatcaaaattagaaaattgacgctgataattttgctgctgttcagtgttcagataatcttcagggtattgtttatttgtttgttttttgagacagagtttcactcctgttgcccaggctggattacagttcagtcttccaagttttgccacttgatgtctttcagagcaaaaggatctgtttcagaaccataccaccttgtatctagttgtttaccttagcctccttcatctgtaacagtttcccaggctttaactgactcccacaaccttgacagctttgacagttacaggagagttattttgtagaatgccccttagcttggatttgtctgatgtttcctcattcaggtcattcgggttgtgtacctttggcaggaatatcacaaaagtgatgctgtattctccrtgcatctggtcagataccacatagtaccagttgtcccattactgataatgtccagtttgatcacttgattaatgtgtgtctaacaggttttctactgaaaagttactcatgtaattaatggtgtttcatgatttgtattgacatacgtatacttacatattctgttccccatcccactatcaatgtattcatttatttatatctgtggacttgtttcctatatattcattcagtttaaatccatattctctttattttgatgcccaagttgtcccagattgatcagcgggagcccccttggagcaggcttctgtgtctttgacacgtctccaatattctctaagttctgctttccttctgccacaacaagaggttccagcctcattttacactttctttgcygcaaccctggtatcagccatttctccaaaaagctgtttccttttagtgaagaatgatatttagaagtcaggttctgggctcatggttcttggagtgtgtctgctccctggtcctctcagtggacatggtgagaaaatagatatatttatgtacatctatatttatttatatctatatagatagaagttcacactagtacctgcagtgtatttscagtactgcagggttcagcctagctctctttctctccatagttgactcttgtttcctattgtaactctcttctctttaatatactcatttatttcatcaatttcctgtgtgtaactaaggtcccgtcaccactatcacctccccacccagctgccckccttagcaccctcaggatcagactccctatgccaggccacccaccgcaccccacttgtttagacattcagctctaggccactgcrgcccctccctgcccccagcatggacacagctaatggcttaggacygaattgttcctgaaaaagaagaaatattttttccttttttacaacataccatagcatttcatttgattttgttttaatgttttgtgcttatttttctgaaaagatttttttagcttcttgaaaactgaaactgttttttccacattttgtgcccccaccatgagtagcatagtacgggccatatgtcaggtatttgagtacctctggttaaattgactttttttttggtgtcgatatgtttttgtctccttaagagttagagaaggaacggcagcgacacatcggcaagcctttacttgggggaccgttttccctcacaactcatactggggagcgtaaaactgacaaggactacttgggtcagtggttattgatttattttggcttcactcattgccctgatgtctgtcyagaagaactagaaaagatgattcaagtcgtggatgaaataggtaagaaagccatcactaactaaacaaagtatatgtttacttcatgttaccaggtttttcacacccttgtattattgttaggtggggttttgcaattatgtgatttgtaagaacataaaatctcarcatttggcttgtttgttgctttgaatcttgtgaccttattctccactgaaagaagcttgttttgatgttaaatgttagatcacttaaaaatgtcagtgtggtctcccttaactctacttttgtgtcccttcctttgcatcactgatgctgccattgcctcttccccactgattgtgacaattaaattaggaaatctttgcaatggtctgcagtctgtggcattttactagtactagtaagaaggaagggtgcctcctccatacagtgaattatttcaggatattcagctcttattaacaatttaccttcttgcccttgagatatggtgggagtgaaaaaaactacagatactggagtggattcagagataagatagccacatgacattatccaggggaagaacatttatgtgctggtgcaggcatttgataggatatgtaaccttgtattatccaccacagataatactactgtatatgggtctcctcctcctaaaggccatcccttctccatccccttccccgtcctcttcytcttcacctgaatgttaagatgtycatctgyttycaaaacacctagctgtccagcacgtcctatactctcctgttattgctggttttctttgtcttttcccttagggtgtgaatacggactaattggaactctctttcagatagcattacaactctgccagatctaactccrcttttcatcagcattgacccagagagggacacaaaagaagccatcgcaaattatgtgaaaggtatttttttaaataatactttacatttatttagccktaaagtttttggaatatcagttcatttgaaccttacagtgccttgtgaaataggacaaatggtattatcaccagttttatgggtgaataaaaagrtgaagctaggaattgttatggatagttagtgcrtaagtaagaaatgggtttctcaattcctgatgcagtgctctttatattttgtcacagagaaaggatttgaacttggccttcatgtatcaactaagttaatcgagccttgaattgagagtaaggacacattgcttctaactccagygctgtaactcattctctgcattgtaaaatcagaacaaacatatattctggaagtatgttcattggtagattaaagatgaataattaaatayaaacatattttgaactcagtgcatgttttataaatttaaaacatttactgtaacaggccgggcatggtgggcctgtaatcccagcactttgggagaccaaagtgggtggatcacctgaggtcaggagtttgagaccagcctgrccaacatggtgaagccccgtctctactaaaaatacaaaaattagccaggcacggtggtgcacacctataatcccagatattcgggaggctgaggcaggagaattcgcgtgaacctggcaggcggaggtagcagtgagctgacatcacgccactgatcttcagcctgggcaacagagctagactctgtcttaaarataaataaaacatttactatgacaaagtaactgttgtttaattgacacataacagttgtacatatttatggggtacagagtccctatcctccccaaccctttccagcctctagtatccacarttcttctctctrcttctgtgagatcaacttttttagtttccacgtatgaatatgcagtatttatctttctgtgcctgacttttttcatttaacatattaatagtatcctccaggctcatctccattgccacaaatgacaggatttcattctttaatatggctgggtagtattccatgacgtatgtatactgcattttctttatccattcacctgttgatgagtactgttggatttcatatcttggctattgtgattagtgctgtggtaaacataggaatgcagacgcctcttcaatatactgttttcatctcctttggatatatacccagtagtgagattcctggattgtattgcagttctgtttttacttttctgaggaacctccatactgctatccacaatggttatactaatttacatttccatcaatggtgtgtgtgaggtatctttgttctgaatcattgtcagcatttgttatttttttgtatttttggtgatagtcattcaaattgggatgagatacctaattgtggttttgatttgcatttcccttgtgattggtgatgtygagcattttttcatwtacttgttggccatctgtatgccttctattgagaaatgtctatttagatcatttgccctttttaaaaatgttatttgtctttttggtgttgagatgattgagkacattctggatattaactccctagtctgatgaatagtttgcacatattttctcccattctccaggttgtctcttcattctgtttattgtttcctgtgctgtgcagaagctttttattttgatataaccccatttgcctatttttgcttttgttgcctgtgctcttgaggccttatctatcaaattttttcccagactaatgtcctgaagtgtttcccctatgttttcttctactaattttatagttgcagatcttccatttgtctttcctacatttatatttgatttttgtatatgataaaaatagggatctagtttcattctactatgtagggatatcccgttttcctagtgccgtttcttgaggagactgtcctttccccagcgtatgtttttggtgtctttgtcagaaatcagttggcttaatttctcggtcctctattctgttccattggtctgtgtgtctgtttttatgccagtaccatgctgttgtggttactatggctttgtactatgttttgaagtcaggtagtgtgatcctaccagctttgttctttttgcttaagattgccttggctattaggggtctgttgtggtttcataggaattttaggattgttttttctgcttctaaggaaggtattactttcaatggaggaatttcaatcaaacacctctgtatgctagttaaaagctgttaggcacttttaaagactacagattatagtagaattgagagtggatgcttaggttctaattcatctgtgaraatgggcaagtttaatttctctagactcwagtttcttcagcatatgtgcttaaaaatcaggaatctgaattttaattatggtaacattgatttaataactggttaaaagcactaaagaatagttttatatttatattatatgacacattcaaatacatatcttctaaactttgaggttatttaaaaatatgttttatgaaggatctgctgtatgtgtaattacttttaacacatttattaaggtataattgacatgcaataaagtatagatatttgaagtatataatttgttgccttttgtaactgaaaccatcccacagtcaagaaaatgaacatacctgttaccctgaaaagttttcctttgcctttgttagtccctccctttttccctccccaatctcccatctgcagaactgctttcttttttttttttttttttttgagacggagtctcgctctgtcgcccaggctggagtgcagtggcgggatctcggctcactgcaagctccgcctcccgggttcacgccattctcctgcctcagcctcccaagtagctgggactacaggcgcccgctaccacgcccggctaattttttgtatttttagtagagacggggtttcaccgttttagccgggatggtctcgatctcctgacctcgtgatccgcccgcctcggcctcccaaagtgctgggattacaggcgtgagccaccgcgcccggcctgcagaactgctttctattgataaagattagtctgcactttctgtgtatcatagttcattcctttttgttgctgactaatagttcacctatagacatttgagttttttgcatttattggctgttacagataaagctgctaagaacatttatgtacatgtttttgtgtggacacatgctttcatttcttttgagtaaataggataggaatggttagatcatatagtaggtgtattttaactttctaagacactgagaacctgttttccaaaatggtatatttctgcattcctgccagcagtatatgagagtcccagctcctccacagcatcaccactcttggtgtggccagtctttttaaytttagccactctagtaggtgcttagtgatatctcattgtggttttggcatacattttcttaatgactgttaatgttaagcttctttttatgctcttatttgccatctgtattacctttagtgaagtgtctgttcatatcttttgaccgctttttatggagttctttgttttcacattatgtgtatatgtattatttatattctggatacaagttaggtrtgtgatttgcaaatattttctgccagtctgtggctcgtcatttcagtctcttaacagtgcctttcaaacagcagttttcagttttaatgaagtccaaatttatcagtttgtccttttaatatrgtgcttttggtttggtatataagaaatctttgmctaacctaaggttacgaaggtttatgttttcttcttgaagtttagagtttttactacgtatacttaagcataatttatatctacagtttataggtttgtcagaaatttgggcaatagtatagtcatttcatgaagcaatgaaaaacagatatttatgaactcattgagttatgcacagtcttcaatttaaacatgtgttatattggcaaaaatcacatattactaaccaaaccataatatccccaaatgagtagacattcgagttgctgtacctaaccaaaacaccagactttatggtaattttcaacagaacatagcgattgatgatgtagtcattactagttgcattttggggagatttttaaaactttaatttggtatttagaaaaaaatgcagtttcagcaatttagttttaaaaaaagtttgaatgtgcagctaactcaggcttcattcacctttctctttatttactcagagtggaaaaagaaagcctgtcttttcagaatctgaacaatgtctcatttagaatgatgagttcatccaaggaacaaaaattggcttctgtacctttagaaaaaggaactgctgttaaatgttgggctgtcatttcagtagtttgatgaatccagttgttttaagtgacctctaccggttcacttacatgaattccaaaaacttaatagyagatacacgctgtgaatgatttgcccttatttcagaactttgttaagattgcgttttggggatgactagtattaattaaccagtttttttaaatcagaagtaaagagtagaacttgataccagtgttgaaattatttgcaggaaaataagacacaggtattttgacctgatatgaacttagttatgaagcaaatttttttccccatatgatgccatgaaaagttatagtatttaatttatgataataattttaagctttagtatatctsagaactacatgtgactactycttaaaaatcaatttaaaatgtgatacaagtgattagaaaatattccctccaggtctttactagatagtcataaaaagatttgacttatatattacaaaggagaattttcatttgttctttgtgaatttcttctccttttcctttgaatcgtgaagaaatgtttggagactcacaggaagaaagtggcagtagagctgctttacaactgatacattttttgaagtagagatggttgttttactggcttctcatttttcactgtctctctcattttttatttagaattttctcccaaactggttggcttgactggcacgagagaagaggtcgatcaagtggccagagcatacagagtgtattacagccctggccccaaggacgaagatgaagactacatagtgagtaaatgttccagttttaacccatggaccagctcccagatcccaaatagtcataaggctttcaatgactgactagcttctgagaagagagaatacctaagattattgcaaagtccttaggaatttttttttttttttttttgagatggagtctcattctgtcatccaggctggagtgcagtggcacaatcttcgctcactgcaacctccgcctcccagattcaagcaattctcctatgtcagcctcccgagtagctgggattacaggtgcgcgccaccacacctggctacttttttatattttttggtagagacggggtttcaccacgttggccaggctggtctcgaactcctgaccttacccgcctcagcctcccaaagtactgggattacagacgtgagccaccgcatccagcctccttaggaattttgaatatttgaaaggataatagaagcatgttttttactttttatttattttcgagacggagtctcactccgtcagccaggctggagtgcagtggtgcgatcttggctcacttcgacctccgcctcccggattcaagcaattctcctccctcagcctctcgcgtagctgggattacaggcatgtgctcccacgcctggctartttttgtatttttagtagagaaggagttttgccatgttggccaggcgaggccagggggtctcgaattcctgacctcaggtggtctgccctgcccacctcagcctcccaaagtgctgggattacaggcctgagccactgcgcccagccagaagcagttttttaaaagatgattgtttgatttatattcactgttctcataattcaattgcctgtttttctcttatagtggcatataggattttagggcagtttaaaaccagatacttgggtgccatgttggaaataaagagaagccatcatttggaacaacacttattttaaaaagattgtgttggttctcactgtgtccccagtagaggtatcagaaattgctcttctggagaaccagttttaggccatggagaactgcatttttaggttgaatgagaattctgaaaagcaaaagatraaaggtttatttgcccattgactatatgccttggacagttaggcgttaaatatgtgctttttaatgataaggaacagaaattctgttgtacttgtgtagctcttaaattaactatcttcatattcatcagcactgccccagaagccttaaggtcatgcccaagttactgtgtttcttttcttgtcagtggtttcacagtgaagcaccaaaaggcattagcaccaccactatccaccaattttcctctcaatttggacatttttctcctatcatatgaagagtcggcgttgtattttagcattatttcagtatttttcttagttgtcatactctgttttttctataatattgtttgggcagagtaatcctaagagcctttctagctgtgaagctgtctttgtagaaagaaagatggccaagaccctgagtcactgatccagcagctccccatggcccatcccaagagttgagatgcagaggggatgggatgtctcactgcagtgctttgtctcaacagccaactatgrtttctttgtccctttgaacctggaacgtgtgtgcccctggagcctacagcctgaattaaaagcaagsttctggccygtttgccttaattaagcctacacagtaatcctgtcttccagatgtggtgcctcgtagaattagggaaacttggattccttggagtaaaagatgagaaaaatgagcacttttctttaagccttaattgtaaggaaagtagagggaccctcctctgttttcctcttgctgcttctctagcagaatgagagaagagcagagagccacagtggccaaaagaggaaaccataggaaaaggactttccggacttctgtctttatagagagttgtattaactggttttgagtttatccgatgatgacagcaggaatagatgagctcatcagtctgatttccagcattaaatgagttatattaaattgtttaaatgtatacagtcctaaactaggtaacactccatagtcttgatgcttagaactcataactcagagtcagaaagtcaaatcagaaagcagttgtacaaataaacscaaacagcctgcaaaacttaaattgaaaacattcagttacattgacaagagattttgctgaaaccaaagtgctgctcagggcaagaagggagggggttttggtcagactgctatcacatacccaactctactcaactgcccctctgcattttctatttaaaatactttgaaacctttaatcgtgtagcctgccttgcctggttagtgttgatttggcaagaatgtatcatattcatgtctgcctgtaacagcagtgggcagctaggtgccagtgagatcatggagcaaacacaagcctgggcactgaaatttatactcacaacacagataatccagaatatggatattaatgtttttaattacaaatgaaaacraaaatatgtaagtcttatggaaacttcttggaccttgtagaatgtatctttggccccattwtgagaaatactggcctactgccataagaatttgacttttgatgagattcgatgaggaattcatgctgtacatttgctaaatcatccaatagggggagacattcttcagcttcttaggtttttcattagtatgacttcagtcccttgaggtcacagattttcatccataggatggtttgggaaacttctgttatcatttaaggacctgcaggaagtaagggggtacctttaaggttaatgttgagatgtaatggaatgaagttttcttaatcccaaacracagcaacaacaggcaagcttctggcttttgagtggactcttcagagtgatcgaactgggtataccaaatatttggaattccatagaaagctggatctgcacattattgtattwtatatatataatactatattattatatagatattagttagaaaatacttttgaaaaaagaatacaaatagctttcaaacctaaatgtgcagtttcataataaaagaaatgtgaattgtataatgaggtaacatttttctcttggctcagcagtggtcagaaaatctgaaaatatattgtcgaaattggaaaagcaggaaataaactgcaggagtgaatttggaacagcaggcacactcatgcattgttgataggaattaaactcatacaccctcttcagagggcagtttaacagtatttctcacatttaaagttatatactttttatgcaagagattctactttttggactttatcctataartataccctatggcattgtttttaaagagaaaaaactgaaaatccagtaaccattttttaactactgtgtataatctaaygtagaacaatgtccaatatattgttaaatgagaaagcaagtactgtagaatatattgttacttgtgtataaaaaaaataagtggtagtggatatatacacatagtagatgcagagaatttcttyggaaggatacagaaggaactgatggcattggttcactctaaggggaactgaggcactctgggtgtgaagagggggagggacattttcattgtatacattaactggatattcgttttctatgtgcatatattaccttttcaaaaaataattcacactaaaacgtaacttgcacactagaaaaactgagttgctgctctccattagaattggagctagaggcaacgtggtgataaaagtttgtggactttgaaactggacagattctaggttttaaagttaggcctggcacttaccaattatataatttactctctccagcctgtgatatcatttgaagaggaggagaatacctgtttcatggcttaagatgacatgtgaaagaatttgtcagttaatgctagtgtcctttttctatacaaggaagtactagaacttggaagacctctgtagacctctgtattagaataaatgtcaatgtgctctgtcacaacccaaaggaatattgaggagtgacctctgacaagttcracagatacagataaaayaatatttttgttgtgtactacaaggtaatttatattaagaacactcagaaaataagtcccacatactgtagtttgttttttttaacagagaatagagaaaaggaagaaatagggagaaagagtgatgtaagctacagagtaaggcttgaagagagaactggagacttaattctgatttctgtatcaaatatgtggagaaacgtagccccccgtcttgctcctgcggtgaactatcccacagcacttggaatccagttgttggcgctcttttggtgtacattctttccttatgtgggtaggcaagtgctctttccatttgctatcttaagaatgtgtgtataaaaaataataccctcacagacatatagtgcgtgctggggtatgtttgggaggtgtctccagtttggtatttgtagtcacattcctgtctttctttgtcttgccaaatagcagtcaagcctgcaataaattccaaggactctaagtgccaaatctcacttaaaattggattttatggaagtgtctaactaaaaaatctgatgactaatctaagttaaagttagagctgggaccattttaggactttgctgggaaaatggatgctgagtttacgatgactctctggttaggggggcagcatttatgctcccgaggatttgctttccaggtgatggattgatttcagataggattattcagtggaggagacaaaaatttccttggggagaaaaatgtttcttttcctgtttctgtttgaattactaatattaaaactaaatattgttcaaattkatagattatttaaactaatgattagttttctgatttcttctcataaagcgtggtaagcagaattttggcagtaatgaatgacaaccagttctttctaaaacatgaataaacccaagaacttactaaagaaagcagtttttcaccaacacttaattccatgtgatgtctgtttgtaacatgtttagggtctgaggagrtatcttactcaaaaatgaaggtatttttcaacaagcattgctattccacaaacattgactgctttatgaaagcctgcagcagctatttcttagaaggtgaattcttttctcagagtgtgtgggtaaatatgttaaggattaaaccaaaagaatttcaggttctagctgatgtgacaagcaataaccagtgcagatgtttaggacacaaaagattttagacaatttttgttaggaatttgctatratagacttaagcctattccataaataatagatgctgtaaaggttatttaagcattaatgtaaagttctcttatcttgcagcatacattcagtaaaataagcagcttattttggtaatctttgtcacactctccccccttttctctgcaggtggatcacacaataataatgtacttgattggaccagatggtgagtttctagattattttggccagaacaagaggaagggagaaatagctgcttcaattgccacacacatgaggccatacagaaaaaagagctagccaaagcagtgttgctggatgcagtattctcttgctaagaggaaggaaactgtctcgcataggagcctatataaatataaacatatatacgtgcactctacagaatggccttcataccatgagaacatttctgttttggatggggatgttacccttgcgttcaaccaaaattgattcttggaactgtaaagattacaacccaaagtctcccaggaagctgtggggagaccagaggatcaagctgaagtgaagccagtgaagagcccacctgyggaaggacatggcggggcgaggcacagccagtgcattyctgcctgcgracaggccctcccagcagctttgccgcctctccatcgtcttgggcccttgctcaaatagctgtgggactgaatttcacagaaaagaatataatttccatagtgctcttgcttgcctcttcttgagttctttgctcttctgagttcttggtggctaataacagtcagattagggtctctgccattcagagttgatgcttgaaaactttagttttccttattaatgaatatcactatcagatttgactaatgaagaggaaatctattgtttgggggaaaaaaaacatcagtttgatttctctaggggttcttttatgtgatttttagctaagtggtgtgccaggttttcagygacataccaaatggaaataagaggatattgatcaygagtgtgatgctgagtasctttctgcatatactggattgtactttgtgtaaagtaaacatactcagttttgctgttcagacaagcgtgatctttttcatgggtgatgagtgggtacatagatggctgcacacagttctcaggraagagacccacaggctccagcgggcaggtgggtgggacgcttgctgaagtgcagttccccagacccagagctgaattcactgaatctgcagtatgatgcagagacctgcttccatgacagataccccaggtgactcggatgctggcggactgggaccatcccttaagaaagtgttttttggggaaataacttgcctggcacaatggctaatgcctataatcccaaaactttgggaggccagggcctgaggattgctagaggttaggtattcaagacaagcctgggcaacatagtgagacccsccccccccgcccccatctctacagaagatttttttggcatggtggcacatgcctgtagtcctggctactcaggagactgaaatggagtatcacttgagcccaggaattcaaggcttcagtgagctataatcacaccactgcattccagcctgggcaacagagtgagaccctctagatatatctatgtagagatacagaaattaaaatgaatttaaaaataaataaatttgacccttcttttggtgtgtcagccattgaagaaaatgattattgagtgatagaatgaatcttggcttttgtttctaaatttaactgccctagaatcctgggtttggcctttttctgccagaagctgctgccctaggggcaaagttctccaaaagtttttcagtaaatcctaagatgcaacaaatataatgcctagatagacaacagattctttttacatgatatgtttctacacgcacatgatagaggtcttttggtttttaaattctcaatacttaaacctaaatatatcaaagtaaaagtatgtgaaaaaaaactatgctagttataggttgaataatgtcccccaaaatttatacattgaagccctaatctcagtacttcagaatgtgactgtaattggagatagggtctttagagagatagttaaattaaaatgaggctgctaggttggccctaattctatatgactggtgttcttaaaataatagattagctgggcacagtggcttatgcctgtaatcccagcactttgggaggccgaggcgtgcagatcacctaaggtcaggagttcgagaccagcctggccaacatggtgaaacgtcgtctctctcctaaaaatacaaaaattagccgggcatggtagcgggtgcctgtaatctcagttactccggaggctgaggcaggagaatcgcttgaacccaggaggcagaggtggcagtgaggcaagattgcgccatcgtactccagcctgggcgacagagcaagactccgtctcaaaaagaataggagacacagtgagacgaccatgagaagccagagagaaaacagccatcttacaagccaagagagaagttgtgagaaaaaaaaaaaaaaacaaaccctgctgactccttgatttttgccttccaagctccagaactgtgaggaaataaatgtctgttgttttagccaccaaacctggtaaggcagtcctagcaagctaatacaatagcctgttccttaataaacaactgcaagatttagtttatagaaaccagctcggaagcagttggtttagaatgactttcctaggaatctggtcaagaaaggaacttactaaaagactattctcatttaacaaaagagatattaagtatctcaaaggccaaatctttaaaaagattatctgttttaagccacaaaacatttgtgtggatccctttgcagcaagtttgctcttagataagattcagtcttcgttctcagctgttgcaggttaaggcttgtgaaatgatccaaaaagggaacagcagcttttggagaaaacttttatttgttcttcattctagtgtcaagtttaaaggcttgaagtcagaatgttagaagtggggaaggggaccttagaggtgacgtcttccagatgttcctgtttatgcacaaggggacagtctcggagaattaaggcgcaaaactcgggtcccaatttctaggtaggttcctgtttgttctgctgctatcgtgcgcttatggtgactgtgtgaatccaaccaaaacggaggttccgtatgccagtggggcaacgtttttcagctgcaaatcttgggaaatcaaaagcaaggctgttttttttttcttttcttttttgagacagagtttcactcttgttgcccaggctggagtgcaatggcgcaatctcagctcactgcaacctccacctcccaggttcaagcaattctcctgcctcagcctcccaagtagctgggattacaagcatgtgccaccacacccggctaattttgtatttttagtagagactgggtttctctatgttggtcagactggtctcaaactcccgacctcaggtgatccgccgcctcggcctcccaaagtgctgggattacaggtgtgagccaccacgcccggcctcaaggctgtgtttcagtgaaatatcccttgcaaatctttacctgggtgggttacagtgttttcactagactcttcaatagaattaatattttaagaaatgccacttgtttatttgaaaagtataagaatcctatcaatgcagtaggcatgaatgtattcatgtgtctggctgttcatgaagcagctgatatcttaagtgtaagaggtgagatttactgactaccagtaaaatatgcgagttgggaggctaatgattttaaattgtaaatgcgtctgcataagatcctttaaaatagcttttattgttcttaaatttatgtttaaaagaaattgacattaatattttcaaatcatccataatctcccaaaccttttttggttttctgtttagtaccatttaaatctttgtgtatgtgtatatgagctacctttaaaagagcagtcacccatgcgagcatttgttacccaattagtttgtacttttttttggtttttattttgttgttgttatttgtttctttttgagatggagtctcgctcttctcacgcaggctggaatgcaataatggcataatcttggctcactgcaacctccgcctcccaggttcaagcgattctccagcctgagtctcccgagtagctgggattacaggcgcccaccagcacacccagctaaatttttgtatttttagtagagacgggtttctccatgttggtcaggctggtctcgaactctcaacctcaggtgatccgcccgccttggcctcccaaagtgctgggattacacgcgtgagccactgcgcccggcctagtttgtgctttttacttaccagttaggggttatattactgtgtaacaaaatggacggttatttctattcattaacaagattcaagtaatagcctctttagccacatattccttaataacacctttagaccttataggggtaattattttctatatacttttccaatgtatttgaaagtttgttggctcttcttccgtaattatactatatcctcagtaaagaaagtttggcatacagaaaagttgaaggaagaaaattttcaatcactgttgttccactaccaagaaataatacttggaggtatttcctttcaatcttcaacatgaggatgctaatgtccccctcataaggggccttaaagtcactgactctgtgcactatttcatgagaacattgatgtgggtatttaaccgaaagaaaacttgagttttctttttttcctttttattgtgaaaatttggaaacttattcaaaaagtagaatagttaactaattgatgtacccatcagcaagcttcagtgattaccaccatttaattttgtctgcacccccccacccactgccaccccagcccattcccagcatgtgcctctgaaagagaccaactttgtcctttaaaaacaaccacagttggctgggcacggtggctcatgcctgtaatcccagtactttgggaagcaaaggcgggtggatcacctgaggttgagagttcgagactggcctgaccaacatggagaaacccgtctctactaaaaataccaaagttagccgggcgtggtggcgggtgcctgtaatcccagctactcgggaggctgaggtaggagaatcgtgtgaatctgggaggcggaggttgcagtgagccgagatcacgccactgcactccagcctgggcaacaagagttgtctcaaaaaacaaaaaagaaagaaagaaaaaaacaaccacagtttcatcagcacagcaaaaaggtttttgtttttgctcttggattttgtcgtttggtttttgcttaatatcaaatatccagtcagtgtaaactcgtttataatttggtcctttgatttcaaggagctatgatgcagttcgttgtggggatgtgttgtctccatgtcatacatgtgactttgtccatgtttgcacccagttcaaggaagacacaaccctagggaaagacaaccctccccgccaagcctctcttcccattcttaaacatagggtggcgttattcaggttggaccagtttaaaaagactaacgcatttgtcctcgttgttgggtgttttttttctttaaatttgtaaaacaggaataattgtgttaggatgaagtatgatactaggagaacagggaaaactaacccatcgtgttaaaagtcagaatagtgcttaactctggcaggaggtgagatggttagtaattcagaagggggtgccaggagagcttccagagccattgaaatgttcagtagcttgatctgggtgatgatttacatacataaaaacatattaaactttgaacttaagatttatgccttttactgtttgcaccctataactccaaaagaaaagtagaggggaaaaagagtccctgcaaaaggcagtcttgaaagaaagcaagtctgtgatgtggagaatgcattggacagctctcagcaatttgctgtagcttgggcagagagataaaagctaatgccagcatcaggttgcccaggcgagagaaggcctgaaagaagacagcgtggagaaagtgtcagcaagcttcagcaacagcaggaggcagatggtaggagagtgggcctcaggtgtggtgtggcrgagcagagtagccacacttaggccccagagacagtgtcttctcaccctcagttgaaggggcaggaaatcaatcgctctagtcacccccaagctggaggacggacctaaagttgccacagctttgagaggcaaagaagtttgctcagtggcttttagagacttctagggccctgggaccctgacactgaggaggagcaaactgaaggggagagtgggcacattccttgttggctgctgtggtgagcagcagctggtcgttgtcagtcaagctccggaccactctgatgatgctcactgcattttgatggagtaagccagggacattaccactgtgtttgagccatctgaagtattcctgggtgggtctgcagttggcagcccgtgatcctttttccattcaaggatgatgcaaaggtaaggggccaaggctgagctctgtagatgcctgtgagagcctcctggtctcaagaggtcataccaagggccttggccaccaaggtttcgtgaggaccttgaggtggtttcgccatcacaatgtcagacgtgtcacacaccatctggtatgtcctcactgtatagaggaagaagggcccaagtggtgaattatctacaagtttgtagcaaagctaatactcagactccctctacagccttgctactcagtgtagtctgtggtccggcagtgtcacaccactggggtacttagcagaaatgcagcttctcaggctccactccagctctcctcaatcacagtctgtttttttgtttgtttgtttgtttgttttgagatggagtttcgctcttgttgcctaggctggagagcagtggtgcgatcttggctcactgcaacctccacctccctggttcaagtgattctgctgcctcagcctcccaagtagctgggattacaggcgcccgccaccatgcccggtggcgtgcatggtaatttttgtatttttagtagaaacaggatctcgccatgttggccaggctggtcttgaactcctgacctcaggtgatccacccgccttggcctcccaaagtactggggattacagatgtgagccaccacgcctggcccacagtctgtattttaacaagatccccacctcagtcttaggca

SEQ ID NO: 95415 - DNA, 55689 bp, Homo sapiens
ccctcagaggctgtacctggggaggaggtacctctcttcctccatttgacccaattctaaaccccctgtagcagtgacgtctgtcttcgtctcattccagtgcactttgtgaattctagagggctttcccagaaccaaggaaggctgctctgcccacagcaggccttgggaatttaacctccctgggagcagcctcaatgagtgatgctctggaactgctgggtcagtagcccagcccctggccccttggatgggatcatttgaagccctgttttctgcaccatttttcaagttccctggtggggctgagtctggttgcaaatcgtgaaagctgccctatagtacttttaccagctgcctccctttctctgtctcacttcctcattcccctcctgatgtcccctgcacttcccagatacactacttgcccctgaatcttgccccttgaaccatcacaccctgggactaccccaggtgccactctgtttgttgtttctccgcctagaaggacgggcacccaggaagcaaaacgggagggcagggaagggagggtgttctggggaggcttgacaagaaacgaggcttttaaaagaaacagcagcaaagtgccaggcctgcaccagccagcttgagtcacactccagggactcagcaaagcttgtccaccttcctggtccaccctgggcctgtccatcctggagtgaccaccgggcgtttccagtaaaaatcccttcacttcacttccgtcatctccgagtcaggcaaggtggtggaaaccggggaagacctcagcttcggagctgctggaatttgtgtgactcacgccctccagtggtcacttgacaaatgacatagggctcacggtctggggacttgagcttgttagggcctcagaaccgggagggtcccaggaatgcctcttctcaatgccttcctttgacagctgagtggagtgaaggccccacaggacacgtgactcgccacgggacatgcacacacacaaatagagagtaagagccacgcccctgtgtttccttcacgtcccacctttatcatttgtgtcacatctgcatgcacctatactgttatttgcttaaacattttaccttaaactggctctctttaaaccttaaatatatttctaaaataaaatttttatcactttctgtgaggcggggcacacagtaggaactccgtctcctccttccatggccttgcacagagctggcaccagacactgacatggaggggagaacattcaaccccaggtaatcctcagctcctaccttgatctcagtttcccactctctcattgtcacctctccttgcccctgggtgtactcacctgtagcaaaatgggtaagcacacagtgggcgcacaagtggggtccagtcaaggtctcagacctgggtcagtcctcagctttgccacttacaaactgagtgacattgagctggtcgctcaaactttctgtgtctcggtttccttattggtgaattggggatagtattataatagtacctgccacacaacgttgttggaggattaactgagataataaatggaaagcccagggcctggctgtatttatggagcaagcaccagagcaagtgcaagctgggactccagggttgtagccctgccaccacctgactgtgtggtcttggacaagtcatttggctttgcttagcctcaatttccccatctataaaatggggctagtgatcattcccaccccataggactgttgtgtggattaaatgcttggtatgtttaagtgccttgctcagtaaacgttagctctgatcaattgtttttgtagaaaagccttcaaagttgctaacttccgagggctaactggatctgaaccatcttcacagcctggcatagaaacagatcaaatcaatccagtggaaaatcaattccaggataatgagcccaagacattcccgtgctgattgctgtcagcatggtgcctaggacagcctgggaaggcagggaggagggcatttctccacagcagcctcggaacctctatcgccaccctccggggggcccacctgtcccccgcctgcccttcaaggtgctctttgatttctccccagmagaattcacctgctgcatccatcatcagaagaggccaggaatgyggcctgctgggtgggcagggccaagaagaaggcagccgtgcaggcccaggaagccgtaggagacttgccaacctccaggagggggccagccctggaccctgcagacaggcgctctggggagggtaccagaagctcactgtttgtcccggcttgaaggctgtttgctgtgtgaccttggtgagtctcctaacctctgtgtatcatcacaatcattatcactatttttactctcctcctcttcctatttgccggttaagagaggattgggatagtggtcatggttatacaacattgtgaatattctaaaaaccattgcattttacactttaaaatagttaattggtaattttatgttatgtgaaatttattccaattaaaaattaaaaatacatacatgaatttaatgttacaaagggagagagaggaccgggaatttaaaagcaggtgtttgtggtgggacggggacctgtctgaggaaggatacttcagaaggcaagtcctggcatccacttgctctttgtcaaaagggaaattgttactctctgactcccagcaaggataataaattcttacttggctgactttttgctcaatggctcaaagcattttcttgtatctcgtttatttacttttatttttatcaccttttgtcacgagaaaagtcaggcccagagagaagtggcttttccaagatcacatggtaggtcagcagtgaagctgtgcctcgaacctgggacctttcaggctaaaggaaaccagaacatgccacgcccagatatgccgatatggcatcctgattatctccagctgaaggcatttgagaaagagcagctagagagagggctatctgaactgccctgtcctgcctgcagcaagccataaacattccttggagaaagatgctttcccagcatcaagatgagaagataacttttatcagctcagagatggcaccagagccatctacaaatacaaacaaaccttgctatcctactccttagctcacttccacatgtttaccttctcacagcttgccacccctggaagcctacaactgcattcgtcttgtcacctttctcttctttctttctttctctctttcctttcctttcttttcctttcctttcctttcctttcctttcctttcctttcctttcctttcctttcctttcctttcctttcctttcctcctttccctcttttttttccttttttttttgagacaggctagggtgcagtggcgcgaccatagctctctgcagcctctaactcccagactcaattgatcctcccacctgatcctcctgagtagctaggactacagtagctgggcatgccagcatacccagctaatttattttcaatttttctgtagagattggatctcactatgttgcccaggctggtctcgaactcctggcctcaagcaatctgcccacctcagcctcccaaattgctgggattccaggcatgaaccaccgtgcccagccatcttgtcactttctaaaatgcattgctcttcatggcagatgctccataagccagagttctaagccgcagcattgagttactttcactgaggcttctcctgcgtggtgtgcatcacagacattaacaaacttgcttttttttctctattattaatctgtcttttgttacagtgtctttcccaacaaataacttaagatgattgaggagaaattatatttccttcccagctggctaattccaaatgtgtcctcaagcctggtgcttggactcaaaccctgccacaggtcaagaatgccacaccaagcagacgctgtgttagaggggcacctgaggtgacatgtttgacagatcacataactgaataactgcattttctgaaggaaaatcaacgaagtgctttgaggccaagtagatgggattcttgaggattccatgaatagcaaatagtagtatccccctcagaggctcttgggtgggggcattaaatgtgttaatacatgtgtttgctgcaggtatagccagaatatgtgaaagcagctacagggaatagagtgtagcaaactcctaatcatccctcaaaaccctgccctggtgtcctctcccttgtaaactttccttgaacaaggcagaaccagctacatcagcaccataccatccctccatcactacagatatcactctgtactataattatccatttatttttctaggccttgcactccctaaggccaggattctgactctttccctgagtgctgtttacctgaactgaaccggcatgaaccaccacgcccggccatcttgtcactttctaaaatgcattgctcttcgtggcagatgctccataagccagagctctaagccgcagcattgagccgcagcattgagctgaagcctgaagggaagatggctttgatatgttaaaactcattccagtttactcctatttttcattcattcatccacacattcactcaacaaagatccttgagctctgatatccatgtcttttttgtggctcttagtttatctttgacaaagttaatatattatgctgaatttaacttgggaaagacaagaaggaaatgagtggacagtggtagcaaagtgttgggacggtgagatcaagggtgactttttttccctttgcttctcaacttctccctaatgtagttgttattttacttttatgatggaaaaatgcatatgtatgggaatactgtatttcaggcattataaggaatgaaattataggccgggcatggtggctaacccttgtaatcctagcactttgagaggctgaagtgggcagatcacttgagcttcagagttcgagaccagcatggacaacatggtgaaacccagtctctaccaaaaacacaaaaatattagctgggtgtggtggtgcatgcctgtagtcccagctactcaggaggctgaggtgggaggatcgcttgagcctgggaggcagaagttgcaatgagcagagatcgtgccactccgctccagtcttggtgacagaatgagactccatctcaaaaataaataaataaataaaataaatgaaatgaaattataagaaattaccactttttcatgtaagaagtgatcatttccattataagggaaggaatttaatcctacctgccattccaccaaagcttacctagtgctaaaggatgaggtgttagtaagaccaacatctcagaggcctctctgtgccaatagccttccttcctttcccttccaaaaacctcaagtgactagttcagaggcctgtctggaataatggcatcatctaatatcactggccttctggaacctgggcattttccagtgtgttccatactgtcaatattcccccagcttcctggactcctgtcacaagctggaaaagtgagaggatggacagggattaaccagagagctccctgctgaggaaaaaatctcccagatgctgaaagtgaggccatgtggcttggccaaataaaacctggctccgtggtgcctctatcttagcagccaccctgctgatgaactgccaccttggacttgggaccagaaagaggtgggttgggtgaagaggcaccacacagagtgatgtaacagcaagatcaggtcacccacaggccctggcagtcacagtcataaattagctaactgtacacaagctggggacactccctttggaaaccaaaaaaaaaaaaaaaaaaaagagacctttatgcaaaaacaactctctggatggcatggggtgagtataaatacttcttggctgccagtgtgttcataactttgtagcgagtcgaaaactgaggctccggccgcagagaactcagcctcattcctgctttaaaatctctcggccacctttgatgaggggactgggcagttctagacagtcccgaagttctcaaggcacaggtctcttcctggtttgactgtccttaccccggggaggcagtgcagccagctgcaaggtgagttgccttcatttctggggaagcggctgttttgagagggttttgtttcttcctctttgagaaggctcagaaaattgtgggaattttctgcctacagagagaaggtgttggaaagtctaggtaaaaaaatgccgacatgaggtttggtcatttgaacatggcatcttggtcagatttcttttctgcaaatattagctgtggttgttacatgacaaggaaaaactttctgaaaagttcaaaatgggagtttgtatctgctaagaattttttttaacagagattatcttatcagtccttataacatgtaacctccccacaaatcctggtaagatggatatattaaacccattttatggatgaataaatgagtttcagttaaataacttgatccaggacacataactggtagagctaggattccaggatttgaacccaggtctatggggctataagttcttttctttctttccctctttccttcctttccttcctgtcctttcctcccttcccctcccttcccttccctttctttcttttttttttttggaaacagccttgactgcccagcctcaagcaatccttctgcctcagcctcccgagtagctgggactacaggcacaagacaccatgcctgcctggctaatttttcaattttttgtagtcaaggtctccctatgttgcccaggctgaactcgaactcttggactcaagcgatcctcctgcctcggtctcccgaaatgctgggattacaggcgtgagccactgcacttggcctaaaattcttacatggactatattcactacactgtcttctaaagacagagtttttgcctctttgatcttcctcttgtctgtttcaaaggagatgatctcagatttcgagggatgagtgcatttttcacaaatatttcctccccacataataaaagaggagcaagtaataatgctgagttagaacaacaactgcaaaatctttaaaagaaaggtagctacagcttgagtgctttccccagtaayagacctaaaactacagttgataatgagagctgctgggaagtgtctttcagggtcaggcaaaggcacccctgtttcaacgacctccgggctcttcctcaccctgcctgtggccagtgatgaagcctggctgggtctggtgggccagcaggtcccgctaaggaggctcatggtgcatacagtttgtccttgttaagtggcgatggggatgggggggttcattgtttttccttaagattattaggtggctttacagaattgaagtctgtgtccgaaggctccccattccaaccccgaaatagagacagaggttgcaaagcattgatgaaggggctcatgctggcgttcatatcgattccccagtgagccaaccccactgagaagccctgttctgtaaactcttcttcaaccttccctcacctctgcttcycttcttcagccccacagtgaagaacatctgagctcaaatccagataagtgacataagtgacctgctttgtaaagccatagagatggcctgtccttggaaatttctgttcaagaccaaattccaccagtatgcaatgaatggggaaaaagacatcaacaacaatgtggagaaagcyccctgtgccacctccaggtgagttttccctgggggaacctcctgcttgtctccttgggcacccatgccctgtcggcaccgatgactcagaattcctctctctgctcctcctctctcacctgaggtctgatctcctcattgcttcttgaaagtccctgttggaattcaatgcagccgctgattattgggcacctcgctgtgcctgacggtatgtgaagaaggaagggacatggtgcggggctggccctgaagaagcttggaatctttggggaagaatatgggaaggagcttggcctgagaatgggaggcagtagagcctcgtggtgggcaccatggcggaggggtgggggtggagggtcagcatcctggcctgcgtccattccaattcaccgcttgctagatgctttgaatatcatcctggtgaagggcatcaggatgttagacaaactagttccaagccctgtgctggccgcactagttgccgggtgctgcctctagccagctgtgtgacgcagggtaagttaacctctctgaaacttagtgctcacctgtggtatgaggaacccaagggggccctcaccatagtgtgctgaggatgaaatgagatctacagcactcagcactgtgcccacacagaacagacacttagtccacatcagggttcatcaccatctactgagtacctgcccttgccagagctacacaggccacttgacagactttgcatctcaactgatctctgtggcggctctttgaagttcatatgattgactcatttcacagataaggaaatagaagctctaataggattatgacttcccccagcctgaatgaccggtaattacagagtttacagagttggaacttgagcccagatttggattcttcatgtccctcctccccgggcccatccttcctcccagggcagaaccaagagaatgagtcagttaatgaacaagtcaagggacaggcttgaggctcgctcaggtggaaagacaaagcaatctgcaataacgcaatagtgcaactgaaaccaaagcccccrtctacacaagaccaccacatagccacacaaccccaccgccccagaggagcctttcccatggactacaaagggtagggcgccccctggatgtgtrragcatgacggccctgagtgtatctgtcagaggcggcaaaaaatgccagtggctaagaggatgggcttggggatgagcaagtggctttgccactcagtagccctgtaacctttggcaagtcccctagcctctgagcctcaatttcctcctctataagaagagggtaacaatggtgatttcctggagttggaggaaggagtaaatgagctttcccatgtgagcaacttagcacagggcctggcctggagtaagtgctcagcaaatggcactgttggcattgctatcattagcggtggtgttggcagttaggaggtgatggagcaaaattgaacagagttccctctaggggcttcacagaagtcaggtggactctgtggcctttgaagtatgggtagaatgtagacaggtgcagaggagtagcaaggacattcaggaagaggggagaggtgagcagaggctcagaggcagaaatgagcctgactgtgcttggccaggagtgggctgggggctgggataggcaaagccaggccagagcacaagggcttgaatgcagggtaggagatttggactcgctctccctggcagtagggagccattgtaggttcttgagcaggacagtctagctgtggtgtggtaggtgaattggaggagaggactttgaaaccaggcagtctgggctatggcaactgaggtggctaagagaccaagaggtgagaacacagagttgatggcctctagatgtccagattctaagggctgtagaggggcagtggcttcgccccttccttctcttcatctcatcattgcagccgctgccagctgacctccctgactccagctccccacactggctctgagctctctcttgccaactggacttctagcaagtcacgcccctattctagagcctgcagtggctccccattgcctgtcaccacattaaagcttccacagagttctgagcgagcaccctacccaaatggagagcccatcccacctgcccatcccagccttcctcagctccccagtgcctgtgcatagcacattcctccctcagctcatccagacccaactcatcccctatttttttcttttctatttttattttttattattattatttttagacagggtctcactctgttgcccagacttcagtgtagtggctccatttcagctcactgcactgcaacctccacctgccaggttcaagcgattctcccacctcagcctcctgagtagctgggactacaggcatgtgccaccacgcctggttaatttttgtatttttagtagagacggtgtttcaccatattggccaggctggtctcgaacccctgacctcaagcaattctcctgccttggcctcccaaagtgctattacaggtgtgagccaccgcacctaggcttcttttttctttccttttcttttctctctttctctctctcttttaaagctgagaatcttgctctgttgtccaggctgccctcgaactctgggccctagtgatctatctgctgtctttccggatcaccctgaatctcccaaaacccttacggtgttggctgcagcctttaaccctcatccccacaccctctaatagcattgccagttatccctatgtctttgggggctgacttgtgtctttggaccattcaggaaatatgagttcagactccagggagggccctgagctgcagtggacatgtgacaaaccagctaacttgaccatgtttttccccctcctcttcatgctggggtgggctggcggaaaggatccagtcagatagaagaggggatgaagaaaaaaatatcacacatcaattcattcaactctcccaacgatccacaaggaaggaattttagytatcccattttaaagatgaggaccctgaagcccagaaagttaaagtaattttcaagatctcataattagcaaatgacagagctgggattcagatccaggcagtccagagggacccctgcatggggctgccacctttgtgtcctgggcatgtcacattccattgacgagtacatgcagatgcccactcccctggctctgtgctgggagttaagatatcaatgaaacccttctgctcatcagtgaattgtttgagccacttattacttacatacaccactgctaaaaacaatagataacatttataaggtccttagtactgtgtcaataatgagacaggaactattatccttgttttacaagattgagtgacttactggaggtcaattcctggaaaatagtggagctaaggtttgagtcaagtccaaactcataacatctacactatctgtgctctcccagagggcctactgtgtgctgcactgttcaagagacagagaaaaatgacccagttcctgctgtcaggaaggaaacggggaaacggatgtcttcctcgctggtttgggagacgtacatgaagaatgcgagttggagaaattgtgtcaggagtaggtgggatggagtgtagacaggaggtcgtagttgtgggtgtactgggaccgtgctagaggcctctgctggggagactgcagaggtgcctgggcaggctgtagtgtggggaggagttggggggaggaggtgggtccacccagagtgcaacatccactcaggtgagggaggggtgatgttactggaagaggaagcagccgtgcaaagggratttcatcctgaaagcaatgagagccaatgaatatattttgattttaaaaagtaattttctaatctgttcaggtgtcatgaaaccaagagcctattctaagtgactggtgattctataccttcgtaaacaattaggaaatgagcatggtgtgtgtgtgtgtgtgtgtgtgtgtgtgtgtgcgcgtgtgtgtgtacgcatgtgtgtattttagggacaaaggcaaatgtgggagcatctaggtgaagacacatggaattcagaaccaagtcgagctatgtgttgcttgctgggctgcagttggctagaaataaatatgtgccctctttcattctgctttaactggggttcgggatttaatgtgcttgcatactgccagaagggccccctgcatgttgaggtccagggctgctgccccatctgggtctggaccctacctgttatcttgcttgagataaggagcaccttacaggcggagcaaagtcaggaggctctgcgcagtccaggtagcaaggacaaggggcctgcaaggcaccggaaggggcttacgatccctcctgcaatattcctactagaagtcacccctaacccagtgctttctttggtttcttttctggaatcgcacagaacatgctgtatgtaacaagtaatataacacttcccgggacagccttgtgaggtggtgtgagcttaggctgggctgtggtcctggggctgctgtgtggccctggacaagatccttaatctctctggccccagctaatgcctcaataaagtggagatgacaacgtagagctgtctgcttaacgagactggacgaaatgacagaaaggaaatttgctctgtaaactagaaagcaccgcgcaatggtggtaattatcataagctttattgcgattttatggggaataaacaaacacgaggcccaacacgacccgggcatcttagcccagacacagtccagtgccatccaaactccgcggcagacgccggctgcgggcccctgggtgcttgggtcccgggatcgccggggaaggcagggaaggaggggcagctcggcccgggacatcgcgtgggtgaagagcccccgccgctgctcggctcgccccgcccccggggcgggggctgcaggctccgagcgataaagcgcgggcgctgggaggcgcgtggagccagcggagctgcgcctaaggagccgggccatgcgcgaggggctgggcgcggcgtgcgaggccgccgggccccggctgtgcaggctgctctgcaggatcctccggccgaagcctgactgctgcccgcgcagagccaggtaccccgcgggccgaagtccgccctgggagggaagcggtgggctccgagcccgggcggggccccatctctctctgggagaaatcsgagggcggggatgtgcgctctgtgggattcctgagggtttactaaaagcgttttcctcttttagaacgcttgagaggtcgcaattcaggagcccaggcggcccagagaaaccccccatgcactatgagaggcgtctatgcgggttcagttgcgctgcgaatgtttcagcacttgggagcttttgaaatttttcagcactggggttgaaagttgctacactctttggatcaaatatggttaagagagcaaggaggttcttgtttcacaaatgagatccatttcccagggcgccatcccccccaccctccccatctgtccccaccaccactcttggtgtaaggcgaggtaaacaggcagggaggcgtcggaaccgcaggggaatctggcccccaggtcagcccaggcaagccacagtctgcagctgtgaccggctcggctggtcaagggcttgtagaaagttctgggtctaagcaagccaccacactcacagcactccccacgcccccgacccctttttttgatagggtctcactctgtcacccaggcgacagtggcgccgtctcggttcaccgtagcctccacctccagggctcaggtgatcctcccaccttagcctcctgagtagctgggactacaggcgcgcatcaccacacacttggcaccttttttttttttttttttttttttgtagagatagggtttcaccatgttgcccaggctggtcttgaactcctgggctcgagtgatccgcccacctcggccttccaaagtgctgagatgacaggtgtcagccaccgcgcccagctgccagcactctctttgaatgcaggtccttgagggtcctcaggaccccgcacagctgtgggtttagtcaaattgcacgagcgtctgcggggtcagaatcaacaatgtgataatttggaaagaagtgtccagattctgaaggtgctcacctggagtctggtcaccctgtcaccctgtctcccagcagccagccagaagaaatggtgtgggaggggacttgggcaaaactttgtttattcatttttcaaatttaaagaattgtccaattatgaaaggaattcattgtcactgtaaaaagttggaagatgtggaaaagtataagaaaagttaaattgcctatgatcttatcacttaatgctagtcactgttaacatttactaacattccctcgaggtgtttttctgtgcttgtacgmacacacacacacacagccagcatcagactgtgtatacagtttaaggcattatttatatgagggcaaaactagacacagtctaacatccagccatggacaatgggaccaggctaatcgtggcccatctgtagagtggatttttagccaacttttaaaagtgatactttttaatatatggggtaaaatgattatgttaaatgtacaaagacattgcttctcaatctaaacagtactgtagatgtttctggtctgaagcttctgaaattgtccaactctacttccagaagtaagtgagaggaagcaagaatgggtgcagggtgggtgctggggtgagggggaatggcaaaagagcaagaggggcagttgtcccctggggaccccatcccccatacatcttcctattgaagcagccccatggtgactgctcagccatggcttatctgttctgaatatccagattgccatatatatatatatttttgttttgttttgttttgttttgttttgtttttttctggcaggccacaccagtctagaccaggtgtgttaaagaaaaaagtattcaatgatacttgttaaagaacagtatggaagtctttatttaggaccatctcaataggtacagggacctactgcagtggggtctggcagtggaggagagagattgggcccaaatccaaatacagcaggagcaagtgggaatttatagccaaggatcagggtggggtctgtggatggaaaattaccaagaaaaacttcaggcatagggggaattctgcctcacccaayctaacaggattcttgcttaggacaggctaaggtgatcagacatcgcctgggggaggatggaggatgaggaccctgatcagatggggaggacgacaagctatcaaggatggagggttcttgttaaactgactaagtagggattcttttgctaaaactgcatttttacaaggaaatgcttggatgggccccgcagaagattcagaagtctgagtaaagtttggctaagcaaagcatctttgccagttggcaatggttggtcacatggaaggccctttacagggttgtggaatcccttgattcagatataagttgctttctgatacatacttacatcctcttttaagacagtatctctttatagtaaaaaatcacttactgctactatgtaatgtatataattaatgatataatggtaacatatagtcatttttttctataataaaagcaatacatggtcatttatcgcatttcaacatcatagatacatatcaagtagaaaatgtgagaccctcataatagtctctaaccacctctccctcagatgcacaagcatgcataccctggaaaatactgccaagaacatggaacacaatatgctttcaaaccaaggtgccctggtgggatgattcttcctaggggaggcatgtgtgagtggtgactattcagttcgccggaatgaacctgaaatcccaaaccaggacaaacggtttctgaccggtttcagaatactgaatttttaagtaatctttaatttaaaaaattactttaagtaatgtttaatttaatttgtaagtaatctgtaatttaatgctaatttttacaatacttgtttttaccttggtgaaggtaagttgacatcttagatttgttttaaaataatgatgggggcagggaaggtataggtgaaacaagatcggccgtggattgatcactgttgaattgggttgaatctgggtgaagggcccatggaaggttattagactattctctctacttttgtacacttaacattttctgtaatagaaatgtagaataagtaaataaaccaagataaatcacgtgttttaaataaagcttaagtcatgaaaaacaagtggctggggctgggcgcggyggctcctgcctgtaatcccagcactttgggaggctaaggtgggaggatcacttgaggccaggagtttgaggccagcctgggcaacatggtgaaaccccatctctaccaaaaatacagaaattagccaggtgtggtggtgtgcgcctgtagtcccagctacccaagaggctgaggtgggaggttcacttgaacctgagaagtggaggttgcagagagctgagatcatgccactgcactccagcctggatgacagtgcaaggctctgtttcaaaaaatataaatcaatcagtcaatcagtcaaccaatccaagtggctgctgggcagtgctgctagtctgggaggcagagttgttggagccattctctgcccacccagcccctgtgccacgtttgtacttggcttttccagagggtgaaggagcattttccagatcctctatgggctgctgtttgggccagtagctttggctcagctctgctcatgcccttttggctctgcgggaggaagaakataagaggaagagggaagatggggatggggaggcagttggtcagaccraccatgaacaattcactcccaccctctggactcagtttccctatttgtcaaatgaggttactggcagagggaactccaagatgcccctccacccttggataccgcatctcatgctagctgtttcctttcacagtccagtgacacaggatgaccttcagtatcacaacctcagcaagcagcagaatgagtccccgcagcccctcgtggagacgggaaaggtcagtgagtcacatgggtgtgggaagccccttcctccctggtccaggcagatgcagacatagcagcctgttagagctgggctggagagggcaggaagccagggtttggatggagagtggagagtcccagacccggggtgttggggggaacaggtgggaatgaggaagggctttgggagagtgagacaacccccagtggtcgggagtggtggcccccaaggtgcactgacagctagcttctatctcctgggttccataccattctagagaggtgggcagagaaatgggtaggagtgggagagagggtggcttatatgtccttacatgctcccagggaaggaatgcagtggtgcctttctgttctcagtagtattggctctgacagtcatccttctcacctccaacttagtctttagtccctcctacagcagttcctctgaggaagcatttggcaaggccctgggtgaggagaggaccctggccagtggcccaggcacctggagctcttagcaggcactggcccaggtcgcccgggggctggaaacagaggagggacgtggagggacaccctgccctgtgtggccacccatagatccttccccactctaagacaaggcagggcctggggtctaggagagacctgagagaaaaccctgttttttccccttgcagaagtctccrgaatctctggtcaagctggatgcaaccccattgtcctccccacggcatgtgaggatcaaaaactggggcagcgggatgactttccaagacacacttcaccataaggccaaaggggtaagtctggggcttcagggagaaccacctttgtcccaagctggtgaagctgccagggctttgtggatcaaacaggtgtccccctgggcaaaccaaacaatcatctgcttgggcaaaggggtctaggaacagagacattcctcacagattacagtaggaagtaaatgatgccaactccctgttaaccaccccagtaaataatggataatccagaaggtcaaataaatgattgcagaaacaaattcatatctttcttagccggatttcaggataatgtcagggagaattttctaacagaactgctcagagctggactgtattacatcaggaggtagtgagctccctgtcactggaaggatttaaatgcaatttgatagattgcagaggggttcaagtatcctgtgagtggttggactaaatgtcttttcaggcttctttctgtcatgtaagtttttaattctaacttcaggatacattctatggttgtaaagtgggaaagaatggacaatttcaggaccatgaaagcaaaattatttcccacatgcccccaaaccaccacagttaacattcgggtgtacttcattcgtgtgtgtgtgtgtgtgtgtgtgtgtgtgtgtgcacgcgtgtgccttcctatgtctcatttcagtttgttttggccaaataccaatatcatgttcccataggagccatattggattgactttgctctggatctggagctggctggggagcagggccagagactgagtccggagtagggagaaaaacctgactcacacccactggggttcagccagtggaagagaggagatctaggtgggagaaagccaggtggwccccaaggaggaggtgccacaggggtggagaagaggtgcagggagccggagcagccagagaggagccaggtggccaggagagctggccccagaggagggtggcaagaggccgaatggcccaccctcaccacctgcctctctctttccagattttaacttgcaggtccaaatcttgcctggggtccattatgactcccaaaagtttgaccagaggacccagggacaagcctacccctccagatgagcttctacctcaagctatcgaatttgtcaaccaatattacggctccttcaaagagtaaggcttgcctcctgcagggtcgctgcctcctgcccttcctcctgctctcctgtctctacccatcaccctctgatcctagctagatcccttttctttccagatttgtggtgttaaatcactatgattttgcagagcgaaaatcacggttttctaggggagaagaccctggagcaggttctcataattgtgggataacgttgtacatagcaataccagttaaaagtgactgaattcgaaccctggctcccgcattgtgtctgaacgtcctcatcatattaatggcaaaaactgcaactacttttgcaccaacctaatataaaatggggataataacagaaggtggctcatgagatttttgtgaggattcagtaagttcagaacagtgtcctggcatccagagaccttgattgtgaattaatatggaccctttaattatgaaatgtttgagacagaaaggatctctgagaccacctagtcaggcccctactcctacaggtgtgaacatggaagctggtgacatacctgaagtcacctcattccagctagaagccaggccacctgactaggagagggcaggccattgctctttgccctgaccctggtggggttctacatttctggagttctcttcttttttctacccagtgaggcttccctgaggaccatgctagacatccttcatttctatggccaattggtcatttggttgacagacacacatcaggcactgagtatgcctcagccttgtgtcagacactggaatacaaagatttttaattgtcatttgccaattttattgccaacgtatacaattttaatcatccaaagagaggttgtatagcattgtggccttcccaggttcaaatcctagctgtgccccttacgagctgagtaaccctgggcaagttactttgtctctctatgccttgattttcttaccgaaaatggtgataataatagtacccaccttgcaggaggagggtagttggcgggagtttataaagatgaaaggagttaaagaatatagagctaggaacaatgcctgggccacagtaagcacgacataagtattagccattttcatgtttttagaacactgcgttgtccaaataaaatatgtggctatgtaatttaggcccctttaaaacttttaaaacaaaaatgcatgaagagattgtaagaaagaatgtctgaaagaaatggattgttttctttttgtttgtttgtttgtttttatttttgttttttgagatggagttttgctcttgttgcccaggctggagtgcagtggcacgatcttggctcacttcaacctctgcctcccgggtttaagcgattctcctgcctcggcctcctgagtagctgggactataggtgtgtgccactacacctggctaattttttttttttatttttagttgagatggggtttcatcatgttggccaggctgatctcaatcccctgaccttgtgatccacccacctcagcctcccaaagtgctgggattacaggcgtgagccaccgagcccggcccagaaatggattgttttctaggctggaaggggagtgttgctattaggggagagcctcacacagcactgcaccacacaaagtgagccacagacatgtacctgggactccctggcggaaagagtggcttctggtggtaccacctccacttttctttggcttttttttttttttttttttttttttgagactcggtcttgctctgtctcccaggctggagtgcagtggcacaatctctgctcactgcagcctcgatctcctggatcaagtaatcctcccaccacagcttcctgaggagctgggaccacaggtgtgcaccactatgcttagctaattttttaaatttttagtagagacagggtctcactatgttgcccaggctggtcttgaactcctgagctcaagcgatcctcctgccttggcctcccaaagtgctgggattacaggtgtgtgccgctgcacctggcccacctccagttttctacaaccctagaatgtctgagctgggagggaccgtgagtcttcagaagaggccctcatcttccagggtcggtggtcctcaaccctggctgcacagtagacttacctggaaagcctgcaaaattctgatggcagggtcccttgagccaagggcagcagaatctggggagatggggatgaggcagacatgtgtgtgcttcaaaagctccccaggtgattctaatgcacagcctggattgagcagcctgttaggggctgcctgcttcctgactgcaaacttcacaagatccttggcctttcagctcggttgttaattaatgagcctttcggggtccagggattttcctggatgggtttcattgggccacagtacttatgttatttatttatttatttagcataaagcacgtgtgcaccatgacactatgagattggtattattgttatcctcatcttacagacaaggcaactgaaatccacagaagagatgtaccttgctcaaagtcacacccttcgaagccccagagtggggattcgaacctaggcagctggtgcctgagcccttgcttttcccatcaatgctctagtacctagctgtgtggccttgcaggttcccaactctattctggacgtgggaggccttgctgttgtgtggaaggcaattgggcgggtgttcagaagcccagcagggctacagggccatgcttggtggtgttggaacccatttgcttctcccagaggaaaattgtatttttccaagtcacaagtacataccttgaacccctgcttccctgagcaagagawcctgggggtgtgaacggggaatggcagcctctcctcacagggaccctggcaatctaagacatgaccagctgagcaggttcagtggccttttgtatctgaagaatcatagcatatttagagattgtgacttgctgcatgttacatttaaatctgttcactgatgatgaaagccactcctttttttcagagctcatagacatcatagcatttctaatgccttagaaaatgactatatgaaaatggctatcacatctaaaactctgaaggaattggatgtgaatgtaaaaaataatcctttcttgcatatgcacgtgctgaccaccatgtgtgttggtggtgtgggtgttatggtgatcattactgttgtcatgctcaggtgcagaggggggaatattgctggaagctttgtttggggagggaggtctcccagcagtggggtggttcccacctcacccagyagctccttatggcaggggtgtccttggggataaatatcatcagtgttttgtctttgtgctttttttctctaatcaaggaaaagttgtcgagacactcttcatccacagaaaggccattttgttcagagttacccactctccttaatcaggagttcattctttaaatagttttgatgctgtttcaaaaggctttggtgctgaytggaaatctcaaggttgttgttgttgktgktggtggtrgtgtgtgtgtgtgtgtgtgtgtgtgtgtttcaaagcctttctgactgagtccctccctccctttgggatatttttgaagtctgggaggggaggagagaagcaagtttagaattgcatatggagtgactgaatgagcaattctgaggctgaggaacagcacggtttagagagactatgacgtgggcagctcttttctggccaggccctgggaccctgcagactgagctccgatagccaggtcccagtcctggcttgaccaggctcctgagaagggtgggcaggccctcaacatctttgggcttactgtccccgtagggtggaagatggaaggtcacgttgctgacagttaagaacctgggcttggcatcagggcracctgggtctgagtcctgactttgctctttcctgtacttatgttcctgggcctggtrcttaacctcctagagccttgagatccttggctataaaatagatgcaaaaatacctccctcccagactcagtgagaccctgcctgtgggttgcttcacccagtgcctggctcatgtgggtacccagtacaccggagctgccacggagggactggctcatctctcagtcatggcaaggaaggagggcactctactaactaatggagaggcaggacattgctatggctggatgggacactcctcccaggcttgcaagtgtctgagaaggattgcaccccttactgagatgaatatgattaaagaaaaagcacctgaaaataagcagtgttcccatgggctcaggactggctaggtagtatttataggactcaatgtaaaaatgaaaatgtgggctctttattttaaaatgattaagaatttcaagatggggacagcagagcattgagcgtggggtgcttctaggctaagtgtgaggtccccaaagccagccctggagggagctgtctctggtgagaggcatcttgcccttctgatgtcctatttcagttcctgcttctgtggattgaattaatccccrtgtaaggccatctcattgttgatcttcctgctgtcttcctgtcccccagggcaaaaatagaggaacatctggccagggtggaagcggtaacaaaggagatagaaacaacaggaacctaccaactgacgggagatgagctcatcttcgccaccaagcaggcctggcgcaatgccccacgctgcattgggaggatccagtggtccaacctgcaggtgaacttccttagacttgagcgggagagagctggaggcggccaggccctgagcagatggcttggaacagccacacagagctgtgcccaggcctcctgggactgaagccatggccctggatcctctcttacattcccaaatgttgagatggggcacctagggtccctctctagaagccttgaatcctgtttcagcaccagggtttctagctgcccattctctattgtgttaaattcaggagactaaatgccatcattagagtaaaccacgaccttgtttttattacacttgaggccgtggtgctgcaagatgtgttgttttcctccaatgcttgaattcttggctccaagagaacattttatttagcctagcctcctaggccatctttttgttggggartcatttgttgcaggataatatcaaaagcacttggacagagaaatcgattagaactgccagtgaaaccaactctggctgtgtagtatgtgctggtgtgggaaaggacctagcctggggctgtggcaatcccgattcatggtgctttcaagtcagrttttcttggaattctgggtttgctggggtcttctgagtggggttgcctgtgctcccctagagggcagccatgaaatgggagcggtggtgcagatgggaggctgaattcttctgcatggtgttgagtggcaggtgcagattggaggctgcactcttcggcatggtgttgagtgtttgtgtgttgagtgtttcggctgcactattgattcccagtgacttctgatcagcctcaaagcctctgtctacccagtctttgatgggcatggtctggatgggctgttgcaggtcttcgatgcccgcagctgttccactgccygggaaatgtttgaacacatctgcagacacgtgcgttactccaccaacaatggcaacatcaggtyggtgcacrtttcccagggctgcagaggggcttgccttgcctgagaatcttagccaaaagatgcagcacttgggtctaggggaggcatctccagctccaggagaaaccagggagaaagaaaaaagagaaagactcaggcttcttcggggacttccagtagtgagcccagcccctgtgagctcagctcccatcggcaacccatgcccttggtttccttctgatgtggagccacttggaggggatggaggatctttaagaagtaactgcttcactattcagggttggggctcccattttttagaaggcatgggacattaagaggttaccttcctctcccaaccaacgaggtcaaagctaataggactgaacagctcatttggtcattcattcatctttttgttcagcaaacactcagtgcctacctaatgcaactcaacacaggacaaggctgggagagcagggggaagatggggtatgggggggtaggaggaagagtgactaggaccctaagatgctgctccagctggtgtgagcctatgacctgcactagacaggcaaccagctaactcaactgcaaggacggagacataggcagtgagggaaagactggcagatcagctaaccctgcctgatggatgggaaggcccccttgagggggtggaccctgggtcttgagggagggcagcaggagaaggcatgtcaggaggctggctcagtcagcttgggatcaggggctgcagagcaggtagggtggagagggaggtagggccagtgcaggatggctgggcccccaccagggctaggtggtaaacagtactgttcctgtcctgggaaggtcggccatcaccgtgttcccccagcggagtgatggcaagcacgacttccgggtgtggaatgctcagctcatccgctatgctggctaccagatgccagatggcagcatcagaggggaccctgccaacgtggaattcactcaggtacccggcccagcctcagccrcyggccattggggcggggagccccrtggtgagcgagtgacagagtggagcccagaggagacacgcagcccgggcttacagactcacagggcccgtcttgttccccagctgtgcatcgacctgggctggaagcccaagtacggccgcttcgatgtggtccccctggtcctgcaggccaatggccgtgaccctgagctcttygaaatcccacctgaccttgtgcttgaggtggccatggaacatcccaagtaagtaggctgagggtgctgggggcaagggcgagtcaacacacagcccttctcctttcctaagtgcggctccagccttccccataccttccctaaagcccagccagcagcaggtgacactcagggggctggccttcaaggactcttttgtcactgttgcattctgcagccattctgcactggcacctcgggcctcagacaggtggatgtgttgatgctgaggggaagcagaggcttaggcggatggggccccaggagcttgagaagcagtgactgcaggagaggaatgcattgagattctagaaaggagcagcccaggcctcttctgccctcctgccaatgctcttagctgtccctctcctgtcgggatcatatagggctgcagtgacttcaaragtcctactggcccagcccctgctctaggcagttctcataattgcaaaaatacctctgcgtattgagatttactctgtagcagacattgggctgggctcttcttcctggccgttgaatgaaccaaattcagtcctgactcacagcctttgtaytccctgttccctttgcatgacatgccttttcctcagaatttttctaggctcatttcttcttgtcaaaaggtatttcctataatgtcacctcctctgagaaggctctctgaccactcaagctagaggaggcccccttaccctcagtctaacacatcatcttgtttttatttcttatatatttgtttacccatttataatctagagtctagacattagactacaagttccttgagggtggagatcttttcttttctgttcacaatgtatacccaacagctagcagagtgcctggcacatagtaggtgctcagttataaatatttgtggaataactgaatatacaagtgaatgatattactagctttataataattccatgaatttgatgctatgtttctattctgataatggggatgttgaggctcagagaggctaaaaaacatcccaagttcacactgctagtcagaggcagaacttgaaccccagctttctgacactggagtccttaattgctctgttgtgttgcattctcagcatttagcacagagcctggcacatacttgaagcttaayataggtttgcatgaatgaatgagtgcatgaatgcataatttaataaatggcatcctatgtgtccaatacgtctctctggctgggattaactcagaatcaactcttggaaaggagttttcttgtttgactctttctgaagcttttttcttggtgggcaggtggggggtcagtgggaggccaaaggtgcaaaagtgaagcccccagcgccagacaaggtagttcacacctgtaattccagcactttgggaggctgaggcaggaggattacttgaggccagtagttcgagaccagcctgggcaacatagtgagactctataaaataataataataataataataataataataataaggaaaaaaattagctgagcaagatggcacatgcctgcagtcctagctacttgggaggctgaggcaggaggatcgcttgggcccaggagttaaaggctgcagtgagttatgattgtgccactgcactgcactccagcatgagcaacagagcaagaccaagtcactaaaaaaaaaataataataaaataaaaataaggaaggccccagttaaattgtgtctacctttttgccagatacgagtggtttcgggaactggagctaaagtggtacgccctgcctgcagtggccaacatgctgcttgaggtgggcggcctggagttcccagggtgccccttcaatggctggtacatgggcacagagatcggagtccgggacttctgtgaygtccagcgctacaacatcctggaggtaacccagccagcccagctggccagatgaaggtgtgggcctgggggtggcttcagggaccgactygccgctatcactctgcctctgtaggaagtgggcaggagaatgggcctggaaacgcacaagctggcctcgctctggaaagaccaggctgtcgttgagatcaacattgctgtgctccatagtttccaggtatgtctggagttttgtgagtctgaagactttttggtgagaagcttaactgatccagtgacttatgtgatgcttaatttataagtaagcccccttgctcactctagaggtccagcaacaggcagctcctcacctcccaagactgttcaatccctgtacttgagcactgaattctgtcctctctcaatcgctcaaggactttactcccaaaaattttcctcttctctctctgtatcatcaatgtctctctctctgctgagtcattcccagcagtgtacagacaggctctcttagccccatttcaaagaaagaaatgaatagctaaccacataactcctgccaaacctcaggctccctccagccactgcctcacccttctgctcctttctacagcaaaactatggagagatctcattgtgcttcctcatcccccaactgcttcagcctggctgggcgacagagcaagactccgctcaaaaaaaaaagaaggcctccctgaccgtgccatgtaaaatgacgccctcaccccactgccaacctgtctctctgtgttagtcctttaaccattttatttttcttcaaaatacttcctcatacagttcctggcattatataggacatcgactttcttctttcttttcctttttttttttttgagacatcatctcactcggtcacccaggctggaatgcagtggcatgatcactgcagccttgacctcctgggctcaagtgatcctcccaccttagcctgccgagtagctgggactacaggtgcataccacgcttgcctaatttttatatttttagtagagatggtgtttttccatgttgcccaggttggttccgaactcctggcctcaagtgatccgcttgcctcagcctcccaaagcrctgggattataggcataagccacggtgccgggccagctttctttattgtttggtttcctccactagaatgtaagctccatggggcagggaccttgtctgtctgtttgctgctgcacctctggcctagaagagtgtctggcacatggtagatgctaaaataatttgtctttgaagaatgaatgatgagggccacatccgcgatctggcctggcacaaactgggtcttcagtccttgtctgacgtgtgcatgaatgagtgatgctgggaggggacctatgagctgtggctgctcttgcttgctgtgcgaggatgacaacctccacctcctcttaagcccacacacagccgctgggctcctgtgtagggctaagccctcaggcccatccgctgctcttactcatagaaacacttcccttccctgtgggaaggaggcctgagatgtaggaagatactactttagaagccacagccattgccacaaagctgacagatgccctggagaccccaccactggtcagtcattcattcattcagcagtgttttactcagcatttgcctggtgctgggcactaggctgggccaaggatgtgagtggtgaacagagtacagatgagcacacactgttccccatgactgggtcaccccataggcagatcaggcctgtgcttgacgggggaggggaagatggaacaggaagagccccccggtgtttsgggaagggctggctttgcaccacacatcctgactcctggggactcccagcaccagccctgatgctggcaggatgtggatacgtcccagaaaatctgtgagcctytgctgtctcctcaccrtggctgactgtgtccttccactgcctgagcgtctccaggacttcctcaccaccctccttcagggtaaacttcaaaagatgggcccttgtttcctcctctgtaaaatggggataatagtgcctccctcatctgaggattataagagttaagtaaaaatgcatgcaaaatgtttagctgcactgcctggcccatagacaacactcagtaagcaatgattttcttactgtttattatgttgtcatcatgatcgtggctaccactgagtttttttttttttttttttcctttggagatgaactctccctccattgcctaggctggagtgcatggtgtgatctcggctcactgcaacctccgcctcctgggttcaagcaattctcctgcctcagcctcccaagtagctgggattacaggattgcaccaccatacccggctaatttttgtaattttagtagagatagggtttcaccatgttggccaggctggtctcaaactcctggcctcaagtgatccacctgtctctgcctcccaaagtgctgggattacaggtgtgagccactgcacccatcctgtagctaccactgagcttagaactgatctggctcccaggagttgctgtgtcttggaagaataagtgaatgagagcccacgtccacaagagtggtggccggacttttatatacacatatataacttatgtatgtctattgaatttacaaggcatggctggccttcccaggcctgacaccagctggatcctctcatgcctccctgccttgactcatgcagtgccccactcaactaacttgcacccctctcacaagtctcccttcctctcaggagctgctcccgaaattcgccaactcaccctgggcctctgtctggcgttgtatcctctcytctgcccttccccagcacctttgcctgcctccatcagagtttctatcaggccrtgtgaaaatgactgattttccttggcttccccacccagttagactagactctaatgcagagaaagggctgtgtctttcccttctataacgccgatgccttatgcagtgcctggcagatggagattataagagcagctaatatttattaagcacttactatgctttgcttattccagcttattgcatcctttcaacaacctcatgatgtaagaactttttttttggagacaaggtcttgttttgtcacccagactggagtgcagtggcccaatcatggctcactgcagccttgacctcctgggctcaagcaatgctcttaccacatcagcctcccacatatctgagaacactggcatgtgccaccaaacctggctaatttttaaatttttttgtttttgttttttttaagacagagtctcgctctgtcacccaggctggagtgcagtggtgcgatctcggctcactgcaacctccgcctcccgggttcaagcgattgtccttctttagccttctgagtagctgggattacaggtgtgtgcctccaccatgcctggctaattattatattttttagtagagacggggtttcaccatgttggtcaggctggtctcaaactcccgacctcaggtgatctccccgtctcgccctcccaaagtgctgggattataggtgtaagccccgacagctggcctactaatttttaaatttttatagagacagggtctcaccatgtttcctaggctgatttcaaactcctgggctcaagcagtcctcccacctcggcctcccaaagtgctaggattacaggcatgagccactgcacctggccattataggaattcatatcactcccatttcacagatgagaaaacttaaagaactaattgctcaaggtcacatggcaaataaaaagccagagtttgaaccactgtgttaaacaaatgtctcttgactgaatgggttgccacagacatagaggccagtggctgccttgctggaccattccatggggtcagaccccacagcccgtaatttcagactgtgagtgattcgtctcccatacactacagttctcccaatgcttcagacctccccacggaggggtctggctccttcttggctgaggaggctacaaccccatggaagtgactcttagaactctccaccataaatggctgggatggtatttcctttacctgccaaaaggtgctgtggtttaagttatgcagatccagagagagccatttgctgggagtctggggagacctgtgggcatgagaggctggatattgccctcaaagacttaagggaggcccccatgggacctgtgggctgaccctgactaatgtgctttcttgggctctgtcagaggctccacaagcgccttccatttgggtgtttattttcagcaggcaaggagagggccaggagttgctctcccgtgttacagattgccaggccttcccaggcactctctgggagccctgcggccaaccggcccctctcctgattcccccacccttatctccactccctatcttgccttctgatacagaagcagaatgtgaccatcatggaccaccactcggctgcagaatccttcatgaagtacatgcagaatgaataccggtcccgtgggggctgcccggcagactggatttggctggtccctcccatgtctgggagcatcacccccgtgtttcaccaggagatgctgaactacgtcctgtcccctttctactactatcaggttaggggccttcctcttctctccttcctgggggctcagatgtggytgtatgtgtgtgtgtgtgtgtgcacctcattgttacacatgtagggcacgacgggaagcaggagtatgttgttagagctttccaggccccactcaaggatgctgagcagcctttgtgcatttccacggagagtggcactgaaggaagtggcttccactgcaccgctagtggcctgtggctcagatggggggtctgtcattacacctgcttccacgggagggcccggcaacagtcactcagcagagtgttgaggggattggcccctgagtcagacgctattgattctgccacttcctagcaatagggtcttgggtgggtcctttcacctttctgagccctgatcttctcatctctaaaagggatgggcttcactccacgacggggggttgtgtggatcacaaagctggtgtatggaacagctcagcccagtgcccaatgcagaatgcattcagtaaccatgagctattgagaagagttcattttgtgccaaaaaggacttgggttggattttaagagcttccttcatctaaaggaagagcttcctccatctacaggacctcacatgcagggtgacggcatgtcctggagtcttgcctgttgtagtagcagctcttcttgctctcaaaggtgtctcggttgggactgtacattatgtcatctgcctgctgataagatgctaaaagcaaaaggagtgcagcctgttccttccaggaggacactaatgagaataagggttagccgccccccctcgatgtgcaggctccatgccgggcagtggagaggcaactctgggggagaggcagccacggccctcccttgtgggagttcagtgacaggggtggggcgcaggccagccttctctcccaggctcatgatgggtgtgaagggtcctctaccactccagcatcygcgagcygagccaagccaggaccccgccctgccctcacatctcctttcttttctgaaggtagaggcctggaaaacccatgtctggcaggacgagaagcrgagacccaagagaagagagattccattgaaagtcttggtcaagtgagtggcagtggcagtggctagtagtgatgtgtgaactatmtctctcccttctagtcagcctctgcctccagtccttgaagggcaagaacacarggaatggttatgctttttgcttttgtttttgagacagggtcttactctgtcacccaggctggggtgtagtggtgccatcacagctcactgcagcctctgcttcccgagctcaagtgatcctcccacctgagcctcccaagtagctgggaccacaggtacaaacccacgcctgactaattttgtttgttttttttgtagagacggggtctcgcagtgttgcccaggttggtcttgaactcctgggctcaagcgatcttcctgctcagcctcccaaagtgctgggattacagatgtgagccacggcacccagcctgggaatgtatattcttcgtggaatttggctcccagaggtccagtcgccaattccaagggtcccctgctgccattgttccaaccttctctctcctcccttttcccaaaggggcctatagtagtgggtgaggggaggaaaagggtgagttgtcacggtacatggctggtgagaaacgtagcttgcttttccctcaacctgccccacattaaacgctgtcccctcccattcccctggtcccccattttcttctggaaggctgactcagcacacagcgcctgcctgtctgtctgtccccacagagctgtgctctttgcctgtatgctgatgcgcaagacaatggcgtcccgagtcagagtcaccatcctctttgcgacagagacaggaaaatcagaggcgctggcctgggacctgggggccttattcagctgtgccttcaaccccaaggtactggctyagtgggatggctgttgttttttctgcttgtgtgcaggggagtctaggaaaagttaaaacggtttccccactcctggatgtctcagagtcttggatgtggtaatgtgcatcattaatctggaagagaaggaaagacttgtgtgcagggattccmaaacttacacagtagatgagtttttcatggtgttctggagaacacagtttgagaaacactttcacaatgaatccaggcctcaacatacatcagctgctctggctgaactttattcaggctcactgaacacctgctctgcaggatgcagtgctgcatgtgaaagggggaagagatgagtaagcttcagataaacaaaaaaaggccgcagagggtctgtctaagctctatcccctgccttcagcactgatggataaaatccaactcttagggaatggtggccacgtgctggaccagccccgggctctgaggatctgacagtgggtggcgcagagccaggccttgcccttggggagctctccagcatacaccccaccctcccctcccagcgcyctgcaaagcaggcgtcaatgccattgttaatgcacagaggaggaacctgactgttagacaggttgatgggttttccagggtcgcacggcttctgggagatggatgtgactctgaggacagggcacaggccagtgtaatgccacgatgggatgagctgtggtctgtgccacgtagaggcttaggccaagggggcactgactgatgaccaggtcggccaggttgctgaaaacacctcttgggtccaagcctcacctgctggctcccaggagtctggaactgccaggagagtggtggcaggtcccccatcctccgctgggtgggcctggatagaacagcaagatgagggcacatttccccggccattccctccaggcacagctgtgacctgctcattccaattttgtggaaatatttccacacacacaaaattgcaaatagtagtggacatggtgagaggcatttagacatgggaaaggcagtatttttgggacagatcttccagggcttgccaatgtgttaaccatagggcttaagcggggaaggagaacagaggatgatgtgttcaaattggttcattcacgtcctctgtgccacgcctgtgccgggccctgggagagacagatgagcacaggagccgcagcctgggggcagtgtgggaggaagcccagggtgtctgcgcagggtagggagggccctactgggagccgagggctgatgtccacttgggtgccatccaggttgtctgcatggataagtacaggctgagctgcctggaggaggaacggctgctgttggtggtgaccagtacgtttggcaatggagactgccctggcaatggagaggtgggtggcttgaggtctggctggtctagggggtggtagggcacgggaggacccaggaaagggtctgggggatgcggcaggtcctacggaggacatttgggagtcagtgctcaggccactccgggtcactcaggtcatttgccggcctccattgtaattattgccatatgggagtgccacctttcctatgacatatttaatatatttctgtgaatggcctacctgtttgtatttacaaattcatatttaaaggaaacttgtatcactctcacaaatggaargcagcaaaacataaattcaatgaaaacaaaatgaagttaatgaattttagctagatactattccctggccaaggcctgctctttgtttgttttgtttgttttttggtttttggtgtgtgtttgtttatttatttatttatttacttaggtggagttttgcttttgttgcccagggtacagtgcaatggtgcgatctcagctcactgcaaactctgcctccctggttcaagtgattcttctgcctcagcctcccgagtagctgcgattacaggcacgcgccaccatgcctggccaattttgtattcttttttttaagtagagatggggtttctccatgttggtcaggctggtcttgaactcccaacctcaggtgatccgcccgcctcagcctcccaaagtgctgggattataggcgtgagccaccgtgctcagctatctttgtttttaaaaaagactaataggcaatgagagaggtattaaaggtctattagcaccaatatgagactgtctctccagtgctccgaagratgaaaatgtaattgaaggggaataactaaaaaataaattatgaaaagggagtaaatactcaccatgggatttgacgctagttctgctgggtcacatacctcctggaatcatcttggcttcctggaaagccagccttatttcagagactgtaggaccaattgttgttgcttctaccgggttccaaacagaatcacggcgcattcggagcccctctggagaaggcatgctaccaggcaggcccctctgccagggctggatgggtgggggcccagctgttccaggtcccccattaagaggcagggcctacacaagttgctacagtttagttggagtgagagacaagctaaacttgtcagctgacaaccaggtccttggccaggtagccccatatgtaaaccaacttccrtggtgggctgtgagccttctcctgcaagctgtggccaggtttccagaagaaaggaaaaaacagtgtttttattcatcctggcttgagaactctgtcattccctctctttctagaaactgaagaaatygctcttcatgctgaaagagctcaacaacaaattcaggtaaagctttttccgttgtcctactcctagccctgccctgtggacccaaagtctgggttcaggggatggaactgggtgtgcacagggkgtcttctcagaaccgtgcaggcacagagacctgggtctaaggtctgtactcagaatgtgtcgagggtcaaaccacagaaaccaagtccctctcacaggtctgcaggccaagcatggggtggtcatgggagttggtgacaaggctgggggatggagaggaccagaagggggtccagctccattctccagctggagggggagagtctggggctggctctccaggctgttggtgctgggtgctgggtgccaggtgctgcttgcatgggacatgtgtctctgtgtgtgtcctcgggcaggtacgctgtgtttggcctcggctccagcatgtaccctcggttctgcgcctttgctcatgacattgatcagaagctgtcccacctgggggcctctcagctcaccccgatgggagaaggggatgagctcagtgggcaggaggacgccttccgcagctgggccgtgcaaaccttcaaggtcakttcccagccagagctgccccacagcagggacatgacagggtgcattcatgcctaggacatctgtgctgggcgtcccaggtggcatgacctctgcctgtggtcctgtagatgtggtcccaggcatgggccagggccacaaacctgagggcttaggtcactgctgctctccctcagccccctagaagagctccaccttgtgcacacaactctgggggagaaggtggcacagatacccccctgcccttagggagcttctagtttaaggtckttcctccagtgactacctaggtcacctcttaactactgtgtctgtttcagtctcacagccatagagagcctggggacaggcaccacacaatggcggatccactttggatccactcagtatctccatagctctttattgctgtgattgccccagtcatttagggaactygtcactcatgcagagcgtcactcagcggtggtgcttaggagcatcagcttgcatcggggcaggcttggttccaaagcccaggcctcctccatgtggctccacaccaggaacataagagcaatcagacctcttccagtgtgggcatgaggatacaacaagatcatgtcaatattggcattcatartggtcgggcacagtggagcatgcctgcaatccaagcactttaggaggctgaggtgggcagattgcttgagcccaggagcttgaaactagcctgagtaacatgtgaaacctgcctctaccgaaaatacagaaaattggctgggcttggttgtgcgtacctgtagtctcagctacaggtacgggactgaggcgggaggattgcttgagcccaggtggttggggcttcagtgagctatgatggcaccactgtactccagcctgggygactgagtgagaccctgtctcaaaacaaaaacaaagcaatatttataatagtagcaatagctactatgtgccaagcccagacacctctttgagtccttgctgtcaccctatcaggtaagtgtgcttcgaagttacacgaaacmcacggctcagtgtttggcccatggtaagggcytaaaaagkggtagccccagtggtggggatgctgctgctgctgaccattaaccgcagtctgctccaccttcttccaggcagcctgtgagacgtttsatgtccgaggcaaacagcacattcagatccccaagctctacacctccaatgtgacctgggacccgcaccactacaggctcgtgcaggactcacagcctttggacctcagcaaaggtacctgcttctctgyagcacatggggcttgtttgtgttggggtctgagccctaagcccatggtcaaggagamccccaggtctttctgaacagagacagctggcctcggggcctccctctcactgcatgcaagagcctgttagggcataatactcaaggtgctgagggaggctgtttcaggagggagccccaggagggtggtggagacagaagggatcagcatccgccaagggcctactgtgtgtcagacactgtgcggggctcctggcccacatgggctaagtgagcctggacactcctcctgggagaaaggcacagatggagaaattgcagttcaaggaggtgaagcaagctgctagcctgtggccatgttggggtctgagccccagccttccagctgcgaaggcagccaagtgtcgtagagaaggtgtcacagaggcgattccaggctktagtggtgaactctccactctgcacccccaggtgctgtgccctgtgccctgtctaagatagtcctgaaggtttctgcatatttaagatatccccaatgtcaacaatgctctcctgtggatcccaagccatggagatgtcccgggactttccatttttaggttcctaaattgaatttcccaacacctagaagcaacacttagaagctgccctgtatcagatcaaggagcttttttttttttttttttttttttgagacggagtctcggtctgtcgtccaggctggagtgcagtggcgcgattcccgcttactgcaacctccgtctcctggcttcaagtgattctcgtgtagctgggactattggcactaccaccatgcctggtttcagtatgttggccagtctggtctcaaactcctgacctccagtaatccacccaccgcggcctccaaaagtgctgggattacaggcatgagccaccatgcccggyctggaccaaggatctttatttgtggaataaaaggaagaaaaagaaaaacccaacggccacctcagcaggatgccccaagggtggtgttcagatgtcactgactcagacatctgggggcttcccctacctacgctcaagaaccactttgccatttcaccgtctctgtgtcctccacagccctcagcagcatgcatgccaagaacgtgttcaccatgaggctcaaatctcggcagaatctacaaagtccgacatccaggtaagggaaagtgcagggcttcgtgggtgatactctgtcgattttattttaacgaatgaaagatcagaagaagtcagtctttgaagggagaggagaagagcatatgctggcattagcagccacactgtcggtaggaccggcccacctggtaacctgcggccacctgtgcttttacgtctactcttggttaaccacgagccacktttccagcttggactctragcatctgctccacttcctctccttcctcattgaactctttcactaaaaggagagtgcaagagagacttaaactgtttgattcattcttaagaactttcaggaaaagtgttggcagggaaggaaatttcccagctctgggaaagagccttgtggattatctgcaggtttcattgatctgtgctgtcctccccgcatgcattaggaaaactggccttggttctaataagaacagggtttgtcctggcaacaaggaaaggtttcttctgatatccatgtatgtccaaggcggatgctttctttaggcagaggctgtagccaagccctcggggrgctccaagggctgctgggaaggggtgggcccccctcctccccagagggaagctcctggggccctcttaagcacccctgcctgtggggatgcctcatcccaagctcagggtggtggcctagcttgtggaaccagccaggaaaatgaaaggagggcacatttcctggggaatctcgcctgcccatcaaggagccctggaggaaatcctgcaatgtcacctgaggcttcattttccttccccagccgtgccaccatcctggtggaactctcctgtgaggatggccaaggcctgaactacctgccgggggagcaccttggggtttgcccaggcaaccagccggccctggtccaaggyatcctggagcgagtggtggatggccccacaccccaccagacagtgcgcctggaggccctggatgagagtggtgagycccgggctagaaagccagtgctgcctggcaccctctggccgccccacctggctgaggggctgagcctgggcctgccggtgacagccatccctgtccttcctgctgagagggygggccaccaaagcttatgtgaaagcagctgtggaaacagtcccagcccataaggcatggccccctggccttagtttccctaatgataacatccccctcaatgcagtggccaaagtcagaaagtgggatgagctgggtgtggtggctcacgcctgtaatctcagcactttgggaggccgtggygggtggatcacttgaggtcaggagtctgagacaatcctggccaacatggcaaaaccccgtctctactaaaaatacaaaaataattagacaggaatggtggtacatgcctgttatcccaatcccagccactcgggaggctgaggcacaagaatcgcttgaagccaggaggtggaggttgcagtgatatgagatctcgccactacactccagcctgggtgacagaaactccatctcaaaaaaataaaaaagaaagtgggatcagagaaacagagcctggcagtgacccccactgtccaggagaaagtgagagaacctgagacgtggggacgacaagacagttgcccttgtgactgtagggtgaaggatgtggttcatcaggactctgttccagaggagagaatgtcaggctcttatttttacccagtgtttacaaagcatctgtgtaccaggcacggcaccaactattatggcacaatttcattcagtgctcatgccaacccagcaagataggttgtgctatcagatctgtttcacagggagggaagccaaggcccagaggcttcagtcacctcagaagtggggagccagggtttgaacccgtgtcttctggcaccagggtctgtgctgtgactgccctgcatgctgctccctgggacttccctttgggctcatctgctcacccagcacatcttggtacagcacccaggggactgcagtcatgggcttctctctaagtgaacaactggcctgtgaggtatccattagtctttggtggatttagtcattgtgagtctgtagatcaccagtgagtgtcttgctaaagttcaggtctgggccagagaaggacgtggttagtttatcaggaccacgccaacttactgcccctttgggggctggtgatcagccttccctggcagtcctttctccatgcgccaccttcttcctgccttttgctcttagagccaggtctttagagcctcctttcccctgcagctggagaatagagggtgtctgcctgggggcctcgctacctactgagaatcctgaatggggcctcttttccatcctgacaccttccttccccatccaggcagctactgggtcagtgacaagaggctgcccccctgctcactcagccaggccctcacctacttcctggacatcaccacacccccacccagctgctgctccaaaagctggcccaggtggccacagaaragcctgagagacgaggctggaggccctgtgccaggtgaagatcagggctggtgggcagtgggggtatgtggggggtcccagcatgtggggagccagagtccagagctggttttaactttcaagagggatccacaccaggttcccaaagtgagacttgtcaaaggctggtgggaagccaggcatcgtccgctggcccatgtctaggacacagttgtgttgagtgaactgaatttttccaagtgtctgcaggatgcaaccagagtgcactgccttgaacattagctagraaggggagccgcccttatccgtctttgctttccccaaaactggaataaacttgtcacttaagatgtattgggggatggatgatgtggatgaatggataaatgggcataatgggcagagtgacagatggagagctgaattaataagttaatgagagaatgcgttaactcacctgcaactgtctggttccaagtctttgcaaaaggcactggttgtcattattatcatcatcattatagctaattatctcaatttaagctacctccaccgccattattttgtggctgcaatgtactaacttggcacatgctttctcatttaattcccataacatccccacaagacaggcaatactgtccttgtttcacaaagggtaattgggacaagattccacagctagtgaggacacccagccaagatttgaacccaggtctgattggttccaaagccttgccccaaataaattacaataaagatttgacccctgcccatgagttgccgacagtggaggtaacacaagttagataaatgtactggactgagttcctccaggacaggcacttattttgtctcaagtttggtcgtctcagcaccatggacagtgcctggcacatggacttgtttgttgagtgagtgaatgaatgaatgaatactgggttgtgacagtcttttccccaaagcrggacaggcgccctgagtcactgacatcacccttggcttttagccctcagagtacagcaagtggaagttcaccaacagccccacattcctggagytgctagaggagttcccgtccctgcgggtgtctgctggcttcctgctttcccagctccccattctgaagcccaggttctactccatcagctcctcccgggatcacacgcccacrgagatccacctgactgtggccgtggtcacctaccacacccgaggtgagccaggggcagaggctctggaacagccccgctccgcccattattggacatctgttcatcaactcagattcagctccctcatcagttcaaggagggagggaacacccacagcccagagttgttaacagtattaggaggtgtgtgggagasatctstaggaaccaggcactaaaccaagccttctgtatgtatatgatcagttacattgtggggtaggcactgtgtgcattttacaggtggcacagaaagtcacactgttagtaagtggagagctgagattcagacctggatagtctaactgctgagtccaagtcctccaccactccactgtcccactactcttgggacaatttaatgagatcagatgtgaagagcactcaacccttggtaggaggccagtggttcttagtsttcccaatcatgcagcctgaacgcaggggagattcygcattgattattcattcactcactcagctattcagtgggtgcctggcactggggtgggtrtggaaatacaacagagatcagccctgccctcagggagcatctagaggcrgcagtggagagataggcatagaaataattagatgattytcattgtgctgaagccaagaaggaaaggtcagggtcactgagggaagcagagcagggggtgacgctgccatagagcgggaggccaacatctcgtccaggtggtctcggctccaccactggccgctgccccctgccctgccctctgtaactgagcattgcctgggtkggcaaagctgggagctgcccayacttccgagccctctgtcctcaagaagcaaaaacacagtttctaaaaccttggcagagactctatttgccctgctagagaacagccacccagaccaggagaggagaggcagacgtgtcctgtgagatcaaagtttaatcccgaggaaaaccagggggacctctgcagttggttggaggccttcytcaagtgctgggccattgtaaagggaacacaacccagagagacctcctgggtttctacaagcccaggagggcccactgaggaggaaagcaaggtgccagagcaggctgaaatgcgcggagctcatccaccacccagggttgctaccagcaagggccacgctcatgagcacgcacagcagtagccaccctgaggggccacttcatgctgctgtcagtggagctcagtggtgagctgggagtgttcccggagaaagtctttggaaggagcactggagtaggagtcagggaagctgagctgtccacctgattccaccacgacctgagtgacctttttcaartcacttttcctctccccgtctcagtttctgcttgggcagaaggagcaacttgcagcctctctaagtccctttcaacgttcctcasctccgcgcttacagagggtggatctcagaaccaggagracaaacagctgctcattgagtcctgagagtgcctgagtgggggcgtccaaggaggccgtggtgtgggcggagcagctggtacagtttgcgcatgggcagtggggggacgttggtcactttgtggtatcgttgcagatggccagggtcccctgcaccacggcgtctgcagcacatggctcaacagcctgaagccccaagacccagtgccctgctttgtgcggaagtaagcaccccttccactctgtcccctgtggggccgccgacccctgggagttccgggaggaaagggagggatctggggtttaggagacgctcggagccccttggcccataaagaaggcactgrggtcacactggtgtggctgcctgtagcagggacagcgatgacaggtgggtctcaagagtccagtgagcwtggcccttttwcagaaggacctgggggaggtgctggtgcctggacagaagtgaagcagcctgcaggacgtgggaaatcaaataggagcttcttgtcctctccaccccctcacgaccgcctcccacaggcccagctccccagccatcctgtgtgtgcgtgggcctggggtgtctgaggactggccccctcttctcctgtcctcttcagygccagcggcttccacctccccgaggatccctcccatcctygcatcctcatcgggcctggcacaggcatcgcgcccttccgcagtttctggcagcaacggctccatgactcccagcacaagggtaaggctggaggcttcccaggtgggaggggcaccagggggccagcrcctgcctaggagcagaactgcagccccacaaacggttcctgacctctctcgagggaaggcctcccaagtttgcttccctgtgcgggcctctgcgggttagaatggctgcctttccgtctcccgcatagtagccagggctccctctcctgggagtggaggtaacaggaaagtccctgcttttgatctccgattggctgagggaattctgcatccgcactttcagttctgtgactatggatgagtgatctgaatgcgctgggcctcagtttcctcatctgtaaagtgrggataatgctattaaatagctagtgggagtgaagtgagaattccagttgggcttggagccctggcgccctctggtggccaacatggtaacaacagcccgggactcctgcaggagtgcggggaggccgcatgaccttggtgtttgggtgccgccgcccagatgaggaccacatctaccaggaggagatgctggagatggcccagaagggggtgctgcatgcggtgcacacagcctattcccgcctgcctggcaagcccaaggtaaatgcagcctcaaagcaggtgaagcattacacacacaagctccactgtgagccctgggtccccacaggcccctcgcctccccgagccttcacctcctgagctcgaaaatgctggtaattcacaaccatcagagtgatgctgtgaagagcattacaccctctcatacagcagaagcgacagacctggagaggttcaggactaacctaggtcacacgcgggttaaccccagagcccagcctgctgaaggtccccagcaggccccctgggacacgcgactgcccggggagaggtggtccaggctggctacgctcaagccttgcaaggctggagggcggccgatgcttccaccacggccatcagaggggctcttctgtccccagggccgcgttaccccctgagcctggggtgtcagaatagactctcrgccttcacacatttgtcccatcagggcacctcttgggcccagtgctctgtgcccagtgctggggccactgggcatcctgtgtggagcaggagcagagagtccctgactgactcctggaccttgtatctggggagcccgggatccataccctgcagagacctaatgggtagactgcattgagaggctcccttttctggggtgtaggcagagccctgggcagggggactgccttcattgatgcctttttgaagcatggcaaattcagagacagtctgggatccccactggatggtcagcccctcgagggcaggactgtgtccagcatttatctctctaatcccagccgagccccaggggcatccatgcacctcatcctgagcctggccccttgcaaggtcctggctggaaggggactcactcctcaccccttagtgcccctctccccgcctccttgaggccagcaggcctgcctgcaagccttgtcctgagcagctgaggactgaacccactgtttcctctggtttcaggtctatgttcaggacatcctgcggcagcagctggccagcgaggtgctccgtgtgctccacaaggagccaggccacctctatgtttgcggggatgtgcgcatggcccgggacgtggcccacaccctgaagcagctggtggctgccaagctgaaattgaatgaggagcaggtcgaggactatttctttcagctcaaggtatagtagtgggtgtgtgggctgaaggtgccggccaagggcacaggccgttggagccaggaccaggggtggcaggtagacccaggggaatcaggcccagaaaggttctggaccccaagagaatcttagcagtggctgagatctgagctgggtgggctgtcagatggccytactgcacatcctggaccagttggcagctttgagaagtcgggtgaatgtgttccatttttccatctgtagaatgggggcaggagagtctccctggcctctccccaaacccccctttcagaaagtatctgtgtggccaaagcaaggctgtgaacacaggggagagcaaggctgccccccgtcagcctcgtgtgaacctcacacttcttatttacacccaggctggtgtctgctcaccctcatccccccagcaggaagggcttgcattttattgatgaagataatagtgatatttatcaagggcttacactgggcatactgcttgccaaggattctcatgtgacatttcattcagtcctgccgaggactttatgagggaggcacccccttttacagagggaagggggcctacggggaccacagcagtaaatgtgagagcctagagttcagtctgcctctctctggttccaaagcctgtgattgtcacttccatactctccctaagacacattcatacgttcaactgaacatttattgagcacctactatgtgctagggatagagcagtaaatgaatcaggcaaaaattctttacattctactggggctgacaaacccagacaagaaagaggtgtagtgcttcagagaaaaacagcaggaaacagcccagggaacgctggggagtgtaattttaaatagggtggccagggaaggcagagctggaaggtggcatctgagaataaacctgagatgrtgaggaggagccctgtggatactgaaggaaacactctgggctgttctggaggggcagcaggtacaaaggccccgggggtgggagttaagctggcgtgtttgaagaacagtgaggagataacaggcatttccccaaatgtgttcagtgggtcggtagacagttggcatcaaaaagattccaaggtcgaatagcctgggacatgcttagttaaggcaaggcaaacacgttgctttactacaagacttctgggagccttcagtatgctgctgttcatcaggacccttcaaggctggaaggaaagaaaggacgtagcatttcccaaacatatttatctcagagctcacacttcctggagtatcttgggtgggggatgaacgctgggcaggaaatgggtatgctaagtaaagctttggagatggttagagggcccgcaccagagcaggtgctgagcagsgttagggtctaaaccagattcaagcacaatctaagtataacagttgggaagacagatggctcatgaaggtccatgtgatagggaagctgggcaaccccaggggctcatcccagcctggacttgacacgttgctctctgtttttacctaaaagagccagaagcgctatcacgaagatatctttggtgctgtatttccttacgaggcgaagaaggacagggtggcggtgcagcccagcagcctggagatgtcagcgctctgagggcctacaggaggggttaaagctgccggcacagaacttaaggatggagccagctctgcattatcygaggtcacagggcctggggagatggaggaaagtgatatcccccagcctcaaktcttatttcctcaacgttgctccccatcaagccctttacttgacctcctaacaagtagcaccctggattgatcggagcctcctctctcaaactggggcctccctggtcccttggagacraaatcttaaatgccaggcctggcaagtgggtgaaagatggaacttgctgctgagtgcaccacttcaagtgaccaccaggaggtgctatcgcaccactgtgtatttaactgccttgtgtacagttatttatgcctctgtatttaaaaaactaacacccagtctgttccccatggccacttgggtcttccctgtatgattccttgatggagatatttacatgaattgcattttactttaatcacactgtatgcgtgtgtgggtgttttgtagggaaagctcttctcagagtggggagctggtgggtgtcacagcctggacagatccccgacagagggacaccccagccagtccatggctcctctgaaatggctgccaggtgtgccagcagcagatggagcttcgtgctggtccaaagacctgtggtagggcagggggcgcaggcctgcctcccacacaaagtatctgaaacggggtctggtgagggtgggattgtcgcataaggccagtgtttcgaggaaggccttgagcttcttcttggacactgtcttagaaagcgttttgctctggggccaccagtctcatgcgagactgtgccttggccagtacggatgtggtccctgggaaggcagcgtgtcgaggcgagtgtgggccacagcatcctcgcctgagggactggggaccctcttgggtttggagcaggccaaggaagccttcttaggagagtgggccccgtttccttctcctggtcagaaccaaaaaaggagctcagcggcggccactggggtcctggcaacacacggctcccagcttaggtttggcctctgcctcctgggtgccctggccgacttcacccccttgcccgccaccttccccttctagcagtagcatctcaggggcaggagaaggggcagtgccaacctcaggctccaggaaagctccatgccctgcgcgacagccgtgcatctcagcaacaaggccaggagtccgctcccggaccagggctttccagctttaatgtgcgcacctcgtctggggtcctgtgaaaacagagactctgacctcgcaggtcgggtggggcgcgggatgctgcgtttccaacaaactcccggatgcagctggtgccactgctctgaggactactatggggcctgaggaactggattcttactgggctgagcaggatgtgttggcatcacctggatgcagagtcgggcttcctggcagtggcccagtggctggcagaacccaacacatgaacactgagccacttttcctatgcaagccctaacccctaatgccggagagacccacaatggaacacacacccagacggtgcttcgggttggcttctcctgacccccctccccaagccacctcctcccactgggacgccaggtctgaggaggcagctctgaccctgctgtggccctcacaggctctgccccagcccctctcccatctcggaggcatggggctgtttcctggggtaccccattaccaccttcctgtgtccgagactcctgcccaaaaggctagagccccagcctgctttctccaacaccctcgtgggatttgtgagggaccctctgggaggaggtgtgaggtcaggaccccctgcccaaagggagtccatgctttcccatcccactcctctcagcagcaccgccgcccgattccacagactccaaaatgtctccaaatgaattaaagaagccacggtcaacccacatgaatgtgccaacaagcattttcatttctttattttaaggacactgggaaaggagccagtcccctgaagagaacactctggtcagttggtggaggccagtgggatgccatcaggctggctttccaggagggggtgaagggttgatgcagggtgcaaggtgagagttaggttaaaggtcagaggggagggactgaggacgtcacctcccaccaggagtggacagctggtggcttgagactggggtggagctgcgtgggggatgggaggggactgagcatggggcttcatcttcactgcccactccccacctctccccagctgtgcccctctcatcagacccccaagagttgttgatctgggtgttgtggaccacagcgttctcatcaaaacggggattgaggtggaaggcgatgtggttcccagagtgcgggttgatgtggaacctggggtgggcagcccacctggacctttgtccactgagttctgggccttatttcctccccgtcatccacagcctgcccaaagccaggggaatggctggaatcaccttgaagggctctctcttcccagaggtcaactggagcccttagcttacctctgagcactgggcaggacagtgcccaacaggatgatggacttggatgggtacagccctcccggaatgatggtgacaaaaggcgtcggctttcagaaggagaggcatgggtcagccagtggcagccagggcagcccaccacacaaaagggaagattgtaccaggtcccatgaatttgggctgtcagctaagaagaaaccaacgatatctgtacttggttccataaaagccaaaggaaaactttccagtgctcctcatattaatgggcttagattagtgtcatgaaaggaactttggccaaacacaaaaagactcatctcgtggggtgaaaagggagagccatgcaatgcgctcgtattgacacgacagttttaaggttgaaagctcctctccacagtcttctaattcgctgggaagctttgaagcccttcagcttaccattttgaaagcccttcgcttttcattttgcaaggctagtggatacccccgaagtggcccttcacccccagcctgcccaccacaaacagaacctccgccctccctgagaaaycacttacataggtggggtgggggtacatcataggtgggttggcgggagtctgctgaaaagaaaccaggaaattcaatgggagagcgcatgtgtgcgcgagcactcacccacgcgcacccatgcattctagaggggctccactgtgaggctgacctcatgagcctttggcccttggactcccccatccacctcccttttcatgttagccttcctggaacttcctgccgtgttcccggactccaccacggtcacctgtccctcaacccctctgcaggcagccccactaacgctaaacttccggcctgatttgcaccagcaggagaagagcttaagcctatgatcggtagtgacatcctggggacccaggatgcagggccaggaacctcacatccgggtgctggggccactgcactccccacttggtgacagacagaccagtttccctcccggtctctagggggcttgcctcttccaccactggataaatcctgcttcttccagaatctctgctgtcccaaggacagctttagccacatgtcacctgagccaagcactcagcccctagtgtccccatcctccttgctaaaccgctttcttcccaactctagcgctctagggaatttagttcttggtgaaggaggacactgtgcagctgtgaactgaccagaacttgtagacttacagagaacatctgtccaggggcgctctgcactgtgtggatgactgtctgggtctggaagaaagaaaccaggtctcacccaggctctcacgtgtgaaaaccaccagctcccaccagagggcgccacacggcaggcaccctccagggggcgtaacaagcccaatggccccacagaccccacagagggtgggcccaggtgtctcttctctcaaggggatgagcgaggggcaaaggttagaaccctggagaagacagatggggacgctggtggctctggcccatctttcctctcggggaaacgtctctcagcctagcctccctttgcaggtgacagaagtgaatgtggggcatggtcttccgtggctgcccacggggtggcaactcaggttgtttcatcacggccagccaaccacatccaacccccaacctcaccaggccgggcagatggtcaagggcctggcctgtgccctccccactcccaatgggagaggcccaatgcctggccctgcctcctccatgagcccagaaaagccaaaatgaggacgatccaaaaagaaagcaagagacttacaatgggagccgggttggcaggccacacgccgggaggctggaggggtgaggagagtcagaatggtggttatcgcgggcaccacagaatgggaggagatggtggcaaaactccagggaggctcttgtgctcagaaatgcctccccggacacacccacctccctcttgctcccaagcaagccttcctgagcccgtggcacccagatttttacccccaggtgcacagggctttggggttggggggtagggtatccccattggttcctcttgagagagaggaggctgggtttgatagagacctcattgctctctgtagctcccacagccaagagcattacttccagtgccatattttaccactaaggtgagaagtggtatttgttgaaggcctactgtgggctgattcctgggtttcagtgctttccaatgagggaagcagcctcagctcctgtgtccctggtgaggtaatgaggcttagaaagattaagcaacttgcccaagctcgcccaggtggaaggcatcaaatccaaagtggcagccagttctgtctgactgtatccagcacactttctatcctccccagggccagggccaaatttgggctgcgctgcaaatgttccctggggctcgaccagtcctgaagtcagcgtggcaggaggcaggtgccctgtctgtaccgtgatgagccgtaagaagactgcatagacaaagcgcccctcctcccagtccccactactggagtggccagaggaagggctgctcacctccttgtcctggatcctgccccacccagtagactgttcttgccctggctggtatcccattctccctggctgtgtgaaccacattccacattcattcactgagtgcaaatgaacaaggcacagtcccggccctctgaagcctcatgggcatagggagatgggggtggagtgacggggacagacaacgcaaacacagttacaatggggtgctttgaactggcatggcacagatacgtacagactcygtggggtcatgggggagcgtccaacaatattccaggcggggaggactcccagaggagcgacatttaggcagagcatggaagggcaattaggcgtgtgctgggggcaggctggcagaggatgcttccgggaccagggacagcatatgcaaaaacatggtggcccgagagggccttgagtgagctgcagaggctgcgtgagctttgtggtttrggggtgaggcagcgaggttgattggggtcagactgggaggaatttgtatgccctgctggggaatttgggctttatttgaagggctgggggctgtgaagatttttaagcagggagagggtgtgatcagatttgcttataagaagcacttataagaacttaagtgcttataagaaccactgtgacagtggttgggtgtggggggtggggaactggacccctgtcgtcatggtgaggaatcccggaggcctgggccatgtcggtggcttcgggcctcttggtgccttggagagacgtaaagaagggggaatgaagaattcagggagacccccaggtccccagctctgggtgcccggcagacagacagggaactcttgagtgggcaagatggggcctgtaggccctgagtggcctgctggctggggccagcctctcagaccctcggtccttcctactgtctgctcggccacccagggcctctgtgttgaactcactttttgtctgcrccccctgggcctgggtgggaaacagacagactgggagaatggcaccgtggagaaggcaggctgaacagggactgtgcrggggttctgttaaaacaaaaggcaccgggcagtgaggagaagcattaatagagccaaggagaagccgaaaggcagaggcaagggcaagagggagagaccaggcaggcagggggatgaggcaagggggttagggccatgccaagatgggatgggaaagagccaggctctggtgagcagtgcaggggtgcggtctccctccagctcttccctccccattcacccacaggggagggagtcagggaaagagggaccaaagtcagagatgaggaccaaagggcgagaagcccagatttgctgagggcctactgtgtgcttcgct

SEQ ID NO: 95416 - DNA, 23477 bp, Homo sapiens
ataatcttcaaaaatatttttccctacttaaaactttccaggctgggcacggcggctcacgcctgtaatcccaatactttgggaggccaaggcgggcggatcgcctgaggtcaagagttcgagaccaacctgaccaacatggagaaatcccatctctactaaaaatacaaaattagccaggcgtgctgtcgtatgcctttaatcccagctactcaggaggctgaggcaggagaatcgcttgaatccaggaggcgaaggttgtggtaagccgagattgcatcaccgcactccagcctgggcaacaagagcgaaactccatctcaaaaaaaaaaaaaaaaaaaaaaattcccagtggcttctcatctcacttaaaataaagtctaagtcttttgccacattcctcaagaccccatgtgtcctggtctctgcctccctatgcagcttatttctgtttcacggttacttctgctggaaatcctttacacacattaatccttctgcctgaaacactcttacctgagagtttcaggtacctgagatgtttcaagtcacagctcaaatgtcatctcctcagagaggacttccctgaccactgcctgccatgcaaagtactttttattctattacctggtcttattttcttctttgcactcatcttgttttcacatctactggctgtttaacctactagaatgtaagctctatgtgaggtgggattatatctactactttgttcactactgttacttcagggcctgaaatggaacctggggagggaagcagagaggcatgaagaaaagtgaatcttacatagcagctcagcatatctctttaacaacttctacaattgcctattctgacgaccactgactattgagtctctgtaacttgttcaagttctttcaatgctctacaaaggagaactagttaaggatataaacataaagaaaattcagaatcttaataactactttcgatgtgtcataaaattaaactacaccacaagattccaaaagataacaccaaaatattcatttgaagtaaaaacaaaaaaaaatactgagactcctctcctgtcacagaagaaaccccttctgtgtggcagctcaactcagtttttctgtttacttcagactcttttcatttcctactacagacaggtagctagactctattagtattcatgtgtgctcacaaatcaggttttagctaaaagcctaaagtgaaccacatttggtccttgggttgcatgtatgacccttattttaaagaactgagactcgtaagaatttctctgtggagcgttgttacattttactgaaattttaaactatacttgttgtgatttttaaatgtccaatcaatgaagaaataactacttctactgattcccaaaatgataaattaaaaaacattatcttattcaaacaattattcaccaacatgataatggctgctttgtgcatgaagaggggagaggaaatccttgaacatacttacctcttcaaagcccatttcaaataaacattcaacagctcctctgacaggcaagagtctagtagaaaaggctgtgtttccaatccggatggatctatatttttcatcattagggtttctgacaaaaaacaaaagtttgattatatataaaaaaaaccaggtcatagttcttcaaagactttactttcaacaaacatgacctaggtatacctttatagtcacctgattttctttcttccctaaaccaatggttgtttttactataagtaaaaacagtaaattacattctgtgctgttaaggtacattttttttttttgagatggggggggtctcgcttcagtttaagatacattctttttttttttttttttttttttttttgagagaggggtcttgctctgtttcccaagctggagtgcagtggcgtgacctcggctcactacagcctccacctcccaggttcaagcaattctcccacctcagcctcccaagtagctaggattacaggggtgcaccaccactcctggctaattttgcattttttaagtagagacagggtttcaccatgtcgaccaggctggtctcgaactctcgacctcaggtgatccacccgcctcagcctcccaaagtgctggggattacaggcgtgagccaccgcacctggcccaagacatattcttgacacagacagtatggcaataaaaggaagacataaatttcttttaccataattaagattttgaatagtacacttgggacaagtaaccagcacatgaaaagttttggtttgagatttttaattactttgataaatcagaattgtttaaaaaaaattaaaagaatgtaaggttaagctaatcatagtattatattcaaaagaccctcagaacatagtttaggatgataagtttcatacctgacaccaactgccttaaagtgatagtgacttctttaagtactatgttaaggaggattctgaggcagtatctgggatccataggaagatgtacttccataagaagccacctgccctggggtatgatatggtgagtaggcaaatgctagcaaatgacttatcaactttgtcctatctacacatgttctctaggtattctgacgtaaaaacaaaaccaaaaaccaaatattttaattttataagttttaacaaattttgcatttgtttttcaccagtcaattgcctattggccaaagtgtcataaatactaaatgaatgtttttaaacttttccctaatttcaaaaatcatgtttattacagaatattcagagacaaatgctctattttttttgctattcaaaatgtccacagattggtgctaatctacaaattatttgttacccatacacaagtagtacagaaattttttctttgtttgtttacaagtgcataaaaatgaagcaagaagtagagaaattgaatgttcggtatacagcaatttgatattgccatgaaattttcagtgtattttacaaaagttataggtccataagggattggaaattaaaacaaaaacattgttctttactatatgtaatttgagaatcacagatggttgtgaaatacaaagaaaattttattctcaactctttattctgtgtattagattagggtttctcagtctcagcaccattaacatgtggggccttttctcagtggagtttccttgtgcactgcagaacattcgcattcctggcttccatgctacactgtctcacaagtgagcctctctttcttatcacttaagaaaactgaactataaaataatcctacatttatcaaagctagttttcgataaatggggcatcttttcctgacactcaatgtatttcacagggtgataaacatgtcagtaccaccaggatgatatatcctactggttcaaaactgcttgagctattttaatctattcttttcctcacagctttcagatctctacatgctgggtctttctctgggctaattttctagtttcttcctgctttcacaattgtttaaaaattcttataaaatacacatcagttctcatatagtttttgttttgttttttaaaaaacaaagtgttgctctgtcaccccggctagagtgcaatgacgccatcaaagctcattgctgcttagaactcctgggctcaacaatcctctgcctcagcctctgaagtagctaggactacaggtgagccaccacgcctggctattttttttttttattaagagatggggtctcactgtgttgccccggctgcaatccttctacctggggtgtcctaaagccctggtactacaggttggagccacttcgactggcctttgttattttgatatatgttgttaccatttaactattgatatacaatatagattttcctctttagtttctagtgagcattttttttttcttttttgagaaaggtctcacttcgccatcaaagctagaatgcagtggcatgattatgggctcaagccatcctcccacctctgccctccaagtagctgggactacaggtgtctgccaccacgcttggctaattttttaatttttttgtagagacggggtttagccatgttgcccaggctggtctcaaactcctaagctcaagcaatccgcccaccttggcctcccacagtgctggggttacaggtgtgagccaccgtgcccagtgagcaattttatttttatatcatctctggacctcacattaatctatttttctcagtaaaagtatactgcaaacaggctccagcaatgacagtcacatccagttcctcaaattctttttcttattaagtatgttgagtaaactgaccgtggttttgtgtatagactgataccaaaggcctgaccctaaagccctcaaagacttagagggctgtagggacattagacttcaaacccatcatatcctctttcctatccttggaaaagcaacgcacaaagactttcttaaactcttaatttctcagcattattccagtgtgtccactatcctttgcgctcattgtcacacccctcatctttcagaatcttgaagctgtgaggcggaggttgcagtgagtcaagatcgcgccactgcactccagcctcatcaacaagagcaaactccgtctcaaaaacgaaaatcagcaacgagccattagtaaacattcataatgaagattatgatgctaaatgtcattatttgcatgcaaaggtttccccctcatactaaacctcagcattttgggtttcactagatttaaagcagaagtgaggcttcattacaaggccacctctcttttctgactagtggggttttaaatagcctggtggctttccaggtggtaagtctcagctaatgggctctggagaacccagcctatcagttcatttatggagtcccttggcatccttgtactgtgaagagctgtaaggcctcaaagagtaaaaaaggtgagttgagaaggtgtcacagagcacgaaggtggtccccacacaggtcacaattatgtagctgtgaacaggccacatgttgcatctttcatagcatctgccacaaaataagggctcaatatattttcccttcaatttactttaaaaatcattaccattgcctaaatgaaatattactgacatggattttaaaaactgcacatgtaactaatgtctaaaattgggtcacgtgaaacctataaccttgaaactgagaatttccttttagacttcatgacaatataccaaacacttaatgcaccaggggctgaggggaacagagaacctaattaatcacggtgacctgataaatgaggtaacacccctaaagcaagtggctctcctttaacctcagttccatttccctacccccccacaccatgtcccttcagatcatttgatctgaagagttgaggtgggtacttattcaaaatgaataatcaaacttgcctcccaattcccaaaatctgcaaggtcccttagacctctagaagtgcaattttgctgacaggagaatgaaggaaattactctcatccaaggcgattacctccacgaattcttaaagggttatgttacatagtagaatccaggtattaatataaaaactgtaacttcaaaatactataatgtttcaatcaacaaaagtgggcagaaaaaaaattaaaaattttaaaacccaccacttcagaagcattatgctttagtactcggatagtctcaacatgggaagaaaacatcactttgtcagtgagtaacttctgataagtatgtggaaatgtaagccactccgctcgaaaaatgcacgcagggggaatgacacgcgcggtgcggttaccgttgtgtcccgatatctgaggccgttaaacgacgagaagagcggcagtgtctgaagcacgccttcctacctctcctccgcccggccccgcttccgggactccagttcacccgcagcaccctgactgcaggtgccaagtcacaactgcaaagaaacttccttttctcgagcgggggtgggacttggccgggtcccgaggcccctggccggcgggctcggacgttaggagcagaacyagctccaggtcccggtctgtccgggcgtcgctgccctctgaagctcaggccggacgccccagtccctggccgaacaaggtgccgcggcccacccaccccggtacccgccgtccgaccccgttgccctgcacctgaggatgttgtcagcataggtgagcagcagcttggaggcctccaaaaaggtctccggggtgttctggcagagctcagccacggccggggacgccgagcctgaggagctgcccaatgccgccgccgccatgcttgagygccagcgggcgccgccgccgcccctcgctctccgcgtcccacactgagcaggcgcctcagcgcgcagcagctaccgcagccaccggcaggggcggggtcctcggccggcaggggcggggtcctcggccggcaggggcggggtcctcggccggcaggggcggggtcctcggccggcaggggcggggtcttcggccggcaggggcggggtcgggggcctggggcggggtcggggaccggggccaggagcgggggagctcggctgggagctacggctgccccttcgcggggggcaaggggctgttcggaagaaggtggggggcctcggccggcaggggcgaggtgcttcgacccagagttggggcctggtcgtacaggttgggaaggggttccgcagggagaggcggggcctgggctccggggctgaggggtgtgggcctggaggagggggatgtcgagtcctttaggacggaggagctcggctggaggggaggccggctttggtctagaggtatcgggcgaatggtgctggcacgtgcctctcagaaacccggatccctttgcgctccggggccagcctaattgatccagctattaaggtggagaaaccgcatgtacctccctcctttccccacaaataaaaccaccttagagccttctcttcgcagattgtcaggacgttctacatagatgtggatgaaagactacagaaggaaggagcaacaaacgtcaaaaacaaaaccatggctataaactctgctgggtttgttatatggattcttttcagaatttggctaatgactgaaaatctaagttccagctcaactagtatatgattcctctgtaaggaagtgtatttttaaaccataggttgcgacataataatgggttgtggattcggtttaccgcgtggtgaccagcgtaaaacacatgcataataattacgcaatattatagaatgtcgggggcgggaagggaataaaaatttgcatcccacacagtaagggtaagtaatattttgtgacttgttttttaggtagatcatgtgatcaaggtcttttattcctcttagaagatgcatcccttactactttaatccagtctcttccccaccatgttcttgaaagtgtactttaccagtggcttccttctttgcagaaattccttttcaacctcacgaagtatttttcttgactttatttcttaagataagtgatttgcctgaataacctcttttaaatttcttgatgtttcatctgtttacttttaagaattgaaattttcttccagaatctccgaacaagaccctaagctatgacatccagttcaatgactattcgtctcccaaatatacgtacgcttttaataaatatgtaaatctttggaccaccttccaagtatggtgtgttcaacagatagtagtatgttactaccgtctgtaactaaaattttcaggggcttaacacaagagtaatttctttctggctcatataacactttaataatgcaggtgtcataatgtcagtggacccagtctccttccataccttagaacaggggtcaagaaacattttctgtaaagggccacatagtgttttaggctttgtgagccataaggtctgtctcaactatttaactctgcctctgcagytgttgctccacagacaatacttgaaaataaatgggcatggttatgttctagtgaaattttatttacaaatccaggcagcctgcttggacaaaaaaaaaaaaaaaaaaaaaaaagtcacacctacttttaaccacatgagcccagaaatgacacacagcattttctctaccatatcattactaagaatgaggcctcatcaagataaaagggggtatttcagtaaggccagatttacaaaaaataaaaaaaaaatttaaaaacacataaaaagataaaaggggagagtctgggaaatgtagtctcgtccaactacacaatggattgggggcttgggtctggagatatagctatcacaaactttattcctcttaatttgggtttctttttccattgatacatttatttatcctttactaattatatgagaatagtatatattatacagtacttgtaacttttaaaaatgcaacagaacttttttttttttttcaaataaaattttaggggctggacatggtggctcacgcctgtaatcccaatactttgggaggccgaggtaggtggatcgcttgagcccaggagttcaagaccagcctgggcaacatggcaagaccccatctctacaaaaaaaaacaaaaacaaaaacataggaagattgtctatatacaaaacaccaaagtggaaatgctctggtattgaagcagaggtgtcaagtgaagggcagaaagctgtcagctaaggctttcccctgacagatagaatggtcatagggtacttttgtgggggaacaaaatgacttttgtttttctcttcataatagtttgtttcctcaactaaaacgctatctcactgtaagttatcattagttttgtcttccctatttgattaaaagtctcttgtgccatctgtctcagactgctttgcacacagcaggtactgaatagagttgttggttaatcactcaatgtagtcacacaatagtgaatcactatacaaattcctgaaagacttcaactcctccccttgctaatggtttttatggaggttaactttttaatatcaccaaaccaatcgtggggaaaatttacagagttctttcttttttgttttattaaagaatagtgttagccaggcgtgttagtgcacacctggagtcccagctacttgggaggctgagaggcaggagaatcgcttgaacccaggaggcagaggttgcagtgagctgaggttgccctactgcactccagcctgggtgacagagcgggactctacctcaaaaaaaaaaaagaatagcgccatgatatgtcaactctaaaaatgatgtttttaataaaggtgaaatcctggggaaaaaaaaaatctttattttggaacaaaaataaataaataaaagaacaagaatttcaatgctgatttagtacccattctttggttgtttgaaacaacgatgggtataaaagttagggtagcttattcagcttttctaaaggaaatggaagaattagaatatctccaacttgactgaagtgggggaagcagccaggaaaatgagagaccaagtccctttatataatggattcccttaatagctttataaatggcaatattcaaaagagattacagttactcaagaactttaacagaagtgttgctaaagagttatttggaaggacttaaatttcagatgatttttttaaaatggtgatttccatgattttatggactgtacattgttatcacaatattaatgctatggcattggttttcgcaaaagtcatttggtgagaaatgcacaaaaagtgcatgtgtactatcaaatgtaaggataaatgttgatttattcattccataattcattcattcatcatgtatttatgaagtgactactagttgctcagcactgtgaaggagacaagtatggtccctactttcatagaagtcataagtttagagcagtggttggacaagcaacagcagcatcagcaggaaacttgtcagaaaaacaaattctgaagctccacatttaaaggtgggacccagcaatctgtgtggtaacaagcccttcaggtgattttgattaacagtaaactttgagaactactagtttagagggaggaaaatttcactgtgggctgcagtttcagtgaggggggacaacttgaacagaagccttaaattgagaggttgagaaggtgagaaaggagaggacttgctacctgtgagagactccccaccctccttaaatcatgtacaatatcctagtaacgtttccttctcaacatctcctggatctctccttgccattgccttcagagcctcgtgtttcatccattcttaactttcttccctgtgtccatttccacatccttccaacccaccctgctcatttgtgcaatagtgatctttytaaagcacccatctgatcatgttgttctcctggtaaaaagttttctatggctccctctatccacattctaaagtcaaatggtgtcaggaaccaggctggtaagttaaatattttaagtggctttgttcaagacaaagaggagtaagagagactccagtgaagggaatgagagagtttaccatgtcctttctagaggagtttagaatcaataaaagaatgttgcactccaaattataccatgaaggctagcatatggtctctgaactacgggattaaatccaaagtcctcagtatgataccccaggcttttgtgatctgggccctgccttactctcatgcgtttactgttgctttgtcccacacttcaaatttgacatgggccacatatttagctgtttgtggaagataccatgacacttcatttctccaggcctttgttctcctcctgccaggatgccctttcccacccaatttactagacaaacattcatttccaagatgcagttcaaggatcatttctctgaagccttttctgactttacgaggtagcacagacctcattgtcccttttgtgttataataattccactatagcacctgtttcaacagtttgcacttacttgtttctatgggtgtctccctttactagaccataaacttcttgaaagcaagagccatacctctactcatttttgcattcaaacttcaagcattgataggaagaaaatgagtggttgttgaaaatagcaaaagcacagagatgagaaaagttagggtcaatcaagacatgtatagtgagaaaatcagtttgctgggtggcaagctcatttaatagagaatgggagccataattggaaagatagttttgaatcagattacaaagaatttaaggcaaacctaggaagtcttaataggagggtaggataagcagagcccatttgaagattttggtgcaagaagacacgatggaattgtagcaggaaatatggtaccaaatatgtaaagccattaaatatcataaaatttcccacccttttccagatcaaagaaaaggtgataagaggtagatacaaaaatgatggtctttttatttttctgaaagattttgtcacctcttagccaagaygattttgtgatattacaaaagaaatagcacattaaaactgtatgtttcwtatgagttcagcttcagagaaaatattgtaggtattttcacactattattttaaagacagcaatgaaaagagatcaagtttaggtacttactcatcaagtgttactttataaccacatgtgtttgttttaattcttcaagaaactctactttgtcactgaatgaggatcaactagaggtgactggttaggcctgggacgaaggtcaaactgagctttgctgaattattttaaacaaaatagatttccaaactcatttaaatccaggaccaacctggaaagctaagcttgactcacattcttctgtaggggtaggaaagaatgcagagcactctacttggaaacaatggcttcaagaggcattgcccagaaaaaaccataaatatgactagaaggtccagatgaagattctatgctcaaccatttttctaaagaagagcaaggacaaaactcacgcctgggatagcatgtgaaaaacagatgttcgatgaataccatcttgtcgacttcttgcttttttacattttcatgttatattttccctttatcggtttgcagtcagctctaagcaaacagttaatgaatttttcacacttagaaacaaatgtctccattgtgacaatggagacaatttttgagcactgtctcaaatctggtgataatttttttttaagtgaaaggaagtttattaggaaagtaaaggaacaaagaatgactactccataggcagaacagcctggtgacaacttttaaaaagtaaaaactttattacaaaaacatttgtttattgtagaaaagctttattaaataaagctaagcaaaaataaggagggaaagatcacaatcagtatacatcttgcagacctttaaagaattatttttgaaaaaacggatatatactgttttgtaactatgtctcctaacaaatagtcgcaacatctcattaataaatattcacctgcagaattattttaaacggctgcatggcatttggatgtaccacaagatacacaacaaatttcctgatgttggccattttggttaattccactttactcacaattactaataacgttgcgagctatagcaataactttgaaactgcagagaatttccttaattctttcttacaattccagtagaatacgatggtgtcccttctccgacaaaagggaatatttgggcattatcactgccaaagaaaaatgcctttttgatgggtgaaaatgctacctcatcgcgttattggcaggtcctcgattatcggcgagtcactgaggttccgagaggggcgtctctgctcacgcaaacagctacccagccgcctcccacggtctgacctcagccaaggtgacgcggcttaaagtcaaccggcggaaagagagtcgaacgggacgcgtgcgtgggaaagcgcatgagcgtacgtgcgagcgcgcatgagcgtacgtgcgtgtgcgcgtgcgctcgagagcgtcatcgcccccgactgtggagaagtgtccggggtagccccgttacaggtatcgctggctaccctcctccttcgcccctcctttcctcctttacattcaaatcaagtcggggttgaatttcgagaggggagtccgaggacctggggcctgatttctttttctctcgccatgcttcttcgggctgtgtacatgtgtggtggtgcctgagaggcgatacagggaatggctacactcttttactcccgcccctggccttcgtagtacccttgaagtgatccactagtcgtaacccctccttccaccaatgattcaattggagaagtttagaggagtggaaagacttgtccccttcccccatcgcaagcttggtcacagagtgtattgccaacccatgtatccagacgctcagtctagggctcttggccctgggtagcgttttgaaaaggctggttatccttaagtactgaagattgataaagcccacttacttacttaaaagaatatgccctgaaatgtgttttctgtgccactgacaccagaaatgctatttagaagaagttatcagtaatcctgacaaaggatgcttcctgcagctcaaatcaggctggaggtgcctttatatttttcattgaattactgttttggtgactcgaatgaatcatcaattcatttatttgtcttcaaatgtctgacggcacttaaggtctaaaaaagaaggtaagtttaaacagatagtttgatgttaaggtataaattgaaagtatgtaacattttccctgtgttcattagcagctcatatcaagcacccaaaggaacaccttggatgtttttccttaggcccttaagctatttaaaagaatacctcctaggtgtgttgtggtcttttacaggaatgtgtttctgatcatctgaatcttaatcatgtccaactgcctgcaaaatttcctgaaaattacaagcactcgtcttctatgttcaagattatgccaacagttaagaagtaaaaggaagtttttcggaactgtgccaatatccagattgcataggcgagttgtcattacaggcattggcttagtgactcctcttggtgttggaactcacctggtttgggatcgtcttatcggaggagagagtggaattgtttcactggttggtgaagagtataagagtatcccttgcagtgttgctgcttatgtgccaagaggtagtgatgaaggtcagttcaatgaacaaaactttgtgtccaaatcagatatcaagtccatgtcttctcccaccatcatggccattggggctgcagaattagccatgaaggattctggctggcatcctcagtcagaagctgatcaagtggctactggtgttgcaattggcatgggaatgattcctcttgaagttgtttctgaaactgctttgaattttcagacaaaaggttacaataaagttagcccattttttgtccctaagattctggtcaatatggcagcaggccaggtcagcattcgatataaactcaagggcccaaatcatgcagtatccacagcctgtaccacaggagctcatgctgtgggagactcatttagatttatagcccatggtgatgctgatgtgatggtggctggaggtacagattcttgyattagccctttatctcttgctgggttttccagagcccgggctctgagcacaaactcagatcccaagttggcatgtcgaccatttcatccaaagagagatggttttgtaatgggagaaggtgcagctgtgctggtgctggaagaatatgaacatgctgttcaaagaagagcccggatctatgcagaagttttgggctatggactytcaggtgatgctggtcacataactgcccctgatcctgaaggagaaggtgccttaaggtaaagatgggttatttccttcgaaatatttcttcaaataagacactttattgggaatcccaaattagggaagttgtagtgtctggccttggtgtacagtatctctgttgtttttcttttttagactaaacaagattgtttagttctttgcttaagacatttgaagtatttcaaagcatttgaacatacttacaaaaattgcatttgagttaaaaaccaatggagttgtggaaaagaccatgtgtgtctttgccaacttttcacgcctgcatttgtgcttaagcatcagtgtgctccctcacaaagtcctcctctttgacccttcatcagacttggaaagtaaagtcaacccttctagatgtgtctggttttgctccatttcaacaggattctgttcttttcaaatcagcacttctcaaactataatcacctagggatcttatttaaaatgctaattctgattctgtaggtctagggtggtgcttgagattctgttttgttttgtttttttagagacagggtctctctgtattgcccatgctggtcttatctcactgcagtctctaactcctgggctcaagcaatcctctcacctcagcttcctgagtagctgggactacaggaatgcgccactgagaccagttttcttttttttgaatttgtttgtagagatggggtttcrctttatttcccaggctgagagattctgtagttctaacaggtgatggtgatactgctggtttaaggactacatttaagttaactgttatagattagtgcatttaaaatgcaaaaaaataaaaataaaaagtccctgataatgtgttaatagatagctaatagtttagctttcttaaatcatattatgttttactcasttaaattagccagagttagcaaccttttctgtaatrggaaaaatatagtaaatatttttggctttgtgggccatggagtctgttgcaactaatcaactctgccattgtcatgtgaaagcagccgtagacagtatgtaaatgtgtgggcatgaatgtgttccaatgaaactatttacaaaaataggcatctagccagggccatagtttacctacccctaaattatacatttgaattttattttatttgtttttgtttgtttgtttttcttttttctttcttttttttttttttartagagttggggtcttgctatgttgccagagcaagagctggtctcaaactcctggcctcaagcagtcctcctgccttggcctcccaaagtgctgggattacaggtgtgagctaccatgcctggcctacttttgaattttagtgagtagttgctggtggtaaaaatgtcaagcatagtaacaaaatagatgaagaaatggttatgttcacaggaaacctttcagcatacttcaaattatactctgagctggctgttaagaaatatatatacacacacaaacacacatacatacatgtatatttctcttaggaactaaaggaagatgacatccaaaacgttttcagaggtccttttagatataatttttactcttaagtttgtttggcttagcttgcctttgtactttttgtttagaattcttatagcctaaataaagaggattttgaaagattatttgaaacaatgaaacagtagattattgggaagtatgccaagttttgaatttaaatgtgaaagaaaaatcataattataattctcataaaaaattgccacactccaaaaatccctagaacaaaaattattctagtcttgagtcaacatggtattttttccccaaggaaaactgccaatgcaaataaatgaaattatgttttatttgagattatacaatcttgcattggcttgtgtgtttaactcttggtgatgaaccagtccaaggtagtgagtgtgactcattattcccatacagatggcatcctaactcacatggtaatccaagatagtgttccgttactagagcaagggattcttttcatccagtgtacttggatacctacatttgtttcacataagccatacagataaagagacttttgttaaaattaaacttagtcctgataaatgtcttttcttgttttattaggtgtatggctgctgctttaaaagatgcaggtgtgcagcctgaggagatatcctatatcaatgcacatgctacttccacaccattgggagatgctgctgaaaacaaagctatcaaacatctcttcaaagaccatgcatatgcccttgcagtttcctcaactaagggagcaacaggacatctgctgggagctgcaggggcagtcgaggcagcttttaccacattagcttgttattatcaaaaactaccacctactttaaacctggattgttcggaaccagaatttgatctcaactatgttccactaaaggcacaggaatggaaaactgagaaaagatttattggcctcaccaattcctttggttttggtggtactaatgcaacactttgtattgctggactryagaacatataatttgtaattaaatactgatttttaaatgytatatgtgaagaaattatgcatttatgtattgatacccagatatactttatgttagggtttctccaccttggcactattaatatttgggtaagataattctttgttgggaaaagggggattgtactgtacattgttgggtgtttaacaccatcctgattgcttcctaatctattccaatagcactctcttccccagttgtgacaaccaaaagtgtttccagatattgccaaatgttttckggggaacaaaataaccccacccctcctgcatcccgccacctatgagaaccatggatctatattttcctaatactttaggtcaaacaattttctataacatttgacctgctcctatccctttcaactcctttttgctaggcagggttgctatactatagtactccaggcgtaccattcccatacaatatataggaaggaatataacaaagtttgcatcagcattctttgagttaaactgtcagccagtaatgatctatttactccttatacacctagccctgttttcttcatattatccatactgtaattcagtataatgaaatttctctaaactcccaagccatcagttctctgaaagaagaaactgaaattgatttgacatgtcttattctttttgtctttatgttggcacctagtgattaacggagataaaaatctttgggacgtggagcagaaattgttcatgactygggccacgtccccttggctttcctctaactttttttaagctttgctagtttcctgtgttttcccaacatcctactataagtgttggtggttcctctacttctctgccttgttttctctaacacggagtgttcatccgccgcagcctggaagtgttggtagggggaagggaacacattccccagaggcaatactcgaccaatgagggatgacggtggctaagtgcctcagcctcctttcagaagggtatctatggttctccacagtttttcagagggtccccagtgaatcggaagtttagttacccacagcattagctagctctaatactcccttcactggcttttattttccctttcccatgctccctgattgttaatctcattcccaggaatcacctcccaaacaaactgcttgttctgaggttctgctttctgggcaactcaaactaagaacgtttatgttgtagtgggggtttatatatcaacgggatagagtgaataggggataaacagggtgtgtgtatttctgctgaaatgaatagagtttcccacattgcaatagactggacacattgcctgcccactgactttgactatagtactttatcccctttatgccaaagactccagctgtgtcttcacataactataatcagttttaattttcatgagcacacatttattcattcaactgaagtctgttgggtgctaacatagacctggctttgtactggtcaccagtgatgaagagagtatgtcagagaaagtttcctaaaggaagctgaggctgtaagggtgaacaggtcttagccaggttgaaggagaagataaagaaggaagggtgttccagtcagggaattcaatgcgggaaggtttagaagtcagaacatttgtactaaacataggtgcatataccctaagatggattaggaaataatggcaaaaaatctggaaaggtaggtcacaaataactacaagttttgttcaaggcagtaagggtaataggaagccatttaaggtttgggatggtgtgatggctttgtaatgtgtcagtttggcgaggctgaactacatttcacagcattccctttattgtatgttctcggttagggtgggccataggaaattcttgtgggagatttggaggatggaagtgaagcagcagctgttttgtagctcatgcatgttgcttaatctgctagctcatcttggtgtgagactggctgagtcttcaactgcttcacctttccctggatcctctgtcagtttccctgactcctggaccaggtgtgtgtttcgttccatgataatgaaggacctgaccttctgccccataccaccaaagtcagaggccataagaactgacagattcctttctgtcactttgtttgtggattccatcttgttactggaatttacatccatcttcccttcccaactgcctgccctgtggacttcaaactccatcatcagaagatgacaggcgaacatagctgcattacagaaactttaaccagttctcacaattgtgtaactggttacacaaactgtcaaatccctatagcagatatctatatatgtcttagtggttctatttctctgagtcaacattgactgatacatgtgaagaagaagggtttattgggggtgacataatcatattttcttttggaaacatcaccctggctgcagagtgaagaacagcttggagggaagcttgattcccataagggaatacaatcagacggtattgcaaaatgtaggtaagaaaagatggtggcctggatgaagaagaatattttgacccaagtttcttccaaaattgaaaatcatgtgtttttaaaaaatcaactttaccagggcataatttatatatcaaatacatttatatgccattttaagtgtacaggtcaattaattttgatataagtatgcacacacatggaaccaccacctcaatcaaagaacatttctgataccccaaaattccttttgcccttttgcagtcagtgcccccagctccagaaaatcactgaagagctttctgttactataggtaagatgtacttttctagaattttaaataagtggagtcatacagaatataacctttcgtgcctgccttcttataatgtttttgaggtttatccatgttattgattgtgtcagtaattcatttctcttttattgctgaattttaaaaattatctcttttttttttttgagatgacgtttcgctctgctgcccaggctggagcgcaatgacgcgatctcagctcactgcaacctctgtctcccaggttcaagcaattctcctgccttagcctcccgagtagctaggattacaggcacctgccagcacacccggctaatttttgtatatttagtagagatgggttttcaccatgttgaccaggctggtcgcaaactcctgacttcaggtgatccacccgcctcagcctcccaaagtgctgggattacagacgtgagccaccacgcccggccctaaaaattctttaatcagtatagatacccttgacttttactctttccttagtccctacttagcttattttttaactttttactgtcactgttttttaaaaaaatgaatatgtattgccttttaaacagaaaaaagacaggatttttttaaaaattatagaaccaagatagtttctaaagcaaagaattcttccgccccgaatcacaaatgtacaagggtttaacaaaggacctacacacacgcgcacacacacttttatatatattatttagattaccagaaatactgctagaaattttagaatttcctgtggtttagtgccatgagtatatgatgagttttggatccaaatatcctaaccttatccccagggtctttatatttaaggaagaaataaaacaagataaaattaataatagttgattcatatgtttgttcaggtcttcagaagcagacatcaaaacagaaatttctatgcaagaaatttgttgtgaaggatagagggtgagagcaggagaatgcagagagagccttccttcccacaactaggaaggagaggggcacaggaatgaaagaggattgggtaggaagggtgtcaatctgaagtaccattctaataaagttttggccaggctgatgggcagtttgcaatcaaaatctcttgttaaaggagttccacatctctccaggatgggcctgcattaggacccatactgcgcgtggtcattggctgtgagctgtccaggcacagcaggagatctgaactgtccatttttcatgccattgtaatctaccccttgcaccacagacatctgtttctccaagcaggttcatgggacagctctttcatggttcctgtgggcctctctttctgaggaaaaatttagatgagggtagttagtaggataaataatagcctctgaggctgcagttggtctcaggtccacaaatgctattcctcctctctctaatccactattcattctaaattccccttgccctcagctatcatctcgtcagaccttggtggctgggtggtataacccaaaccttcagtcctcaggaatgtaagcccttggcaatcataccatcaccttttcatacagtggctgctgcctgtatcatagagcactgggatcaggaggcaaggaaatgccaggagatacccacgtagatcacctagattccacatatattctccctgtcctaattgtgtgaacacaacactaccttctccagcggattagggtcaactctcactgttagtatgttgactttatggttcctgggcacaagaactccaaagtgtcctagtggcatctacatcttgttgttcaatgtaatacttgtgtctcctggcaagagtgcgtatcctttggagatcaggacttccaacttaaataatttgtttacttagcttaaataaaatcttatttagttgcagtaatacatctctgcaatgcccagaattgcaaaatagaaagtatgaaattcctcattgtgactgaatcactggaaataacagtaagtggggccattcatgttttccaactccctttgtttctgaacctacatgttcttcttattgcagacttagccccatataaaagtttttgatgtaagcatgtgctgcatcttgaggatggcaccacatccagtcagaattgtcactgagctgttgattcgggtatgcctttagaaggcagttccagcttctttgaggctggctgcttttggatgacatgatatgtgatacaaactatggaaccgtggtcatagggccatcttatttgctgtacaataggtccccctgctcagatgctatgtcataagggattccatgccggtggattatttattccataagcttgcagatagtggtgctggctgaggctctgtgggtaggaaaggcaaacccacatctgaaataggtatctatctatacctatgaagatgaaccacaggtacttttgaggtaggttggacactcagaggcaacagtagggagatatcttggtaagtggaagtccatattttgagcccacaggtagccttcgtttctgccactgtaacctcttgattcacaggcctttcatgtaagttatatggcagccaatgacaaaggctggctactgtcaattggcaaattcattttgtctacttggctatttagtccctctactgtgatggatactttctggtaggtataattgtgtgatgcagaaatctttatccttcatcatctgtatgtccatccacatgcctctactaaagatactgttctgctctttcagaccttttccttctagacccctgactaaaggccaggcctttggacactacccaggaatttttatatattcttacttcttgggccacttctactgtatgaagtgagtaaccagatgaagctctgcctattgagaagatttttccttcccaacatctttcaaggctacccctgaatgtggctgtgatgcagctgccattcattttctacttgaactactgcaagacatctttaggaggtagaatcaacaggatttggtaattgataccttcaccttccccacctaattccttgcttcttaatcttccctattctccgtccccacctagacaaattccaccagagaagggatttttgctatttctttcactgccatagttcctgtgtctagaacagtacctggcacgaacttggtctcaacaaacatttgatgagtgaacaatgaatgaatctcagtaaactgctccaccaaccacgtagagctcagatcacaagactagtaagaatcatcct

SEQ ID NO: 95417 - DNA, 76895 bp, Homo sapiens
cccatcaaaaaggcatttttctttggcagtgataatgcccaaatattcccttttgtcggagaagggacaccatcgtattctactggaattgtaagaaagaattaaggaaattctctgcagtttcaaagttattgctatagctcgcaacgttattagtaattgtgagtaaagtggaattaaccaaaatggccaacatcaggaaatttgttgtgtatcttgtggtacatccaaatgccatgcagccgtttaaaataattctgcaggtgaatatttattaatgagatgttgcgactatttgttaggagacatagttacaaaacagtatatatccgttttttcaaaaataattctttaaaggtctgcaagatgtatactgattgtgatctttccctccttatttttgcttagctttatttaataaagcttttctacaataaacaaatgtttttgtaataaagtttttactttttaaaagttgtcaccaggctgttctgcctatggagtagtcattctttgttcctttactttcctaataaacttcctttcacttaaaaaaaaattatcaccagatttgagacagtgctcaaaaattgtctccattgtcacaatggagacatttgtttctaagtgtgaaaaattcattaactgtttgcttagagctgactgcaaaccgataaagggaaaatataacatgaaaatgtaaaaaagcaagaagtcgacaagatggtattcatcgaacatctgtttttcacatgctatcccaggcgtgagttttgtccttgctcttctttagaaaaatggttgagcatagaatcttcatctggaccttctagtcatatttatggttttttctgggcaatgcctcttgaagccattgtttccaagtagagtgctctgcattctttcctacccctacagaagaatgtgagtcaagcttagctttccaggttggtcctggatttaaatgagtttggaaatctattttgtttaaaataattcagcaaagctcagtttgaccttcgtcccaggcctaaccagtcacctctagttgatcctcattcagtgacaaagtagagtttcttgaagaattaaaacaaacacatgtggttataaagtaacacttgatgagtaagtacctaaacttgatctcttttcattgctgtctttaaaataatagtgtgaaaatacctacaatattttctctgaagctgaactcatatgaaacatacagttttaatgtgctatttcttttgtaatatcacaaaatcgtcttggctaagaggtgacaaaatctttcagaaaaataaaaagaccatcatttttgtatctacctcttatcaccttttctttgatctggaaaagggtgggaaattttatgatatttaatggctttacatatttggtaccatatttcctgctacaattccatcgtgtcttcttgcaccaaaatcttcaaatgggctctgcttatcctaccctcctattaagacttcctaggtttgccttaaattctttgtaatctgattcaaaactatctttccaattatggctcccattctctattaaatgagcttgccacccagcaaactgattttctcactatacatgtcttgattgaccctaacttttctcatctctgtgcttttgctattttcaacaaccactcattttcttcctatcaatgcttgaagtttgaatgcaaaaatgagtagaggtatggctcttgctttcaagaagtttatggtctagtaaagggagacacccatagaaacaagtaagtgcaaactgttgaaacaggtgctatagtggaattattataacacaaaagggacaatgaggtctgtgctacctcgtaaagtcagaaaaggcttcagagaaatgatccttgaactgcatcttggaaatgaatgtttgtctagtaaattgggtgggaaagggcatcctggcaggaggagaacaaaggcctggagaaatgaagtgtcatggtatcttccacaaacagctaaatatgtggcccatgtcaaatttgaagtgtgggacaaagcaacagtaaacgcatgagagtaaggcagggcccagatcacaaaagcctggggtatcatactgaggactttggatttaatcccgtagttcagagaccatatgctagccttcatggtataatttggagtgcaacattcttttattgattctaaactcctctagaaaggacatggtaaactctctcattcccttcactggagtctctcttactcctctttgtcttgaacaaagccacttaaaatatttaacttaccagcctggttcctgacaccatttgactttagaatgtggatagagggagccatagaaaactttttaccaggagaacaacatgatcagatgggtgctttagaaagatcactattgcacaaatgagcagggtgggttggaaggatgtggaaatggacacagggaagaaagttaagaatggatgaaacacgaggctctgaaggcaatggcaaggagagatccaggagatgttgagaaggaaacgttactaggatattgtacatgatttaaggagggtggggagtctctcacaggtagcaagtcctctcctttctcaccttctcaacctctcaatttaaggcttctgttcaagttgtcccccctcactgaaactgcagcccacagtgaaattttcctccctctaaactagtagttctcaaagtttactgttaatcaaaatcacctgaagggcttgttaccacacagattgctgggtcccacctttaaatgtggagcttcagaatttgtttttctgacaagtttcctgctgatgctgctgttgcttgtccaaccactgctctaaacttatgacttctatgaaagtagggaccatacttgtctccttcacagtgctgagcaactagtagtcacttcataaatacatgatgaatgaatgaattatggaatgaataaatcaacatttatccttacatttgatagtacacatgcactttttgtgcatttctcaccaaatgacttttgcgaaaaccaatgccatagcattaatattgtgataacaatgtacagtccataaaatcatggaaatcaccattttaaaaaaatcatctgaaatttaagtccttccaaataactctttagcaacacttctgttaaagttcttgagtaactgtaatctcttttgaatattgccatttataaagctattaagggaatccattatataaagggacttggtctctcattttcctggctgcttcccccacttcagtcaagttggagatattctaattcttccatttcctttagaaaagctgaataagctaccctaacttttatacccatcgttgtttcaaacaaccaaagaatgggtactaaatcagcattgaaattcttgttcttttatttatttatttttgttccaaaataaagattttttttttccccaggatttcacctttattaaaaacatcatttttagagttgacatatcatggcgctattcttttttttttttgaggtagagtcccgctctgtcacccaggctggagtgcagtagggcaacctcagctcactgcaacctctgcctcctgggttcaagcgattctcctgcctctcagcctcccaagtagctgggactccaggtgtgcactaacacgcctggctaacactattctttaataaaacaaaaaagaaagaactctgtaaattttccccacgattggtttggtgatattaaaaagttaacctccataaaaaccattagcaaggggaggagttgaagtctttcaggaatttgtatagtgattcactattgtgtgactacattgagtgattaaccaacaactctattcagtacctgctgtgtgcaaagcagtctgagacagatggcacaagagacttttaatcaaatagggaagacaaaactaatgataacttacagtgagatagcgttttagttgaggaaacaaactattatgaagagaaaaacaaaagtcattttgttcccccacaaaagtaccctatgaccattctatctgtcaggggaaagccttagctgacagctttctgcccttcacttgacacctctgcttcaataccagagcatttccactttggtgttttgtatatagacaatcttcctatgtttttgtttttgtttttttttgtagagatggggtcttgccatgttgcccaggctggtcttgaactcctgggctcaagcgatccacctacctcggcctcccaaagtattgggattacaggcgtgagccaccatgtccagcccctaaaattttatttgaaaaaaaaaaaaaagttctgttgcatttttaaaagttacaagtactgtataatatatactattctcatataattagtaaaggataaataaatgtatcaatggaaaaagaaacccaaattaagaggaataaagtttgtgatagctatatctccagacccaagcccccaatccattgtgtagttggacgagactacatttcccagactctccccttttatctttttatgtgtttttaaattttttttttattttttgtaaatctggccttactgaaatacccccttttatcttgatgaggcctcattcttagtaatgatatggtagagaaaatgctgtgtgtcatttctgggctcatgtggttaaaagtaggtgtgacttttttttttttttttttttttttgtccaagcaggctgcctggatttgtaaataaaatttcactagaacataaccatgcccatttattttcaagtattgtctgtggagcaacagctgcagaggcagagttaaatagttgagacagaccttatggctcacaaagcctaaaacactatgtggccctttacagaaaatgtttcttgacccctgttctaaggtatggaaggagactgggtccactgacattatgacacctgcattattaaagtgttatatgagccagaaagaaattactcttgtgttaagcccctgaaaattttagttacagacggtagtaacatactactatctgttgaacacaccatacttggaaggtggtccaaagatttacatatttattaaaagcgtacgtatatttgggagacgaatagtcattgaactggatgtcatagcttagggtcttgttcggagattctggaagaaaatttcaattcttaaaagtaaacagatgaaacatcaagaaatttaaaagaggttattcaggcaaatcacttatcttaagaaataaagtcaagaaaaatacttcgtgaggttgaaaaggaatttctgcaaagaaggaagccactggtaaagtacactttcaagaacatggtggggaagagactggattaaagtagtaagggatgcatcttctaagaggaataaaagaccttgatcacatgatctacctaaaaaacaagtcacaaaatattacttacccttactgtgtgggatgcaaatttttattcccttcccgcccccgacattctataatattgcgtaattattatgcatgtgttttacgctggtcaccacgcggtaaaccgaatccacaacccattattatgtcgcaacctatggtttaaaaatacacttccttacagaggaatcatatactagttgagctggaacttagattttcagtcattagccaaattctgaaaagaatccatataacaaacccagcagagtttatagccatggttttgtttttgacgtttgttgctccttccttctgtagtctttcatccacatctatgtagaacgtcctgacaatctgcgaagagaaggctctaaggtggttttatttgtggggaaaggagggaggtacatgcggtttctccaccttaatagctggatcaattaggctggccccggagcgcaaagggatccgggtttctgagaggcacgtgccagcaccattcgcccgatacctctagaccaaagccggcctcccctccagccgagctcctccgtcctaaaggactcgacatccccctcctccaggcccacacccctcagccccggagcccaggccccgcctctccctgcggaaccccttcccaacctgtacgaccaggccccaactctgggtcgaagcacctcgcccctgccggccgaggccccccaccttcttccgaacagccccttgccccccgcgaaggggcagccgtagctcccagccgagctcccccgctcctggccccggtccccgaccccgccccaggcccccgaccccgcccctgccggccgaagaccccgcccctgccggccgaggaccccgcccctgccggccgaggaccccgcccctgccggccgaggaccccgcccctgccggccgaggaccccgcccctgccggtggctgcggtagctgctgcgcgctgaggcgcctgctcagtgtgggacgcggagagcgaggggcggcggcggcgcccgctggcrctcaagcatggcggcggcggcattgggcagctcctcaggctcggcgtccccggccgtggctgagctctgccagaacaccccggagacctttttggaggcctccaagctgctgctcacctatgctgacaacatcctcaggtgcagggcaacggggtcggacggcgggtaccggggtgggtgggccgcggcaccttgttcggccagggactggggcgtccggcctgagcttcagagggcagcgacgcccggacagaccgggacctggagctrgttctgctcctaacgtccgagcccgccggccaggggcctcgggacccggccaagtcccacccccgctcgagaaaaggaagtttctttgcagttgtgacttggcacctgcagtcagggtgctgcgggtgaactggagtcccggaagcggggccgggcggaggagaggtaggaaggcgtgcttcagacactgccgctcttctcgtcgtttaacggcctcagatatcgggacacaacggtaaccgcaccgcgcgtgtcattccccctgcgtgcatttttcgagcggagtggcttacatttccacatacttatcagaagttactcactgacaaagtgatgttttcttcccatgttgagactatccgagtactaaagcataatgcttctgaagtggtgggttttaaaatttttaattttttttctgcccacttttgttgattgaaacattatagtattttgaagttacagtttttatattaatacctggattctactatgtaacataaccctttaagaattcgtggaggtaatcgccttggatgagagtaatttccttcattctcctgtcagcaaaattgcacttctagaggtctaagggaccttgyagattttgggaattgggaggcaagtttgattattcattttgaataagtacccacctcaactcttcagatcaaatgatctgaagggacatggtgtgggggggtagggaaatggaactgaggttaaaggagagccacttgctttaggggtgttacctcatttatcaggtcaccgtgattaattaggttctctgttcccctcagcccctggtgcattaagtgtttggtatattgtcatgaagtctaaaaggaaattctcagtttcaaggttataggtttcacgtgacccaattttagacattagttacatgtgcagtttttaaaatccatgtcagtaatatttcatttaggcaatggtaatgatttttaaagtaaattgaagggaaaatatattgagcccttattttgtggcagatgctatgaaagatgcaacatgtggcctgttcacagctacataattgtgacctgtgtggggaccamcttcgtgctctgtgacaycttctcaactcaccttttttactctttgaggccttacagctcttcacagtacaaggatgccaagggactccataaatgaactgataggctgggttctccagagcccattagctgagacttaccacctggaaagccaccaggctatttaaaaccccactagtcagaaaagagaggtggccttgtaatgaagcctcacttctgctttaaatctagtgaaacccaaaatgctgaggtttagtatgagggggaaacctttgcatgcaaataatgacatttagcatcataatcttcattatgaatgtttactaatggctcgttgctgattttcgtttttgagacggagtttgctcttgttgatgaggctggagtgcagtggcgcgatcttgactcactgcaacctccgcctcacagcttcaagattctgaaagatgaggggtgtgacaatgagcgcaaaggatagtggacacactggaataatgctgagaaattaagagtttaagaaagtctttgtgcgttgcttttccaaggataggaaagaggatatgatgggtttgaagtctaatgtccctacagccctctaagtctttgagggctttagggtcaggcctttggtatcagtctatacacaaaaccacggtcagtttactcaacatacttaataagaaaaagaatttgaggaactggatgtgactgtcattgctggagcctgtttgcagtatacttttactgagaaaaatagattaatgtgaggtccagagatgatataaaaataaaattgctcactgggcacggtggctcacacctgtaaccccagcactgtgggaggccaaggtgggcggattgcttgagcttaggagtttgagaccagcctgggcaacatggctaaaccccgtctctacaaaaaaattaaaaaattagccaagcrtggtggcagacacctgtagtcccagctacttggagggcagaggtgggaggatggcttgagcccataatcatgccactgcattctagctttgatggcgaagtgagacctttctcaaaaaagaaaaaaaaaatgctcactagaaactaaagaggaaaatctatattgtatatcaatagttaaatggtaacaacatatatcaaaataacaaaggccagtcgaagtggctccaacctgtagtaccagggctttaggacaccccaggtagaaggattgcagccggggcaacacagtgagaccccatctcttaataaaaaaaaaaaatagccaggcgtggtggctcacctgtagtcctagctacttcagaggctgaggcagaggattgttgagcccaggagttctaagcagcaatgagctttgatggcgtcattgcactctagccggggtgacagagcaacactttgttttttaaaaaacaaaacaaaaactatatgagaactgatgtgtattttataagaatttttaaacaattgtgaaagcaggaagaaactagaaaattagcccagagaaagacccagcatgtagagatctgaaagctgtgaggaaaagartagattaaaatagctcaagcagttttgaaccagtaggatatatcatcctggtggtactgacatgtttatcaccctgtgaaatacattgagtgtcaggaaaagatgccccatttatcgaaaactagctttgataaatgtaggattattttatagttcagttttcttaagtgataagaaagagaggctcacttgtgagacagtgtagcatggaagccaggaatgcgaatgttctgcartgcacaaggaaactccactgagaaaaggccccacatgttaatggtgctgagactgagaaaccctaatctaatacacagaataaagagttgagaataaaattttytttgtatttcacaaccatctgtgattctcaaattacatatagtaaagaacaatgtttttgttttaatttccaatcccttatggacctataacttttgtaaaatacactgaaaatttcatggcaatatcaaattgctgtataccgaacattcaatttctctacttcttgcttcatttttatgcacttgtaaacaaacaaagaaaaaatttctgtactacttgtgtatgggtaacaaataatttgtagattagcaccaatctgtggacattttgaatagcaaaaaaaatagagcatttgtctctgaatattctgtaataaacatgatttttgaaattagggaaaagtttaaaaacattcatttagtatttatgacactttggccaataggcaattgactggtgaaaaacaaatgcaaaatttgttaaaacttataaaattaaaatatttggtttttggttttgtttttacgtcagaatacctagagaacatgtgtagataggacaaagttgataagtcatttgctagcatttgcctactcaccatatcataccccagggcaggtggcttcttatggaagtacatcttcctatggatcccagatactgcctcagaatcctccttaacatagtacttaaagaagtcactatcactttaaggcagttggtgtcaggtatgaaacttatcatcctaaactatgttctgagggtcttttgaatataatactatgattagcttaaccttacattcttttaattttttttaaacaattctgatttatcaaagtaattaaaaatctcaaaccaaaacttttcatgtgctggttacttgtcccaagtgtactattcaaaatcttaattatggtaaaagaaatttatgtcttccttttattgccatactgtctgtgtcaagaatatgtcttgggccaggtgcggtggctcacgcctgtaatccccagcactttgggaggctgaggcgggtggatcacctgaggtygagagttcgagaccagcctggtcgacatggtgaaaccctgtctctacttaaaaaatgcaaaattagccaggagtggtggtgcacccctgtaatcctagctacttgggaggctgaggtgggagaattgcttgaacctgggaggtggaggctgtagtgagccgaggtcacgccactgcactccagcttgggaaacagagcaagacccctctctcaaaaaaaaaaaaaaaaaaaaaaaaaaagaatgtatcttaaactgaagcgagaccccccccatctcaaraaaaaaaaatgtaccttaacagcacagaatgtaatttactgtttttacttatagtaaaaacaaccattggtttagggaagaaagaaaatcaggtgactataaaggtatacctaggtcatgtttgttgaaagtaaagtctttgaagaactatgacctggttttttttatatataatcaaacttttgttttttgtcagaaaccctaatgatgaaaaatatagatccatccggattggaaacacagccttttctactagactcttgcctgtcagaggagctgttgaatgtttatttgaaatgggctttgaagaggtaagtatgttcaaggatttcctctcccctcttcatgcacaaagcagccattatcatgttggtgaataattgtttgaataagataatgttttttaatttatcattttgggaatcagtagaagtagttatttcttcattgattggacatttaaaaatcacaacaagtatagtttaaaatttcagtaaaatgtarcaacgctccacagagaaattcttacgagtctcagttctttaaaataagggtcatacatgcaacccaaggaccaaatgtggttcactttaggcttttagctaaaacctgatttgtgagcacacatgaatactaatagagtctagctacctgtctgtagtaggaaatgaaaagagtctgaagtaaacagaaraactgagttgagctgccacacagaaggggtttcttctgtgacaggagaggagtytcagtatttttttttgtttttacttcaaatgaatattttggtgttatcttttggaatcttgtggtgtagtttaattttatgacacatcgaaagtagttattaagattctgaattttctttatgtttatatccttaactagttctcctttgtagagcattgaaagaacttgaacaagttacagagactcaatagtcagtggtcgtcagaataggcaattgtagaagttgttaaagagatatgctgagctgctatgtaagattcacttttcttcatgcctctctgcttccctccccaggttccatttcaggccctgaagtaacagtagtgaacaaagtagtagatataatcccayctcacatagagcttacattctagtaggttaaacagccagtagatgtgaaaacaagatgagtgcaaagaagaaaataagaccaggtaatagaataaaaagtactttgcatggcaggcagtggtcagggaagtcctctctgaggagatgacatttgagctgtgacttgaaacatctcaggtacctgaaactctcaggtaagagtgtttcaggcagaaggattaatgtrtgtaaaggatttccagcagaagtaaccgtgaaacagaaataagctgcatagggaggcagagaccaggacacatggggtcttgaggaatgtggcaaaagacttagactttattttaagtgagatgagaagccactgggaatttttttttttttttttttttttgagatggagtttcgctcttgttgcccaggctggagtgcggtgatgcaatctcggcttaccacaaccttcgcctcctggattcaagcgattctcctgcctcagcctcctgagwagctgggattaaaggcatacgacagcacgcctggctaattttgtatttttagtagagatgggatttctccatgttggtcaggttggtctcgaactcttgacctcaggcgatccgcccgcctyggcctcccaaagtattgggattacaggcgtgagccgccgtgcccagcctggaaagttttaagtagggaaaaatatttttgaagattattctagcttgctgtaaagagaattcctggaggtggtgggatggggacaagggatgaagcagggagaccggttagaaagcttattacattagtctaaataagaaatggtagtggtttgtataaagtccatgaaggcagggttttttgtcatttctgttccctgtgttgctagctcctggaataatgctggtgcattacaratgttaggtactcaataaagatttgttgaattaagtactgatggtggagatggagagaagtagatggatccaggatttctttttgtgacagaatcaacaggacttactggtgatttagatgtaagatataagggaaaggaaggaatcggggacttacctatgttttggtttaagcaactaattggatgggagtatcattaattgagatagagaagccttggagagtagcaggttttaggggagaaactaacacctgtctttggacaattgtgaccaatttgctgttaaatattcaagtagagaagccaagtaagcagttggctatatgagtttacaaccccaaaggagagattaggcaggggatataaattatggtgtcatctgattatagatgatacaaaggtatccgaacataaagaatttaaaattccttgttcaaggaaatgccaattttcaagattcaaattggttgggaaaattgagtaaatgacaacggaagactctacccatttctcatgtcgaagtgtcacatattcgatagaattagatttgtctttcattcagcaaatatttgagtgccaagtagggtagccagccattccagtttgctcagtactgtcctggttttagcaatgaaagtcccacatcccagaaaacccctcggtctcaggcaaaccagtgttggtcactgcagtgccaaataacaggccacactgagacttgcagaagtatttgatgcaaatggagtcacagtctcagaaaagattaacaggttttgatatgactaatttatacttaaagtttctgttcggctttagacatcacacctcaggacttgaactctaccaccaaaaagaaagttggtggactttttaaagaataattatatgaatacataatagttgtacattatggggtacaggtgatattttgatgctagcatacaaatgtgtaatgaacatatctgagtaattggaacatccatgatctcaaacatttatcatctctttgtgttagaaacattcaaaattctgtcttctagctattttgaaatatacaatgaattgtttttaaccgtagtcaccgtattgtgctatagaacatgagaaattattcctcctatttaactgtaattttgtgcccattaaccaatctctttctattgcccagtcccttctatccctccaagcctttggtaactgccattccactcttctttatttttttaaatytttatttaattttgtaatatctttttacaatcactcttttcttctatgggatcaattgttttagctcccacatatgagtgagaacatgtgttatttgtctttctgaattctggcttattttacttaacataatgtccctccatttccatccatgatgatgcaaatgacaggattttgttcttttttatggtggaataatattccgttgtgtatagataccacatattctttatccattcatctattgatggacaattaggttaattccatatcttggccattgtgaatagtgctgcagtaaacataggaatgcagatacctcttcaatatgctgattttggaaaatggtggataggagacaggactaacttgcagctcccaattggactgacagaacagtgcctggaaactcacatcgtgaacttttgctctgagaaatactagaggaacataccaggaaaaccaaaagaattcacagaccctttgaaaaaagcagcttgctgctgcaaattccatgagacagaggaaaacctgtgagtgcccgaagtgtgayggggaaagtccactggggaacctgaaaatccagatcacgggagaagggtttaaccttacctagagctgaaattaatttagagagctgagtgaaatataaaagtagaacaagcagcgagaagagcctgcaggcactcctggccaccaaggaagccatttctgactttatctcacaggggtccttggggagggctgccagtggaattggggaaagaccacagggagaatgaaacttgcagctgaacacgaattttcctggacyggggtgtgtaggggaggtggcaaatgggaaatgcagatactgcagatacaagcacagaagccaaggcagacggagaggggtgaagcctgaaaaccctgattgctttctcagtggggagacttgtagcctggggcaaaatctcaaccctgcgtacactgcctggatataaacatggtgctattggtggagcatggtgggagtgagactggcccttctggctgtgtgggagctgggtatggcctgttattgctggctttcccccacttccctggtgacctgtatgatgcagcagagatagctgtaatccccctggaaacataactccattggcctgagaaccacacccccatccgccacagtggccacaacaagcccaacccaaagagagtctgctctcagacatgcctaaccctgccttcacctgatggtctttctgagagaaaagacataatctcttgggaactctatggccctgcccactgcctgagaaacccaaatacttatgcaggcaaccctagggcaagcttacatcttcttgatactactgcagctgatgctgtcttgaaagcatcaccttctggctgggggccaaccaactgaaaccattacagcaactcattaaagaacaactctgccccaagaaaagagaatacaacagctaattccaccacctgtaacatcctggctaaccagaggtcttgagtccaatcgcatgacagctttactaccagcacacctggaattcgagaaaaccaacacactaaacaaaactgcaaccaaggtcccacacagagtccacttcactcccctgccacctccatcagagtaggtactggtatctatggctgagacttgaagacagatcacatcacaggactctttgcagacactctctaataccagttcagrgcccagtagctctactggtttgctagacccagaagagcaataacaatcactgcagtccagctctcaggaagccccattcmtagaggaagggaagagcaccacatcaagggagcaccccatggggccaaagaatctgaacagcagcccttgagcccctgatccttcctctgacatagtctatacctaaatgaggaggaaccagaaaaacaattctggtaatatgacaaaacagggttctttaacatccccaaaagatcacactagcatagtagcaatggatccaaaccaagaagaaatctctgaattgccagaaaaagaattcagaaggtcaattattaggttacttaaggagacaccagagaacttaaagaaatttaaagagtgatacaggatatggatgaaaaaaaatctccagagaaataaatagtataaataaaaaacaattacaacttctggaagtgaagaacacacctagggaaatgcagaatgcatcggaaagtttcaacaatggaattgaacaagtagaagagaacttcagagctcaaagatgaggctttcgtattaacccaatccaacaaagacaaaaaagaattttaaaaatgatcaaagccccaaggaagtttgggattatgttaaatgaccaaacccaagaataattagtgttccagaggaagaaaatacatctaaaagtttggaagacatatttgagggaataattgaggaaaacttctctggccttcctagagatctacatatccaaatataagaagctcaaagaacacctgggaaattcatctcaaaaagatcatcacctaggcacatagtcctcaggttatctaaagtcaagacaaaggaaataatcttacaagctcttaggcaaaagcatcagataacctaaaaaggaacacctatcagattaacagcagatttctcagtagaagccctacaagctagaagggattggggtcctatctttagcctctttaaacaaaataattatcagctaagaattttgcatccagcaaaactaagcttcataaatgaaggaaagatagtctttcagacaaacaaatgccaagagaatttgccactaccaagctagcactacaagaactgctaaaaaggagctctaaatattgaaataaaacctcgaaatacaccaaattataacctccttaaagcataaatctcacagaacctataaaacaataaataatgaaaaaaaaacaaagtattcacacaacaactagcatgatcactagaatagtacctcacatctcagtactaacattgaatgtcagtggcctaaatgctgcacagaatgtcagaatgagtaagaatttaccaaccatgtattctctgtctctaagagactcacttaatacataaagactaacataaacttaaggtaaaggggtgaaaaaagatattccatgcaaatgaaaaccaaaagccagcaggagtaactattcttagacaaaacagacttcaaagcaacagttaaaaaaagacaaaggggggcattatttaatgataaaagggctagtccaacaggaaaacattacagtcctaaatatgtatgcacctaacactggagctcccaaatttataaaacaattgctactagacctaagaaatgagatagacaacaacacaataatagtggagacttcaatactcactgacagcactagacaggtctgcaraattggcatagaagggacataccttaaggtaatcaaaactttgtatgacaaactcacagccaacagtacactgaacagggaaaagtagaaagcattcccccaagaaccagaacaagacaaggatgcccactttcaccacttctattcaacatagtactggaagtcctagccagagcagtcagacaagagaaagaaatcaagaacatcaaaattggtaaagaggaatagactgttgctgtttgctgatgatatgatcatatacctggaaaaccctaaagactcatccaaaaagctcctacagctgataaatgaattcattaaagtttcaggatacaaaattaatgtacccaaatcagtagcactatttctacaccaacagcgaccaagctgagaatcaagaactcaactccttttacaattgctgcaataaaataaaataaaatacttaggaatatacctaaccaaccacatgaaagacctctataaggaaaactacaaaacattgctgaaggaaatcatagacaacacaaacaaatggaaacacatcccatactcatggaagggtagaatcaatattgtgaaaatgaccatactaccaaaagcaatctccaaattcaatgcaattcccatcaaaataccatcatcattctccataaaactagaaaaaaacagtcctaaaatttttaaaagcagcctacgtagccaaaacaagactaaccaaaaaacaaatctggagaaatcacattacttgacctcaaactatactacaagactatagtcaacaaaacagcatggtaccggcataaaaataggcacataaaccaatagaatagaataaataactcagaaattaaagccaaatacttacagccaactgatctacagcaaagcaaacaaaacataaagtgggaaaaggacacctattcagtggtgctaggataattggtaagccacatgtagaagattgaaactggatcctcatctcttaccttatacaaaaatcaactggagctgtatgaaagacttaaatctaagacctggaaccataaaaaattctagaagataacatcagaaaaactagtctagacattggcttagacgaagacttcatgaccaagaacccaaaaacaaatgcaataaaaacaaagataaatagatggagcttatactgaaaagcttctgcacagcaaaagaaataatcagcagagttaacagacaacccacagaatgggagaaaatcttcacaaactaggtatccgacaaaggactgatatctagaatctagaaggaactcaaacaaatcagcaagaaaaaaaatcccatcaaaaagttggctaaggacatgaataggcagttctgaaaagaagatatacaaatggccaataaacatgaaaaaatgttcaacatctttatcagggaaatgcaaatcaaaaccacagtgtgacaacaccttactgctgcaagaatggccataattaaagaatcaaaaaataatagatgttggtgaaaagggaacccttttacactgttggtgggaatgtaaactagtatgacccctatggaaaacagcatggagagtccttaaagaactaaaagtagatctaccatttgatctagcaattcctgtactggatatctacccagaggaaaagaagtcattatatgaagaagatacttgcacacgcatgtttttagtagcacagtttgcaattgcaaaaatatggaatcaatccatcagtcaacaagtggatgaagaaaatgtggaggccaggcagtagtggctcatggctgtaatcctagttctttgggaggctgatgtgggtggatcacccgaggtcaggagttcaagacctccctggacaacatggtgaaaccccatctctactaaaaatacaaaaatttgctgggcatggtggcgggcacttgtagtcccagctactcgggaggctgaggggagaatcactagaacccgggaggcggaggttgcagtgagctgagatcatgccattgcactccagcttgtgtgacaagagcaaaactctgtctcaaacaaaaaagtggaatactatgaatactactcagctataaaaaaagaatgaaataatggcatttgcagcaacctggatggaattggagaccattattctaagtgaggtaactcaggaatggaaaaccaaacattatatgttctcacttataagtgggagctaagctatgtggatgcaaaggcctaagaatcatacagtggactctggggacttggagaggggaaaagtgggaagggtgcgagggataaaagactatacttttagttgagtgataagtgcttcaaaacctcagaaattaccactaaagaacttatccatgtaaccagacatcaaccccttccccaaaaacctattgaaataaaaaaaagaattaaataaaagaaatttaaaaatgcttaaaaattaagcataagaattttttttaaaaaattaaagatcattaaaaaatgattactttttttggatrtgtgcctagcagtaggattactggatcatatggtagttctatttttagtttttttgaggaaacttcatactctttttcttagtttacatactaatttgtatacccactaggaatgtataaagattctttgcatccttgccagcatttattttctgtctttttgataatagctattttaactggagtaagataatatctcattgtggttttgattttcctttctctgataattagtgatgttgagcattttttcatatacctgttagccaattgtatgtcttcctttgagaaatgtctattcagatcttttgctcatttttatttttatttattattttttgaaatggagtcccacttcgttgcccaggctggagtctagtggcacaatctcggcttactgcagccttcacctctcaagttcaagtgattctcctgcctcaacctcctgaatagttgggactgcaggtgcacgccatcatgcccggctaattcttttgtatttttagtagagatggggtttcaccatgttggccagactggtctcgaactcctgacctcaagtgatacacctaccttggtctcccaaagtgctgggattacaggcgtgagccaatgcgccggcctcttttgctcatttttaaatgagatttgttttttgctattaagttgtttcagttccttttatagtctggttcttaatcccttgtcatttgaatagtttgcacatattttctttcactttctagtgtgtctcttcacattgttctttcctttgctgtgcataagctttttaatttgatgtgataccttttgtcaatttttgctttagttgcctgtgttcttaaagtcttactcatgaggccaggcgccgtggctcacgcctgtaatcccagcactttgggaggccaaggtgggcggatcatgaggtcaggagtttgagaccatgtctaacacggtgaaaccccatctctactaaaaatacaaaaaattagccgggcgtggtggcgggcgcctgtagtcccagctacttgggaggctgaggcaggagaatggaggttgcagtgagccaagatcgcaccactgtgctccagcctcggcgacacagtgagactccgctaaaaaaaaaaaaaaaaaaaaaagtcttacttatgaaatctttgcccagaccaatttcctgaagtgttttcccaatattttcttctagtagtcttacagtttaaggttatactttaaggtcttacacttaagtctctaatccatctttttttttttttttttagatggagtttcacctcttgttgcccaggctagagtgcagtggcacagtcactactcaccgcagcctctgccgggttcaagtgattctcctgcctcagtcttccgagtaactgggattacaggtgtccgccaccatgcccagctaattttttttgtatttttagtagagacagggtttcaccatgttggccaggctggtattgaactcctgacctcaggtgattcacctacctcggcctcccaaagttctgggattacaggcgtgagccaccacacctggccaatcttttttttttttttttttttttttgagatggagtcttgctctgtcgcccagcctggagtgtagtggtgcgatcctggctcactgcaaccaccgcctctggggttcaagtgattctcttgcctcagcctcccgagtagctgggattacaggtgcctgccaccacgcccagctaatttttgtgtttttagtagagacggggtttcgccatgttggccagcaggctggtcagctccctacctcaagtgatccacctgcttcagccccccaaagtgctgggattacaggcgtgagccaccccgcccagcctctaatccatcttgatttgatttttgtatatggtaagatacagatgggatctggtttcattcctctgcatatggatatctaactttcccagcatggtgggcttttgtaaatggagtatgaacctaagacctatcccaaaattttcaactgtatattaaaattctggatacttttaggcccacttgtctctgaggctgcattcttttttatgacagtttctgagagtgatgttgaaatgaaaaagattaggatccaaatggatctgtgaccctacagtttatctcagtggagtagttttccaccaggagccatacctgccccctccacctgcacctctttcttcaacctgttgaagatgagtacgggaaatttgctagggcagtttggttgttttattgactggacgatattttcagcatttagtggtcagggtcaggtttgctaaatatcctgtaataagaattgtctcaacaaaaatgccttgagaaacaaatttgttaaatactagaattctttttgatttctttttttttttttttgagacggagtctagttctatcgcccaggctggagtgcagtagcatgatctcggctcactgcaacctcygcctcctgggttcaagcgattctcctgcctcagcctcccgagtagttgggattatagttgcctgccactgcgcccagccaatttttgtatttttagtagagacagggtttcaccatgttggtcaggctgatctcaaactcgtgaccttgtgatttgcccgcctcggtctcccaaagtgctgggattacaggcgtgagccactgcgcctggcctctttttgatttcttaaaatattattaaatctagtgcattaagcttataattttgtccatttatgaaaataacagtgctgttggttaaattttttgatatagacactttggccataattatatcttcttttaggactggttgtaaagggactgaagggaagggagcatggcatgagcagcgtatctgtcttactggggccctgtctgagttgtggactgagacctacatctaaataacctgtcatgctctttttccttctctgtccatggagttgtttgcctttctcagtgctgttccagtaacattatgagatcagatgccttcatatttggttttaaaccagatgtctggtttctcttcctaggcctcctcctagatataagaagattctttctaaggttgaaaaagtcgttgtgttacaatttgtgccagtcgtctaatcattacagttgtacaaatgttctccgctcattcccttcaactatttgtgcaagctcatgggtttcagtctctgttcagtcaaagatggagtcatttatagcataacgattaaggtcatggagtctgaatccctgctctgccagttgttctgtggcttcaagcaggttaacttccctgagcctttgtattttcatgtgagtattggccgggaatggtggctcacgcctataatcccagctttttgggaggctgtggtgggcggatcacctgaagtcaggagtttgagaccagcctgaccaacgtggtgaaatcctgtctctactaaaaaatacaaaaattacccaggtgtggtggcgcatgcctgtaatcccagctacttgggagactgaggcaggagaattgcttgaacctgggaggtggaggttgcagtgagccgagatcacaccactgcactccagactgggcaacaagagcaaaactctgtctccaaaaaaaaaaaaagtattaatctaatacctacttttcagggtagttgtattacttgagatgatgtatttaaaacgcccagcattttgctttgggaggctgaggtgggaggatcatttgaggttaggagtttgagaccagcctgggcaaaagagtgagacccctgtctctccaaaaaataaaaatcatccaggtgtggtggcatgcacctgtagtcctagctgctgggaggctgaggatggaagatcgcttgagcccaagagtttgaggttatagctttgatcactccactgcactccagcctgggtgacagagggagaccctgcctcagagaaaaaaatgcctagcacagtacttagaacacacaaagacaatacattgtagttgtcttttttatagcaattatgaatcatacgtggagcttgctggtctaatccagctttttaaaaaggattcagatggaattgactttcatgtcattgagtaatgtcttgttcagttgattcctgtaggtctgccatcaccagggaaatacagtaatattgtcgattttggagtttaatttaaatgctcatgatctgcaggtctgtgtactacagactgttgcaacttttttttttttttttttttgagactgagtcctgctctgtcacctaggctggagtgcagtggcacgatctcagctcacctctgcctcccaggttcaagcaattctcctgcctcagcctcccaagtagctgggattacaggcacccgccaccatgcccagcttatttttgtatttttggtagagacagggttttgccatgttgaccaggctggtctcgaacccctgacctcaggtaatctgcccatgtgagcctcccaaagtgctgggattacaggcgtgagccaccatgcccagctgcaactttttatcttgtttgcagttggagaaattactgtttttaacattgtttcttttcaatacctggaaatttgatcaaatacattgtcatttcatttcaccttttttcttgttttgagtaatttactgttttacattatagaatttgttgtagcattttattttaaagcattcttagyatatttataggtattctttaaatgagtcactactgaaatrcatgatttttatttcttttgttttgttcggattaccttcctattactgttaaccatccatagttttggattgactatcagggtgtacttttcgttatcgtggaaaaattagttgaccccatacacaggcttctaatcatgtagctattctttaaagactcagattaacaagattcaaaggttgttagataacttcttgttggttttatgtgaccctggattcttttgtgtggctgtatctctactgtcattattatttcatagggaatttcatagagaatagtagtatcatatactattgcagagaggataggaatatgcatttttgcaacccttatgaggccttctgacttattgtttctagaagatcaaatattttttcctgaaagtcctttgaaccacattaaataggctaaggattaaatgccaaaaaggagataattttttttttaattttctggtttatgtttaggcattatttaccttaggctgtatttaaaaagaaccataatggtaagaaaacagtatgattttagaaacatgcattctatattattggtttcattatacatttctgtgtgtgtgtgcacaaaagaatgactgcataaagcaaaggttcacattttttttaattttataaattccagggagaaacacatctcatctttcctaaaaaagcttcagtggagcagctgcaaaaaattcgtgacctgattgccatagagagaagtagcagactggatggctcaaataagagccacaaagtaaagtcatctcagcaacctgcagccagtacccagcttcctacaacaccatcttcaaatcccagtgggttaaaccagcacacaaggaaccgtcaagggcagtcatcagatccaccatctgcttcaacggtaatgttagaattaaaccttctttaactgtttctttcaaagtgttgaaacagcaaaagctttggaatgtgttatgatttattcctgaatttatgccccatattttgttcttagttcttataactctaaaacatccaaatttcttcagctctttaaaaaattgtcaratttcctctactgcattaatacttctgatctaaattgtacctgctgcctttcactgtgggggttatttccaacagcacaaccattatcartaccttaattcaataaaaaagcttctttaggtttaaggtaattaagaatgcattaatttaatgatagtggatgctagcaaattagtgaaattttattattaatatacaccatatatacttgtgaagaactaaagtcaaacttacaggcattcttgataaactgaaatgattccatttgataggaaattatcctgtttacaaaaatctcttttgaccaaggtccttacatattcttctcctaagtttttactgtcagaaaaattcttgtgwtatttctgtaagtctaacaagcacctcaatggatttttatgcccctccctgagatcatgtgcattccattttgaataccttaggtcttcatcagttttgcagttaaggttggtacagttacagaagctcacttaacatctttcttggtttttaacaccttttcttaggagttttccaattacagtgttagaatatatcttttaagatttcctactttatctttttaattgcagtattatagtttaaaatgcacatagttaaccaatctgcaaaaaagcttgcaaacattttattttacaaaatatctctttcctgggctaagtagtattttgttagtgtcctggctcaggaaagccattcacattttcttaatcttgtttaaacttcttttcttttgttttgtttttttctttttttgagacagagtctcattctgtccaggctgtagtacagtggcaaaatcttggctcactgcaacctctgcctcccaggttgaagtgattctcgtgcctcagcctcctgagtttctggaaataaaggcatgcaccatctctcctggctaatttttgttttttcttctttttgagacggagtttcactcttgttgcccaggctagaatgcaatggcacgatcttggctcactgcaacccccacctcctgggttcaagagattctatagcctgcgcctcccgagtagctgggattataggcacctgccaccacacttggctaattttttgtgtttttagtagagacggggtttctccatgtgtgccaggctggtctcaaaactcctgacctcaagtgatccacctgccttggcctcccaaagtgctggattacagatgtgmaccaccacacccagccctttttttaagttcttaatcttacaattcagatatagttccaggtctttaaaatcctgtccgtcaccagaaagcctctaaacactacactaaaaacagaatgtcattctgttggcaaaacacattctagtgtagaagaaaataaattttctcaaaggtgtatgctattagtaggctagtgtatatcaattcttactactctagtccttcacacaaaatatcttctgtgttgaagttgagagaaattagaatgaatcttgtttttcatagacaactcttggttattcgtggatcactggaatatatgtatttctttaaagtattttgttaattatgctttcatcattagttgctatactacagaatttgacagttttcttctaccttgcccattttgagtggagatactgagaattaaaatgtaccaaagtcagggagccagagagatattttttaaagcatttaacctgtgtataaactagataagtcctagtgaacttataacttttttttttttggttaaaactatatcaagtaaaatgtcgatgtataagttaagatgatagtcactgatgttgacgtttgccagtaagcttttaagatacaaaatactggaatatattgatactcaataaatgatgatagtggtggtgattgttagaaagttaatcttgctactttttctggacattttatgttaatagaattatagtatgtaatcttttgtttctagctctttgtgtaacatttttgaagttcttcgtattgcaggatatatcagtattttgttcctttttattgttgaataatattccattttaaggatatrccacatattgtttccattcatcagttgatggacatttgggttgtttcccatgtttgcctattatgaataatgctgctgtgaacattcacatacaaatttttgtgtagacatatgtttttatttctcttgagtagattcctaggagtggaaccactgggttgtatggtaagtttatatttatgtttttaagaaattaccaagctgtttttcaaaattgtaccattttactttatcatcagaaatatgtgaggcttcccgtttcttagtatcctcaccaaccattgttactgtcttttttagtatacccattttagtggttgttaagtagtagttcattttggttttaatttgcatttgcctgatgacttaattgattttcaaacttgctggttgtacatgctaagtgtttagtgttcctaatggaagtaactttctgataatcctttatttttatacccattgccttccaaaagcagattcaaaacagcaaggacaatttttcaatgacatggtacctcagaatgttagaagcattatgtttccagcttcacaactttatctcggttgaaaatgtgattctgaagtataatatgcttaaaatatacatttagtactttttactcagctaatctaaatgtatgcttttatttagcacatgactactttgagtatgtatatgaaattgttaggaacttttcatcaactctttatcactctagaaattactgccagtttatatatgggtatgtgtttatttaaaccaattatcataatttgtgattatttcattgaaattataaaagtcatatattatcagataatgataaataataaaacgaactagttaattttaaaactaattttatctcataaaccaacaataaggcaacctcttagtcttagtctagatctgtgtgcgagcytttttttttttttttttttttttttttttttttttttttttttttttttttttttttgagacagagtttcactcttgttgcccaggctggagtgcaatggcgtgatctcggctcaccgcaacttctgcctcctgggttcaagtgattctcctgcctcagcctccgtagtagctgggattacaggcatgtgccaccacgtctggctagttttagtatttttagtagagacggggtttctccatgttggtcaggctggtctcgaactcccaacctcaggtgatccgcccaccttggcctcccaaagtgctgggttacaggcgtgagccaccgtgcccggcctgtgtgctagctttgtaagagaagaaacctatttgaacataagatttaaacatccactttctttttcatgaacctaccactcttaaaagttaatacttgcatgccctctgataggggattacattgtgtccttatatcagcatacttagcgtatgttaaaaatgaagatgtgatctgttttgacatgaataacattattatatggaaaaaaggtaaactgagaattccaaaattaaacaacatatgttgtctgtatatgtgtaatattttgatttttcttattagaaacatacacacacacatacatatatatatatgttcatttttttaaaggtttggaaggccatacacaaacatcttaaccataatgtactctgagtgatgaaattatgggtgctttcatattatttatactattgagtattttctgaaatattttttgaagcaacatgtattacctttataaatagaaaagtttttctttaaataagtttattgaagtcacaagttgattaaaacatatttaaaataacaaaacttttatgtctaaaaacaggttctaaattttaaagcctcaaaataaagggttgcataaaattaaagagagggcaagtaggctcaagccttgatttgttgtgtgtgtgtgtgtgtgtgtktktktttttaactaaagaagtgaatttgctaatctaacttccattgattaattaccacgatttgacaaaattatacacattgtacttttttcttatgaagtcttaaatatatctcatatcagaaatcaaaataattggaagtatgattagtgaaggaaaaatctctttgatctaaaaccaacagatttcacattttaaacttccatttgtactctaagtaactttagtctctcaattaactgctgccttatgtagcattagtacatggttacccagctgctgtaatcaccatgtaatcagcaactttctatttttatgacttagttttttcagagttgtgccaatgaatatgtaaagaaataaggcaagaatataaactttattgtttaaaatattttgagtgccattaaaactacaatgaatgaggtaatttccagattgaaaagaattaaattgaaaataaaaatactccggatgaattcttaccttcttggtaaatgaaagtctgcatttaagaaaaataaaatgagacactataagtgcttcattttaatatgaattttttcaaataaaaatggagacatttcttttttttttttttctgtttctatactaatcctagtaaaggagcatatttgtttccatggcgaattccccagacttgtcatcaccaactctacatttcttttgtcagctgttgtacccatctcttctgtaatggaggcaatgtgtctgctcttaataaaggccagttgctcctctctccctgtatcccttctcctctgttcaccatggaatctcacatggacagtgccccatcttggacctgttcttttcttggggaatcttcctagtggcatttaaaccttgttttaggccagttttcatttaaggttgttccactggaatcacacgcaaatttctgaacataattccaggctggctgaatcaaaatggaagaggggtgaagtttagaatctacatttttaacaagcaggttaatgtttaagagctttacctttaagctctcctatcttagaaacaaggcaacatacaaatatccctggtcctccatgccctgtctttctcacctcttcttcccagtactcattgttgcatctttatttcttatatacgtttctagtggatctccatactttaattatatgccctatcagtaaaatatttttcagcacatattgtcaatatatttttgttcatttgtttatgtgttatatacatgtactactacggcaatatactgttcacattataagacaatgtaaagaggatctaaatagtaaataatatgtttaattcaaaaaaatttatttatttattttgagacagggtctcactttgtcgctcaggctggaacgcagtggcatgatcacagctcactgcagctctgacctcctgggctcagatgatcctcccacctcagccttccaagtagctgggactacaggtgtgtgccccaagcccagctaatttttctttattttttgtagagatgagggtcttgccatgttgctcagggtggtctggaactcctggtctcaagcaatccgcctgcctcagctgccaaaagtgctagggttatagccataagccaccatgctccaccaaaaaatttattaatactatattacctaatgaatgtatacaaatccatatttaaaatagtcttgataattttgaatttaaggggctttgttagatctcattagattgttagtgattttcttttttgcactaaaatgtagctgttgaagtgcttatgccaaaaaagcagatgatgtgtttgccctgccattttctctttgttaatgtgtgctcttattattagtattggccttagggcctagagttctttgtaatctttttaagctagattgaggattaatttagttaaaatcatataatctgtaattccacttaacccagtacatttgaactgcacagctttgtcacatgacagctgcagaagtaggagtgcgggtgccactgttaaccctttgactttatgacatttttttctcttacctcagggtagcttctccagtctgtgagggaggcactgttaattcagatagtaaatattattataacttaattgttttacttgtcagacaaaatataaacagaaattctcatactttctgtccacatcctcgtggaccttcttgtacagctcctttgctacagcttagcaagcccactgttgcacatcacttgtatgactcagtctcttgcaaattgttttccttattaatgctatcattagactgtattcttactatggtcagtgatttccatgttgccaaatttaattgacttttttcagttggtttttaccattcggtagtcttttttcttttaagctcaaatttttattaatagccttggaacaaatacattaatatttccttacagtcatatagtattatacagttttgaaagaactttcacgtataccagtcgaacccttacaacagccctgtgaggtaggcagggtaggtgttattttcctactactattgagagcaaagctaagaggtgaagtaaggtcacacagttggtgaatgatggagctaggactagaacctaggccttttgacttgcttcctccctgagaacattcaagtaatgatatcctatgctatataacaaatatttatctcctatgaagttgatcaggtctatttttatacattttacctgtttttctattacctttccctaatatcaaaaaactttaaaactgatgagacatttgagacatttcttctctgttactggactttttcttagatatatcaagcactagcctaagatgaaacttctgttttgaggatccttggctataaattctaaattatgatatgaacatttattttacaaaagtctgcaaatatatgttgaacttaagaaaaacaaaacaggtctgtttatattctcgaaagctttccatctttcccaatatgactttaagatgtgtataagaggaaaactgggaaagtgttcagcaatattacagtattattgggaaaccaatgcagagtgcacataaatgcaagtcacatcacgccacactagtttattttctttgttggccttttagaggatggagaaccattagtgtcttactttcaggtttgatcccatcttatatgtgatatcctcagcaactagctaaaaatgtgatctgaattataccaattggaggactcaagcagcagtgatcaaaacatacgtgtatgtggtaaaagggaagaaaacacttgttcttcattggttttgcctaggtccagtgtaattacttatcaaaacaaattttaacctatagcatctctgttaaatttagaaatgtgaaatatggtagagttatcaacttggaatataagactaaaactgtaactgacccaaaactacctgtcaaaagcacagaaagctcaacaggcataaaaactaaggagtaaaacccaactgttctgacatagagtgaaaaacagcaaatgcaagccatcaggttaaagtgaatcacaaaacattaggcatatagagaatgttttaaaaatatgaaaatgacactgagctgtattaccaggaatgatattttttaaattccaggtatggccttttacatttaagaacaatggagagaaacaaacctatggggtaggtgcagaaaatgaatgggatttagaaagggagttcagttggggaattaaggaaggccaagaaacaaaaacattcaaaatggatttagaatctctcctctaaatccactctttccaaaaatgtttcctaaattgagagatttggtaaaaataaaaaagctagtgacaacaaaagtggctatattaccttataaaataaagtagtatttaaatgtagattagaaatcatgctgtaaaagataaatctgctgaccaggctgtagaacctaaaacttaggtgctgctgtcagtgataaaaggcagaaaagtgtctcaaaaacagaattgccatataaggactcaacattaatgaaactattaagaaacaagtacttaactgtttgtaattgaagcctaatgaaaagcacattttgtgtgtttactaaagagatctaacagttttaactaatatgaaagtcttttaaggtaaaacgagaagatctagaatattctagttcagtatattgggctcaaaaccagctttccttttgaaatgcatctagactagactataattccttacatagtatcattgtcatcatcatcttcatgtttttctcttcagtgggtttgcttcattggctgtgttctatgatgaaaccatgttgatgggaataagaatatttttgggcccaatcattgagggattagttggaacattttgaactgcagttattgcaggaactggtttgacaggtgtggaccgagaaggtggaatctgcactgttaaatctttggcttgtcactgacattggagttgaaactttatttgggacagacactgtttgtggggtcactatagtaggagtggtaggtttgctactaacagcaccaacagtcaatcgtagaactagcctcccttggttaggtccctttttaattaaggacttcagcctatagtttggagctgttaagcagtatctatcaggtgggagtctaggtcctgcatatggcttaatcagtggcaaaggggtttgatttttctgccttgcaatatccagtaagaaacctcttgggggaagagaggtaaaaagatcagcacgacactggattgccagtctcacatcatctgcatcaacattaggtttcttagcatggctcgaataaatttttgcatcatccagaattgtagtcacatttcggaaagcaaattccaaaatttgatttataacctttggtttgtagtctgtgattcccatatccttcgagatctgtgccatcaccaaggcatccctaggagcgttcttgggaagtgccatcttgcccaattccatgttatccagccactcgttatccggagagagagcctattggtagtctttaacttagttggtcatttcatggtttttctcctgctgcaagtggttcaagtgctgacccagttgctcgtatcaaaaaaaaaaaaaaaaagcacgagtcatctctaatgtgttcttttccttttccaaatactcttgacttcatagtacagtcaccaaaacttattgattttatttcctaagttcttttcatatccatttgcttttttttttttcctaacagttgtaaaactaccctaatttaaaccaccagctctcttggagctctgcagtagtcccccatggggtcttctgatgcctgctttctctgcatagtggctaaagtgatattctgaaaacacatcagatcgttttactcttcttgcttaagtctctttaatggcttatcattgcaatgaaaagcgaccagaaagatctttatctctccactgctttccccttagttctctgggtactaaacactgatctctctgatccttcaaaatatgctaagcaatccccatctacctttgtgctgttccttctgacaggaatggtcttttccttccctttttgttagcttcttctcatccttcctattgtgccacaaaaaagttcaggttcaaggaccttgttgtaaagtctcattttatgctatatatttgcttaataatatttatccctatgattaatttttaaccgttatatccccagcacctagcaaataaaggataaaatttgagtaaatgaacattatcagtatttgcttgtttttgtatccatagactacttgctttttgagggtaatgtccatatctattttggtctccattatttttccagtatctaacacattcacacacagacaaatatttttgagttactgtggtgggtctgtcattatttgttgaataccttttccctatagaccttaaattgatcatgtctgtcttgtgcacccattccagtgcttaatacagtgcctgacatgtaagtatttggtaatggttttttgttgttgttatcgacctgtctctactttgcaatatgcacatttaacccattcacatttattctaattgctaagatgtttaaacttatttctgataccttattttgtgttgtctatgttcttgcttttttttcttttctccctgttttgtttagatgaagttttttttctataataggtttattcctttaagagttaggaagttaaatataatctttttagtcttttaattattgacctgaaatctgtaatgtaagtttttaattttatatttttctaccaacatcttcccataagacaagaacctctgttctgctcccttccttgctacctttcctatgaaaaaattgagattttgctttccagttgtgattatctataccaatcgaaacttgtactggtgcttttatttagatcctactcccaagtatgtatttatttttaaaaatttatgtaagctatattttttttggctataataactttcctaataattcttttagataggatttgagagtgatatactttctgtattgttacatatcagaaaatatatttattttgcccctgtacatgattagtttaactgggaatgaattctgtgttcytaatcatttcccctcagattttcaaaaaaaattgcttcattgtttccaatgaaatatctgacatcaaataattttttctttgcgtgtaatgtttcttcttacttgaagactcttaggattttgtttttagccttgctattgtaaaatgtcatcattatatgcttagcatttgtttttgttttgttttccatacatactagctcttcagctatgagaaatttatttctgtttttttttgagcagttgccttcttccattgtttttactgtctttctggaatttcccttaactggatgtgagaagttttggatttatcctcaatgtctgtttgttctttttatcctcattctcagaaaatgcctttggttattaattgactgatcactctttagccatgtttattctaccgtttgacaccatctatgctttcttctttattttatattatttattttatattacttattaatttatttttgagactacattgcccaggctgggtgcagtagggcagtcacagctcactgtagccttgacctcctgggctcaaacgatctacccaccttagcctcctgagtagctgggactgcaggcacacaacactatgcttgactacttaatttttttttttttttttaagagataggatcttgctgtattacccaggttggcctagaactccctactcaagtaatccttccaccttggcctcccaaagtgcctggcttcttctttattttaatgtttaaatttttatatctagccaggcgtggtggcttatgcctgtaatcccagcactttgggaggctgaggcgggcggatcacaaggtcaggagttcgagaccagcctggccaatakggtgaaaccccatctctactaaaaatacaaaaataagctgggcatggtggtggcacctgtgctcccagctactcagaaagctgagggaggagaatcacttgaacccaggaggcagaggttgcagcgagccaggatctcaccactgcactccagcctgggcaacacagtgagactctgtctcaaaaaaataataataataaataaataaaatttttacgtccaagatctatagttgagtctttctctgaatatagtgtactattgaaactttttaaagttttttctgtatttgctgtcattgctacaggattagttcttctgatactgattctcatgcatctcccccacagttgttgtagatccatatgtatttgagaggtcctgccagcttgtctgtgaatactgcatttgcttctaacagctgtggagaagggcagtacatgttgcacagtgggatgtgccagtggcaacagttctgagcttggttactcccctttccttttgtgactctaagtatgcacacttactgctcagaggcagacctctttgttgatgaggtgacaaggagggagaagccgagataattagctgttcctccagagtccaaccactcttcctaatgcttgccctgaggacacttcctattctgtagatcctatggcttctctgcccttgggattattttggaaactttttttacttttcatcaccatcctctctggaggtttcttcctttagtcctttcatatttgccttttctctttcaggaacttctcaaaattcctggttctttaagagcacacctcttttgctactgctgtacattacagggatttaaagtggaaggggccattagatgcatagatcagagctctgtattgatccatgcttgtattcaagaattccgcatatccttatttaaatatrtccttaatagtatatacaaaaggaaaaaaatagatagatcttaggctctgacacaaatgtggctgtctcctaatactaatgttatgaagtttatgggtataattattatatttaagtgaatccatacattcccttctatctgtaaaatcataaaaccacagtttttttattatatattatttttgtagcatatggtgaaaagttaatttcagtttttttttttcctattaggttgctgctgactcagccattctagaagttcttcagtccaacattcagcatgtgctggtctatgaaaatcctgctcttcaggagaaagcgttggcttgtattccggtccaagaactaaaaaggaaatcacaagaaaagttatcgagagctagaaaattggataaaggtagtagctttacataatcatttattgctaaatgtaaatcattgctaaataaacagaaaatactgaaatacaactgacccttgaagaacatgggtttgaactgcatgggtccacttatatgtggattcttttaaaccaaacgtggattcacaggatgcaaaacccatatacggagggtcaactctttatatacatgggttctgcagggctgactgtgagacatgagtatgtgtggattctggtataggtgggggtcctggaaccaatccccagcatatactgagggacagttgtagtgccttttgctcttatacattgttttacagtgttatacattataaatacttaacctatttcaatttgagtttttaagaagtacaataatagtataattttattgcatatacctcatggtcacatatcaccttttttttcaattttttaattgaggtaaaatacatataacaaaatttaccatcttacccatttttaagtgtacatttcagtgttattaaatatagtcataatgttgttcagccattaccaccatctatagctttttttatcttgtaaaactgaaactatactcattaagtaataatccttccccagcttccagcaacgactattctactttgtcgctgtgattttgactattctatcttatataagtggaatcatacagtatttgtcttttggtgactggtttatttcacttagcataatgaacctcagggttcatccagtgatatggtttggctctgtgtccccacccaaatctcaccttgaattgtaatccttataatccccgtgtgtcaagggtgggaccagttggaggtaattgaatcacggtggtggtttccctgatgctgctctcataataatgagtgagtcccaggagatctgatggttttataagcatctggcgtttcccctgcttgcactcattctctctcctgctgccctgtgaaaaggtgccttctgccatgataagttttgggaggcctctccagccatgtggaactgtgagtcaattaaacctcttctttataaattacccagttgcaggtatttcatcatagcagcataagaacaaactggtacatctaggttgtaacatattgcagaatttccytcttttttttttttttggcagtttttacagttttatttaaacacaaaacatgcacatgagctgtctactcattttcttygctgtgcagcctggcattggggttggtgactctgatggccagctgggtggctctttccatgatggctttgcagttcttggaggaaacattgtgagcaatctcagcacagtaagttttgttgcacatcagcagcacttcaagctccttgacgttgtggaccaggaacttctggaagccactgggcagcatgtgctttgtttttttgttgctcccataactaatgttgggcatcaagatctggctcttgaaccttctatgaaccctgtcgtcaatacctctgggtttccgccagttacacttaatttttgacatatcagtcagactggtgccggatgaacttcttggttctctttttgatgatcttgggcttcacaaggggtctgagggcggccatgaggccgaagaggagatggctgccacctctgtaggcagtgctgaggaggagagagcttccttcctttttaaggtgaataatgtcctgtttatgtatatatcacattttgcatatccatttattcatttattcatggatacttgggttgtttcaatattttggctattgtgaataatgttgctatgaacgtgggtgtttaaatactttagtctgaaatcctggtttcaattatttttggtatacacccagaagtgaaactgctggatcttatggcaattctatttttaattttttgaggaaccaccatactgttttccacagtgactgtatcattttatattcctgctaacagtgcacaagtgttctaatttcccctgtttttaccaacrcttattattttctgatttttcaatagtagccatgctaatggggatgaagcggtatgtcactgtagttttgatttgcattttcctaattcatgatattgagcatttttttcatgtgcttattggtcatttgaatatcttctttggagaaatgtttattcaagtcttttgaacattctttttaaaaactttttttttttacctgaatacgcatttgcagtttaatcattggtatgtgtatatttttaggtaaagtagaactttagcccacagaatatatgatagcgtcattagtgaatttaaattagtgaattttaatgtgaatctaacagaaaccatattcagaattaatccatatgaatagaccattgactcacttttatgagtagagagacattatttattgattaagagtaggttttggagtcarctgtctttgtgtaaattcagctctgctacttcctgtgcatcactgagcaagtaatttaatctctatgactcagtttcttcatgtagaaataagaatgataatttttagaaataaatgaaaaaatacatgtaaaagctgggcatgatgtactggataataggaactgaggtaaacaggcctttcatgtaaggttttatgctaatctagctaggaattaatctaactagagttgttttcttgtttgctttagccgtaggtatcagaggcttcaaattcctccagtgttcttgtcgtctcccccattgtctttaggcttccctaagaactcctcattagagtctgcatttatcctgcttggtgttcgtttagttgtaatccattgwtattatactggagccctattggtgtgatggtaaggtatcaaggagaaggttctataatcttttgattaaatctcagtattttagtgggcctatatctctgggcctgtgcctttcacaagtgtttgttagcctttttacccccataggtgagacaggaaggctacaaggggctggagtcagggaaatatatgtccttcccccagttcagagaagactctggtaaaatctttttccctggagaggccttaattgtgaagaacactctgggtatacctcacaattcttactcttcccatcttttctagagccacaaaggatttttcttggttcttcattgtgaaaacctggtgggcttcctgcagacaaaatgcacagaagtgtggggacctctcccaagactgaatttcttactcccaagctagtccatactcagcttccagcagtttgtcaaaattgctatttaaatgtccttaccagtttatggctctagtgacttcttttccatgtaagcagattttgactgtgattctctatatttgtgtatctttttggactttggggtgataattcactctgtgacctcagttctctaatgggtccaagaaaagtcactgatttcagttgagctttttattgttttaaaggtgagagtattgacctctgcttgctagaaactggaagatgaaaccagaaatccmtctgaaggcttaactatatgtgtctcttccttttttaaccatttgaccaattttcacaaatgtcatttatatattttgctaccctttgtattttggtaatttttgtctttttaaaaatattacactatgccatttttcaatttttgatgactggcttgggccttagatttacttctgctacaggcctgctaaccttaagacagttgttctcttcttgtattaacagtttttttcctgtgtgtacaataagaatgtttattaatatgtgattatacaggccctgtccagcttcaaagtactgtggtcctttatatgatgacttatagaaatgcctgtttatcaggtacttactgaacatgttttgtgtttgagtcattgggctgggccctgcaggggagagacaggataataatatagccttgccttaagaagcagctaaatagaagatgagaattcaaatatacagatcaactgagtgtaaagcagagtccaacaaatgtaatgtatgaagtataatttttaaaacattatgttgtagaccagcttggccaacatggtgaaaccccgtctgtactaaaaatgcaaaaattagccgggctaatttgcagttgcagatgcccataatcccagctactcgggagtctgargcaggagaatcgcttgaaaccrgaaggcggaggttgcagtgagtagagattgcaccactgcactgcagcctgggcaaaagagcgaaactccgtctcaaaaaataaaaaataaaaccattatgttgctaaatgaataaacttcagtgagaaatagcatagagacagaatgttcctgtttgtgtccatcatatttcctctctctaggcaaataacaaccaggaaattgctcaaggagcaaaaatctacaataaagagcattagttaggtgaacattatgtttatcctgatgcatttgtccatctgtcctcacagtgggaatggtcttatcagtggaccaagaatccttcaagtctattagctaagacttaaagtccatttcccataaaaatctgctgatgttccctgctaacatttgctccagcattttttctttctaattataaaggtaatacaggggttgtagaaaatttggaaaatagggagaagacaaactatcaataacttcatcacattggagtatgtgtatttaagatctgtgtatatattctttcacgcttaaaaagttttaattaaaataggaaagaaatgacacagcagattagtagtgaaaattatgaaaatcagtaaaagatttttttttaagggcatgaaggatgagtgggatttataaaatatgtcaaaatacatactaagggattggggattttcttccaagtgtagtgatcaacatgcatagaggcagagaaggacaggctctatttgggaacaatgaataatacagttagactgtgtgtagggtagggtgtatataaagcagtggaagatcaagtaggctgaaaccatattttggttgacattgaatttcagacagagcagtgtataccaagttcatttttaatgttttcaaaaaaattagtaaaatgaaacaaagcatatttctaataaggtttgaaatagtaaagaccaaagaaattcaaaggaaacacgtcttggccgaaagactaatgttatattgtgactataattgaacatacagcagaaatgttacataaccttattcatcagaaagcagaaaataatttctcaggtgttctcgaataggtaattcagcaggattgactattgaaactctgagtgacatcagactgtatttaaggaagattaatctagtaataacttgtgaaatgaattaaaatcaaaagagtacaaggagagaaaaattaaaacacaatagtaatctaatttacataagagggataagagggtgaacagagggttgagattacaagggagaagatggatgtgaaagttgttggggttatagaatatgtggaatttgcagtcaataggataaggcatcatgtatatataaggaagatgtcaaagatgactgggtaactttgaatctaggcaactaggaaattaaaggagtcagtagaaacaggttttaaagggaaaggaagagtgagttgaggtgcctactatctggactgccaagtgaaaacataggcctggaaattcgataagaagtcaagccttgaaatacacttyaggatgataggtaaagccatgcaggtaaatgagattgctaaaattgagaggacagggtggagaggtaggattacagaggttctagaaaacagtgtagcactagccacatatggatatttacatttaaattaaatgagatgaaaaatcaagttcttcagtcacactcagcacatttcagctactcaataaccacaagttagtgacaaccctactggacagtaggaataggaattatttccattattgctgaaaattctattggatggcratattttagaaacagcaggatatgggaagaggaagagtaacaagtgaaggaaacttatatagtgaaataagtggtatggtaggcataatgagtatatcaattaggattaggttgtgctatgagtaaaatgactggtggcttagagattattttctcatgtaagaaattatggaagtagtcagtctggagctaatggtgagctatcatcaaagacctaggtgccttctgtcttttcggctcggatgtatatgttttccatccttcacatcaccttgtagtccaaaatggctgctgcagctccagccattacatttccagaccaaacatcaggaagaagaaacagagaaaaggcataaaggttttatctctaatttgagcttcttctcttgaagtagtcttccttggagtaacatgaagcttagtcatttagccacacttagccgcaagggaagttgggatctgtagttttttaactggtgcattgtcatccctccaaaattgaaattctataaatgaggaagaagtagcaagtggatattatatggccaccatcagtctctgccccagtgagtgaatggcactgagatgatgacgaagcccccgctggccaagttggtgattttctttcattagtgcagtgcactgttttttcctttccagacaaaaatcatattctgggtctatggactggggaaagtgttttggtttgatgcagaaatggggaccttgtggcactgccaaatgagatagagaagcatgatttgatagctttggcctggtagactgaaggtttgtcatgattgcatgttccagatacaggtaaaacatctttttggaggaggaagaacccatttttgaaaagtggtaacaaaatatatcttggcctactaaattgtatgtgaagatakgagatggagaacatggatgaggctacctctactgatgtttttacccattttctcattctcttgtatattgaagtggttttcagagaatggagttaggtctaaacttgttgattttattttgtcactgataagttactagaaatctacgtttatatggtatttttgaagatggtaactttagaaatttgaagtcttaattatatttttgaaataaacccagtattcacagaatttagcatctaaatcaggcttcccttatctctgagatttctgagctttcatcatacaggaatctacttttatttctctgagcccctagttaaggatattgtttaaatgaggaacattgacccttaattgggtgttactgtttartagtcctactttcagctggattatacctggagtatgtaacagaagtacaaatactctgttttcctttcctttcttcttggtcttgataatgactatttggtgaacaattacaattctaagtaatattttgaggcatgtttgttcagtcctttcatcattcaaatatttattaagcatctagtgtatagcaagcagaacactaagtgttggggatatagcagtgaacaaaactaagtacctaccattatgggraagasacacacacacacactagtgaaaagtgctaggaagaccaatgggagaacagagtgagtgacgactagtaagatgctgtttgatacaagattttcagggatggcttctctaaaaagcaatgatttcccttttaggtagaaggcatgagcaactgcaaaggcctcctgaggtgggagtgaggttggcaagtttaagagatggcagggagagcatggtggctgtagccagtgaacaagacaggaggagatagggtttgaggtcagagagggaagagggtatttaagtttcctggggctactataacaaattaccacaaacttggtgaaataaaaagaaatttattcttacagttccagaaggcagaaatccaaaatcattatcacagcgggaaatcgaagtatccccagagccatgcttcttttggaggggagaatctgttctttgcctcttccagcttttggttgctgctggcagtccttggtttgtggctgcaacagtctggtcttaaggccagcatcttcaaatctctctctgtcccatcttcacattgccttctctgtgtgtaaaatctccatttacttgctttttatgaggttaattgtgattgaatttatccacatattccaggataatctccccatctagagatccttaactttataatatctgcaaagacctttttttttttttttttttttttttgccacataaggtaactacattcataggctacagtgattaggacatggatatcctctgagggccattttttagcctacgacggggagccagctgaaagaacaagagttgggactttgaattttattttgaatgagatggaaacccattggagggttttttaagtcacataatctggcctgtacttttaagaagattactctagctgctgcatggtaggcactagactgagaaggagaatgacagtcctctgtttctaaaactttgtttttaatgtaactaattcatgaatatcttcctgttggaaagctttcatattatatgggaaacgccaaactctccctgccattcagttctgttctttttcatgtcttgtcctggatatttataccttaaataattatctataaaaatagtttaagttgtgtggggtttatttaaaatttatcatctcatatatattcagctccttggtgtttttcatttacaaatatgtattggacagctttttaactccatagtgtttgattgtacatacactattatttatacaattccctattgatggacatagaggttgtttccattttctctgttctaaatgccaccacagtggagattcttgtaaaccatgtctcctggcacacatgcacaagtatttctcttggatagatactgaaatgtcaagtgtgtgtaatacttttatattataatggatcctgccaaattgccttccaatttatactagaagtgtctaagaatatttgtttccacttaatgaaagtattgaatttcttttatggactttgtgaatttttctagtgggtttcttaatgttmttactgatttatagaagttctttatgtatttagaaatttatctttttgagacagagttttgctgttgtcgcccagattggagtgcagtggcgcgatctcggctcactgcaacctccgcctcccaggttcaagtgattctcctgcctcagcttcctgagtagctgggattacaggtacctgccaccacgcccggctaattttttttttcttttgtatttttagtagagacggggtttcaccatgttgggcaggctgttctccaactcctgacctcaagtgatcctcccacctcagcctcctaaagtgctgggattataggcgtgagccaccgtgcccgtccagaaatttatcttttctttgttagacatgttacaaatttttcctcccagagttctttagtgtagcttttgaaattcaaaagtttttatttttaacataagaaaatttaatttttttattattgattttacagtttgtatcttgcttgcctaagaccttcctaacccaaagtcataaacataaacatactcacctataaacttctattattttatattattccagagaaagtttttttttaatgaactatagtagggatctgatagatagctatttgtcctaatatcatttattgaaacagtccatcctgttagagctgctttaaaatgctaactttattaaatactgtgcatttgcttagaaatctgtctttcagaattcttttgtttcattgatctgtttattcttcactaataccacattgttttaaatattagagttttataatatgtcttgatacacggtaggcaaatttaccttatgattcttgctcaaagttgtgttggctattttgtgcattttctctttcacatgggattttgtagttagcttgtcaattttttttttttttttttttttaatgagacagagtttcgctctgtcactcaggctggagtgcaatggcatgatcttggctcactgcaacctctgcatcccaggttcaggtgattctcccgcctcagcctcccaagtagctgggatcacaggcacctaccaccaaacccagaaaatttttgtagtttttagtagagacgaagtttcaccatgttggccaggctggtctcgaactcctgacctcagatgatctgcctaccttggcctcccaaagtgctgggattagagstgtgagccgccacacctggctagcttgtcaaattttatgaaaaaatattttataattttaattgggattatattaaattatagattaatttgtggaaggttatcagctttagaaatattgagttttccctccaggaacataaatatttctggcctttttacattctctgtagtttttttttctgtagttttttattttgaaatacatcaaacataaatacaagaacaaagtataatatatcatatacctatgaccaacatcaagctttattagattttatcattatgctatatatgtccttcatatttatgttttattatcactctgttttaatcataaaacattaaagatagagatgagaaccccctatatatgtttttaagattgattttccctctccttcccttcttgccagagataccatggtcttgaatatgaacaagagagatctgtttatggaaaagtgggtatattatctgtcatgttataacttactagggttgttatatatactagagatatggttgtgtttttatgtgtttggggatgagtatccatggatggattatattgtacagttgaagccctaatagaaaggctaataggatgattttttaaatgtctggaattctgtgatttctgccttttgtgattgtttcatgtttacttgtgtatatacctgataacaaattcaatgtwtcccatttttaaatgtttttcaaaatcaaatttatttttctacctcccttgtacttcaggatcaattcctaactgactatagttccctaagaggtcattgtgttcagctcacttgttaatgcataatgtcagttagaggatataaaatggtaaatgttctactgtttttaatgtgcagttatacttgtcattgtatttcagcctagtgcctaataaatgacagtttcttcttgcctcttattagtgaaaaccttaaaatcatcttatgttttcatatttttcaggttcgtatttgagaataaatatgtttggatagtttaaattttgtcagttttagctcttacttggtcctcccttaatttctcaggtatcaatataagtgatgaggattttcttttgctggagcttttgcactggtttaaggaagaattttttcactgggtgaataacgttttgtgcagcaaatgtggtggacagactaggtctagagatagatcattactgcccagtgatgatgagctgaagtggggtgcaaaggaagtggaagatcattactgtgatgcctgccagttcagcaatcgattcccaaggtgggtgccctggatggtaaaatcagaataatctcttaatgaaatagttagaagagagtttttactaaatgaactttttaatatttaattatcagaaatatattcctctaaaataccggtgagcaaaccgtggctggcaggctaaatccagccgacatcctgtttttgtaagtaaagttttattagaacataaccatgctgatttatttgcttatggtctgtttttatgctgcaacaagcagagttgaataatggtgacagaaatgatatgacccacaaagtctgaaatattcaccatctgtcttttataggaaatttgttgactcttgttctaaagtataacttgagtatagtcataacatgtttaatgctataaatcttgtattacttttttaattcctaatttttaactgtctgatagctaacaatacttataataatgctgaggtatacttttaccttccatattatcatcggatgattattttaaacacataattgtattcactctcacaataatcagcattattattatcagtcttattagcagaagtttgttttagttaggtgcttcccctgcccaacctaacctactcctcatatctctaaattttaaactaaggacattttaaattttaaattaatttccattctttaatttataagcctgttttcagattttctgaattggcaatgtttataaagtctggttgtattatcagtcaaggaaagataccacgttttaaaaatatctaattttttttagcttaggacatagtttctaatcatgtgcttgttttaacctctagctcttctctatatggggaggctgaggcaggaggattgcttgaacctgggaggcagaggttgcagtgatccaagattgtgccactgcgctccagcctgggcgacagagtgagacttgagactttgtctcaaaaaaaaaaaaaatttaattacctaagttataaattcatttatttagcttaagaaatgcttggttaagcatttgcttaacagacttgtcatcgcagagcccattcatttatgccactgtttcctttccttccaaagcacgtggctgacctctctgctcagctgcagcacttttcctgctcagctctatcagttcaaaacccatctcaacacaaaatgcaaaatttagtgttcttgaattgtctggtaattttataattggagtaacttctgaaaagaatgttacaaatagatcccaaaaaacaacttccaaattagcaggcayctttaaatacttcaaaagagtaaaattttaatcaaaatgattattagaaagaaagataatattttagataaaattgaattaaactaagctaaaatttttgttgagtaatttgttaaagttgtttaccttttaaatacagtgagctagctataccactttagtgctaatgctttaggcaaattgcctagagaatttgcttctccaaatcttacattattcaaaacacagatcaaataaaagctctcctcaccagccactttctgacctgttgtattgtttgatcactaatctgacctgttgtattgtttgatcacattctgccatatatttaaattatttgtgttcatycctttcctcaggattgtgaacaccttgaaagcagtactaccgtttaattatttttcaccaaatgttctaacattgtgcctcatatattctagatttctaaataaatatttaaaaacaaattaaaggccgggcgcagtggctcacacctgtaatctcagcactttgggaggctgaggcgggcgaatcacgaggtcaggagatcgagaccatcctggctaacatggtgaaaccccgtctctactgaaaatacaaacaaaattagccagacctggtggcatgcacctgtagtcacagatactctggaggctgaggcaggagaatcacttgaacctgggaggcggaggttgcagtgagccgagattgcgccactgcactccagcctgggtgacagagcaagactccgtctcaaaaaaaaaraaaaaattaaacatttctgtttagcatagaggtaatgtaaattctcttaaaaatcttgattttgataattaaggttttttttctttttaaaccagatataataaccctgagaaacttttggaaacaagatgtggacggtgtggcgagtgggccaattgttttacactgtgctgccgagctgtagggtttgaagctcgctatgtttgggattacacaggtacagaatgtggaatgagcagagggtagtagggctttgcaggcttgcaggtttgggtttacattctgagcccatgattctctgttactttttggccttgtcagtctgaccttccatttgccttgtgtaaaacagtaataataccaaccttccaggttttttgaagggatcacaagagttttgtaaaacacctagcactgtgcctggtgctttgcactataaatattcctttttttcccctttatttttttattgatgcataatagatgtacatatttgggggatacttgtaatgcatttatataaattctacagagcaaatcagtattattgggatgtctgagatcttaaatatttgtctttatgctggaaacatttgaattactctcttctagctattatgaaatatgcagtggattattgtaaactgtaaacaccctattgatctatcaaacactaggtcttgtttcttttattagcaatttaccgtggcatttatagtgatgctgtttatatatggataaaaacatgtaataatgtaccatagaaatcttcattgctatagggattactgtaaaaaatttagtaaactataaacttaaagcacagtrtacagaaataataaaagtcatgtgatatttgtgttgtccctatttagaaataacttgtgtggtctacatgttaaaaagttgttttccttgtgtttccattttctaaagaattaaatgaaaccttccattaatagttagtgttctcttaaaatcaaatataaagcatgtattgaccagagattctattagacttcctgctggttctgggccttaaagtccagagagagagactgtagtttcaaaagtggcattaactccttcatgatagtaaactcaggatgatattttttatgctgctctttaatatgtctaccttcttaagagttacagcgcacattaagcctaaaactgaccacgttaaaggagattggaaaaacatttttaaggatttcaaagagacagaaattaatacaggtattctaaaatcctgtgtgccacaaaatgcacttattaactgaaattcagaatattatgcattactttatgattcttaggagtttgtgtatagttattgaaagtcattctgatttcattgtcttttttccattgctctcttttctcttacttgagtagaccatgtctggacagaagtctattctccttctcagcagcggtggctgcactgtgatgcatgtgaagatgtctgtgacaagccactcctttatgaaataggatggggcaagaagctttcctatgtcatagcattttcaaaagatgaggtagagcataaaagaaaaaaacttttttccaaaagtaaaatatatttttttcttttatgacagcttcatgaatgtataattaacatacaataacctgcatatatttaaattgtacagtttgataagttttatttgtatacactgaaatcatcactgcaaatcagtattcattgtatggatgtgccatagtttaccatttcacctgttgatggctatttgggtagttcccagtttttttcacaatttcaaattaagctgccatgaacactcaggcacacaagtctttatatgggcatatgctgccttttctctttgcttaatgcctaggagtagaatggctgcattatatggtagatatacatacaactttttaagaaaccactaaactattttccaacgtggttgtgccattttacattttcgcaagcagtatgtaagtttccagtttctccatgtccttgctaacatttagtatgatctgactttttaattttatcccctttaataggtgtgtagtggcatttcattatggtttttatttgtacttccctaatgacaaataatactgagcatctttttatgtgtttgcttaccatccatatgtcccctttgcttattttttttaattgggtattgtgttttcttactgtttggttttgagagttctttatatattcttatataagtccattatcagatatgtgctttgcaaagatttttctccctatctgtagtttgtctttttatgctcttaatgatttttgaagagaagaaactggcgttcagtttaccaattggttgttttatggattgtgctttttgatgttatatttaagaaattttgcctagcccttggtcacaatgattttctcctatgttttgttttagaagttttttttggttttatgcttatgtctgcaatccattttgagttaatttttttatatgatccaaggtgtatgaagtttttttttacatatggataatgaattgttctagcaccatttattgaaaagattattttttctccattgaattgtctttccacttgtatcaaaaatcagttctgtaatataaatctaatacaataaaaatggataaaatttttatttgttgaattttgtggaatcagctttgcagatamattttaaaaaggtaatgttttgaaattttcacttttttatcatagcgtttctggttaaactatcaactgyttaggaatgaataagtgacgtattctcttccgtttattttataggcttttacgttttattttattttattttaatttttcgagacagtctcaccctcttgcccaggctggagtgcagttgcatgatcccagctcactgcaacctctgcctcccaagttcaagcgattctcctgcctcagcctcctgagtaactgggattacaagcacatgccaccacacctggctaattttttttgtttgttttttttcagtagagacggggtttcaccatgttggccaggctggtctccaactcctgacctcaggtgatctgctcacctcagcctcccaaagtgctgagattacaggcatgagccactgcaccaggccccatgacttttaaattttaaacaaaggatagtattctaaaaattgcatttaaggctgggcgtggtggctcatgcttataatcccagcactttgggaggccaaggtgggtggatcacctgaggtcaggagttcgagaccagcctagccaacatggtgaaaccccatctctacttaaaacaatacaaaaatcagccaggcgtgatggtgcatgcctatagtcccagctactcaggaggctgagatacgagaatctcttgaccctgggaagtgagactgcagtgagctgagatcacgccactgcactctagcctggacaacagagcgagacttcgtctccaaaaaaatgcatttaaaaattacatacattctaggtatttagtaagtaaaggttgatggttgtaatcttgttaagtatttgtattctgttatttgtttcaggtagttgatgtcacttggcgatattcctgcaaacatgaagaggtgattgccagaagaactaaggttaaagaagcattacttcgagacactattaatgggcttaataagcaggtatggtgtggctatcttttttgaaagaacagttgacattttttatgtaatcgagaatagccgtttattagcctattgaaattcttaaagtagtagcattgttttataarcaagaatattttaatattctttttgaatattaaagaataaaaatattctttttgttcattgaaaattttgcggactcattttaaatattatgagttattttggattaaactgtctcatttcaaagttctwtgaaacaaaatttcagtattggtagtacctgacaaaaaatgtgttgtcttatttatcagtgtaactgtgccttggatatgacacagactcatatttatgtattatgtatgtacatacacacacacacacacacacacacacacacacacacacacacacacacacgtccatgtgaggaaatttctgaagcaaggcacaggaagttattaacaatgactacttctgagaggaggaactggagttccaagatgaaaggttcaatttttgttttatacccctttgatagtattgaaatttttaactctatacatgtgggtttttttcataaattaaaaaataagcagtgaattttgctgtagcaggcagttagaacagggcagagcacattaatccaatcagtgataatgattccaggtgaggtttcagtctattttgaatctgcacttactcctgatgtgtagcccttcggagatctctacctgaaaacctggattatttgctagatccccttgcattagaacactctgaccctcagtttatttttaccccagcactgtgattctgctaaaaattctgctttgatttccagcactttagtcactattttgtccttggcttctcagcctcttctcatgccacttaataattgacaaatgactggaagggaaaagaggtgcagtatgtgcccttcacctcaattcttttcttctcttggaatcttgacttctcaagttctggctgcctttacagctttctgttgcactcaaacaggtgtttatatgtgagtgttctgtttgtgtgtttccactagcttttctagcttttctcagtaagacattctgacacaagccagtctatcatatccagaaacagaagttgctaccttcattataaataaatctaggacagtagagctcatggagagttggaaataggtgttaaatgatttcccaacataaaatttataaaattatttaagttttccacagtgtcctttttattttctgaataatatatgtttgaaaataaaattcagtacttgtttcaagacctcttaaaatgcaagtgttttaagtatattcttgcttagagatggacctatacattcccctaatcttaacaacttttttaaaaaacatgaattacagaggcaactgtttttgtcagaaaacagaaggaaagaacttctccagaggataattgtggagcttgttgaatttatatctcccaaaacccctaaacctggagaacttgggggaagaatatctgggtcagtggcttggagagtagcccgaggtgaaatgggtctacaggtatttaattcattctagcatgatgatccttttactttcctgcttcatatactatgctcttcctatactatcctccaactgcattgactatgacctttcagttaacttgagagtaattattttaaaatgcaaacatttgaagagaaccagtaattgatttacatagcattatcgtgtaagagttagcaaagcatttttaaaatgggacttaamattttttttaccttatgtaaatttttagtgcagtgtaacttttactgaagaatatacaggaaaatgcacaaattataaatgtacagcttaatgaatgtttacaaatttaacacccatgtaatcgccaaccagaataagaaatagatcactggaaccgtagaaacaagcgtgagtttctttccccactgccttacaccctcgaaagtaatcattattctggcttctaacatcatatattagttttgcctgttattgtgctttataaaatggaatcatatagcatgtactgttttgtatatagcttgttttgtgtaactttgtgtcagtgagatacatgttgcaacgtgtatggtatgttctcattgctgtataatttattgtatgaatgtaatttttcactgttgatggctatttgggttatttctagttttggctgatataaatggtgctgctctgaacatttatattcacgttttcagtgaatatgtttaggcattttgttggatgtatacctaggagtggaattgctaggtaatagagtatgagtatattcagctttagtacatattgccaaacagtttttcaaaatggttatgccagcttatactctcaccagcagtatatgaagtttttcgacatctttgtgtacacttggtattgtctatcttttcattttagcagttctggtggcgtatagtagtatcgtgattttaatttgcattttggtgatgactaattatggtgaatgcctgttctttaaacttttggatatcctcattctcttttgtgaagtgcttatttaggtcttttaaaatgagattctaatgcatttaaaagaatgctgttttacgtttttcctctccagatgaaaactttatggagtggagaaaatacagaatttggggaattcagctgatgaaagtgtttatttcttggtrtatgcttgcatatatctgatattggctagaaattgttggtggcatgattactgttatattaaaatttattttaagataccacatgattaatcttccaaaattaaataacaatggaaatataatttccataggtaggtcctaaagttaagggactaggtaaaaatcagtgtgctaggctttgtaacaggcattagggcagtataatagactgtcctttgcccttagggagctaaagttgagtcactggagagcatttaataaaatgtttaggaaatwtgcaatgaaaaatgcttgaaagaaaaataactcatcacaatatcagtatcaagcagttccaaacaaattaaagttgtatttatctactttttctaaatttgccattgttacagttcatttctctagtaacagaatatgttttaaaggagtgaattatcactaataaattttatgtttgctttttaatttatcccatcgtctgtagcgggcagttaaaagtgttggttcagccataggattacaagatccaaattcaacaaataattcaaatcactgccaatgcagtgtgttacaagtataaatctaaatacagccagttaaaaagagctaatttaattcgcagctgtgttcaatttaaaacatggatattatttaggtcttcatttctttttatgcatgggtgtgctatctcttgcatggcatggaagttgattaactttaaaaatatgaattgggttgcataccacattgttttcccttttgaaattttttttaagtttcttaattgctggagaccattttagggccatggatttaaaaagaaatcattttttcctttagaaatggatgtttgttttaaaagtaaatagaaaaacattaatcctaaatacttttggaattaatcttgcaatcaattggaaacagaagaaacattggtactatcatttccagaaagaaaagttttattttaatcttagaattaaaatattttataaaatattaatgttattttggactagaatgcaaagattgcctgggattttaaggttaaaatacaagcttttgtaataattttacacatgmagaagactgtttcatgctatacctctcagctgctctcctagcttagggaactaggaaaggacactgaggaaatggttgaggactcaggatgagaaagaatccagtatgtggagagtagaaaacagcatcctagacaaagtaagcagcatgtgtcaaagccgtgaggcaaaatgagctggacctttttgaggaactaaaggaaaagtaatgtgatgtgagtgtagaaatgaaagggaagagtaacagaagatctggctggagaagcaagcagggtgaaccatcacataaggccctggtagccgtggtaaagagcttggagtttaagtcactgaagtgagttaagcaggaaagtgacatatcctagtttacattttttgaaaagtcattttcattgctatgtggagcatggataggagaggtaagagttgaaagctgggagtcagcttcaggagacaattgtagaagtccaagtagggggatagtggtggtggtagaaaagaataaaaattaatgaattcattgaatgcaaaatcacaaaaatataagtcagagctcatacttcttgtttttctctctagtaatgtttagagttataataacatcatactgattatatttaatttataaaataatttccaaattttccaatggcactaattttttcttttcaattttgaaggattctcttaccactctgcttagtaatttctcttttttcttttttacatctttcataatgttgaaaaactaattctgctttctttttaagagaaaagaaaccttgtttattccctgtgaaaatgagaagatttctaaacagctccacctttgttacaatattgtgaaagatcgttatgttcgagtttcaaataacaatcaaaccatttctggatgggagaatggcgtgtggaaaatggaatctatattcagaaaagttgaaacagactggcacatggtaacttaatgcataaaaccatttaaaacttttgtcattgtttaaacaaatatagattggcttcatttttcagttgtgtaaaatatgaaaactgatatatcaaacttattttcagtaatcctataacctggaaaagaaaattctgtccccaatatgtaatcaaaagtccactagaaattcttgcatttatatcaaggaagtatctgttttcatcaaagaggatgaatttaattctttcatgggaaaaaataatcaaatgtatgatcaatccatatgactgatttttgcatgaacatrtatacatatatattctatttgatactgtatatataaatacattatattgtgaattaattccttcacagatgtgtattgattgcccattaaatacaggctatttagggagtataatagatttagttcaaagtttcagaaagctaaacatctaacaggcattcacttcaaagaatgtggatgattgagcagcaatattggttatttcttctctgtatcttaaaaaaataattaagtagaggttaggactatagcagttcatttataccaagttgcatattatcgtcacatgctatcagtaacaaataagaggctttgctttaaaactgcctgctccttagaaacacaccaaaataaacttaaagctattcacatgacctcagtagatctgatcatattcttgatagattttcataggaattaattaacttataggaagctyttaaagttaatttaccaagatacttgagtgggaacttgttcacttgtaaaatatattggatagattaaaaaagtgagtcacatataaacagctgctagtgtttatgagcatctgttacatgctgtcactgtactaggcattaatcaaattaccaaaaacatacagagataaggtctctgcttttctctttttcaatcataagtttttgttcaaaaacttatcttgctgcttaaacatagaaatactccatttatatcacattgtctaatactaaaaaagttgaggtatttttgtattagtaacttacaggattattctaaattttggaattttcttctttagctaaagaaatgcataaaaatagagataaaatttaaaatttcgagatacctgtaattagttgtacagttgatgagagaggatgaacatcttctagaagactatccttagcctaagaatttctctgaacagaaagcaagatagaataaaagggttttttatcgaatgactagtctatacttgctaaaatggagaaaaatcatgtgtttcctcctaaccagcaatgttagtaaagtagtaatgatggggaaaatagtgatgtgttacagaagatgtgatatgccaagaaacagaactactgtatggagtatttcttctttgtcttatacactcatttgttcatcagcaaacttgtactgttgtgccaggcattattctcagctacgtaaacaaaaagatgattcctgacctcacgatctaaaaggggaagccaaagcataaaccgccatcttaaccatgatgcagagtgctataataaggatatcaacacattgctatggaaacagtgaggtgggagtaattagctttggctgtaggagttgggcaaagctccactgagcagacgacatttgagctggacactggaggttgagtaggtgtttatcaggcaaggaaacaaaaaggcatggagtacgtggcgtatttcaagatctccaaatagaacattttagccagagaggggctatagtgtgagaaagatttaaataatgtaaatgatagacaaaggccattaaatagaaaacacacccctattcaagtaaagcttatgccttgatatacttttatgaagggtaccattttttttaagttgagtgaatttctttctagctacatgtatttagtatcaaatgaagaaaaatactagaatctttacttgtagagagtgataactcggaagtaacaattgtcgttataacttaagtattccatctaaatcagtatttctggttctgtactagcatgcccccagttagggattttctagctctgttgaatagtaaacctatttctcactaccgtttttctcagtaatctccaaccaggtatcatgacagatcacatgcagcctgctttcagagttttagaacagattctttacctctcaaagaggtatcctcccaggagcacaaagattaaaatttgctatttagcaaataacattgttcagtaatgtctgaattgaaaagcatataaaaactaaatcaagaagaccagtacgctttttgggaggcaagtgataacaccttgataaaagcagtattaatagcttcctaactaatctccctctgtcctaatcctttcaaagctgtgatccatgctctcgctaaagaaacatttacaaaaacttaatccttaactgagtgctcttagagtaagacatagctccacgtcttttccaaatctggtccttgccttcttctctggctttgccttgcactgtgctaccccttgctctctgcattgcagatatattgtcccttctcccttcttcacagaacctcctatacttctcttttttgattaatttattcttaaccttaccacttggcccaagcctcactccctcaggtcccagcaaattgaatccatttccctctttatagattcattgtaccatatacctctctttcatgacatgtattcaacaaatagaaatgaaaataaattatttgtctctctctaataatgtttacattagattgtaaacarttcttagggagagaccttgtctttttctactcacttttgtactctcagtattcatatatctggcatagtacccgatacatagtaagtgtttagtaaagattggtgaatgtaaaaatgtacgtggcataaattctgcatcaccctagggctrtgtagagcactgtaagaacctcactttgttgagtgtcctttggatggtcttagatactttttggttttgatgagttttatccctctctttgtcactacagtcattttagcattttggcggggtgagggggcgggtgcatggcattatgtcaagaattcattcagcactcagcaaatatgcacattgtcaaatattgtgcttggcagtctgatgtaatggtgaattaagaggcaagcctcaaggtgcgtatcagctggtaaagtgaaagacatgtgggtcaactgtttagattaatgggggtaaatggtagaagagtatgtgtttgtttatgatactgagagaaagaagacagaaacaagagccactaacaccctgaatctgagtgraaaaaacctcatactccaagtattttgttttgttttgttcactctacaagtatttttttttttctgttctctctacaacaatcaactcagacctctgaccaaatatgtggaggggtgggttcccccaaataagcaagcaagcaattctgcagcagaaccagctgagtgacctctaatccaatcaattctaacatgatcttcctggagataacattagataccaaatgttgagggtttagtccccaagactctcccctccccacttcagatgccaatcacaagctccagtttgttttacctgtgcttctgaccaactggctataaatcaggttcctatgactctctccttggagtcagttaatttgctagagtgactcatagaactcagggaaacacgtttactggtttattataaagaatattacaaaggatgcagatgaagagatgcacagggcaaggtataggaaggcacatggagcccctctgccctccccgggtgtgccaccctccaggaacctccatgtgatcagctctccagaagttctccaaaccctgtcctgataggccttttatggagacttcattggattttcataaccatgacaacaatgtagaaatatgattggacaaaaagggtgtgatctgatactaatagcctgacaaaacccagcaaagcctgtctgttcagattcttcttggtctctctgtgcagcatttctacctccagggtatggaacaggacattttctgaaataggggttttatgacccataatcagacaaggtaggtcagataaattatttatggtcagctccaagaaagcaagttgtggggagattagagtatatttttagtttccatagcctgccttagaaataataaaggctatgggagttatgagccaggarccatgaatgaaaatctggaggtatatatacacatatcataatatcacactgagtcagagaaggccttgcagaagaagtaatatctgagttggcttttggagaggaggaagagggaaagtttcttagtatgaggacaggatatggaaggggaggttgtttggggacatgagaaatagtgtcttcaaaagcactgaggtgagagacatctggtatattcaggaaaaagtgagaagtagagaatatggaggagaatagtgagaaatgagactagagaggtaaataattgtcaggtcccagagactttgattaccttgcaattatgtaataggcaaccatgaaagtttcctattacaaatggagtaaattggaagtatacatggaaatcttaaaaattcttatccaaattctacaaatggaataaattggaagtatacacagaaatatttacagtgggaactacragtggattcatgtttgattttcaacataaaatggaataaccaaaaacaagactcattgcaagtaccggtttaccagcaacaatttgagattccttgaaatacagctgctttgctgggtatctgtgggaatgacggacttcagggtgcttgctgtatggtgaactgaacttgagtgaatcttagcagcctmagtagaacaataattttaagagtgtattaaagaagagcttcaaacaatatagtccaaactgaacctctagggagccatagcagcctgacatgtagtaatcaaaaaatctttgagcaaaatcttctgtagaatattagttacataaagccaacatgcaaattgttctcagtcctgaaaatagtggttacagccacaacctaaagacaagttctatttttatatattgtgaatagtatggcttatgcctaaaccgtagacacacaggtcttgttctcacgcaaagggtgtatatgctcatatgtgcttacaacaaggagcaaggatgggtcactggtgggaggaggggttgggtggtatatatagaatacaggagaaaacctccatgatttctgactttactagcactcctgctaaagtaggatagcaacactcaccttttagagacctacacattacaaaaccgagcttacagaatgcacacaataaatttwaaaaaaattttttaaagccaacaggcaaaaatatgtctatcaaataactcacgatgttaggaacaatcaacagttgtaaaaaaaattttttttctctacactaaacaagtgaatgtttgcttttttttttccttttaaataaattatagttactgattgtgttcatattatacatagtgggatcagagttggaggttttttataaattctattgttgtggtacattttaatttactaaactgagtatacatattcttggtaactttctaccacctctaaaaatgagtctttgacagaatatattgtgcaaaaaaagatgataggaattttctgtataaatagggtgttttatctccatatactgttctttaacataagagaccttttttattttgctcatagtatgtttgaatgtttaaacatttaagtattaaatcatgaactctatcttattctttaactttctagagtcttaaaagctgatgatgcctttaggactgaaaattttaaggctttaataaatgctgtcagacatgttcaacagctactataaaccttctcttaaacagttaaaaccacagttctgacccagacccacacaatataattaaggcagttattggagtaagctagatttgaagttaacgtaatttcagcctatcatattttatacccacacttttgagggacatttgaatctagtgagctctgaaaatatacaagatatagaagtgcatattgagagataaatttgagtatatctgttaatgtttatgtcttaagattactttccttaagtcttttagttcttttaattcacctttcttccagtaacctctctgtttggctcttctttcccagatatccccctttgctagccattcctttaaaggagcagttaacctgtgtgtaacccagatgcctaatagtttaggatgggtgaaactaatgactcccggggaacactggtggagtcctgagtcccacatcctccttacaagcggctgtaagaggagcatgcagtaggaacatatatgaacaccagaggatgttatagtggcgttgtccaaacttgagtggagcaattgacagttccacatctaggtttgtcaacaacaaataacagttggctatacatatctactctgagtagtttaaraacattttctttggagagtgattgttcagttgttacataatctctaactcactgattctaaaaattttcagattaaattaatgggcatacctggaagaaaaatagctataggttggttgtcaaatagatggtgattagaatactattggcgattgatttttttacttgatatgagtaaagaccagaatacagaatagtacatataataggatattccatggcagatgtgttttatatggtactttcaactatttgcccctgagctagagtatgagttagatgtttctaaaaagatcaagtctaacatgaatatatatatatatatawgtgtgkatacagatctttaataatatttactaaatgtttttatttttatttttttttttagacagagtctcgctctgtcacccgggctggagtgcagtggcaccatcccgctcactgcaacctctgcctccctagttcaagcaatattcatgtatcagcctcccgagtagctgggattacaagtgtgcactaacatgcccggctaattttggtatttttagtrgagatggggttccaccatgttggctaggctggtcttgaacacctaacctcaagtgatccgactgcctcagcctcccaaagtgctgggattaccggtgtgaatgactgtgcccggcactaaatgcttttatgaatccagaaactgtgcccccagagagcttatgatttgatgaagataggtcagagtatgggcagtataaaggagtatagtataaaaaaataaaaaggagcattggcaattcaaggtgggatgaaattgtggaggattttttcttttctttttttttttttttttttttttttgagatggagtcttgctctgtcgcccaggctggagtgcaatggcgcagtctcggctcactgcaagctccgccccccgggttcacaccattctcctgcctcagcctcctgaatagctgggactacaggcgcctgccaccacgcccagctaatattttgtatttttagtagaggcagggtttcactgtgttaggatggtytcgatctcctgacctcgtgatccacctgcctcagcctcccaaagtgctgggattacaggcgtgagccaccgtgcccagcctaattgtggaggatttttaaagctaatagattagacttaatgtaagaaccaagtacttgctgtacatttcagaccaggcagataacataaagagagtgggattttaaaacattaatctgatcagagccaggcacggtagctcacacctacaatctcagcaactcaggagactgaggcaggcgttcaagaccagcctgggcaacatagtgagaccctgcctctaaaaaatttttttaaattagccaggcatggtagttggaggctgagacaacagggtcatttgaacccaggagttcaaggcttcagtgagctatgattgcaccactgcattccagcctgggtgacagagtgagaccctgtgtctaaaataatacacttgaaaataaaaatatgrtcagagcaattggaattgtacaacagtagtcaattgcattaagataagtgtaaagttcaaactgtagtagtaagtgcagtattagtgaggaaggggtttctttccaagatttcaaacaaatacatagaattttgtgggaattcagacgtaagggatgaacgactgaagcgtcagagtcttaagagtttgagcatggttgaatagagtgacctgtgaaagaccaaggctgtggatgtcagttttcatggcaatgttttgaggagtgtagataaaagtatgagaggggatgagctggaagcagccagtaggcttagatgccttaaatagtatacatttaatgtgctaaagggcgttgatgaaggaacagggagcatgctatttagagaagtgagcatggatatcaccttttaaaccattagttagcagtggctcaggtattttctcgatttagagactatagcataccatgtcacactaggaaagcgtatatgaaaatccagacttataaaaattaaagagtagttgcatttaaaaggattcttcattttcagcaggattagtcataaaactcattttaaagagttgaacttcttaatataaaagaagatgwtttaccaaaatttggttagaatgcagtcctttagaattgcactttttggggacatctgcattcaaataatacctgtcttctagggtaaaagatgccatgggaaaaattgccaaaaaaaatgttagcagtaagaaccttttcaacagggaaaagttagtttttaaataaccacttgtacatactaccctgtgacagtaatattcttcactaagtttgttttctatactatttcattttttctgacagttcctttctccccatccctactccttataggtatatttggcccgaaaggaaggatcatcttttgcttatatttcctggaagtttgagtgtgggtcagttggcctaaaagtagatagcatttctattagaacaagtagtcaaacttttcagactggaacagtagaatggaaattgcgatctgatacagcacaagtagaactgacaggcggtaagcatttgcctggagaattaatcacgaaatatatatttaccactctgaagactaattgtacttatttgagatgtagctctttttcgtacctaagagttattaatactatttcagtaaaaaaaaaaaaatttaataaaccctgtgtgatcccattgtaacagaaaggctgatgttttctgttgtgaaatacaaatgcaaggaaaaaatcatttctttgtttcaaaggatgcatttcttccataaagaataatttgtatttatttttaagggtttattttaacttatacatcagcctatataaaatacatttcaaaatgatctgtgctctttaaattaccaaaagcaaaatgttaattttttttttccctctaacagataacagtcttcactcctatgctgatttttctggtgccactgaagttattttggaagcagaattaagcagaggagatggtgatgtcgcttggcaacacacccagctgtttagacaaagcttaaatgaccatgaagaaaattgtttggagataattataaaattcagtgacctttgagaacctgaacattatagaaaagctggcaataatcaaggacttactgaagtagtctgttggttcagtgcatscttagttggcagttaccaccctgtgctagcatatttcttttgctagctatccatcatgtaaccctcatgaaaattatctttatacgtggactataataaaatattgaattaaaacctttcttccatatgtgactataatttggagtaaagtcttgttgactcaatatgggattttaatctaaaactgtaagtatggttttaaaagttaaataatgatattcatgattaaatgctattcatgattatgataaaatcttgggcttatgatagtaatttgacattttctgatcagccattcatttcttcagaagtggttaaattagagtctcctaatatttttaattaatgtgaaagtacagtagctcataaattatataatgcatgaaaatttatatgattataaatattcaggcatttaagaaataaaatgaagtattttgccttacatctttttagtggttattttggctaaataaaaatcttttttctaaacattgaaaaatacttgaatagatatgagttatgaaaacatttaacattgacaacataaactaggatacattttaaattccataatacgtggacattttgaaaatgccttacctttgagttatatttttatctacctcattgaataaaatattcttgattttgaaactatgtaactatattatacagtatctatatgttgtatcaagaggttttgtgtatattctgtataacctctcaaatttagtgaacatttattaagcatttatgtacaaagcattgtgatagcactgtggaggaagcagtggtgaaaaagacatagccccaagcctccagattcctttgtgatattctgcaaagtgagttctcaactctttatacaagaaaaagacacactcaagagtctcaccctgtgccactcaatagaacgtgacatgtattataaaatatataataagatctggaaacaaaggtcttatatttattctttttttcttttgagagatgagatgttgctatgttgcctaagatgcttggaactcctgggcttaagcaaccctctcacctcagccttccaagtagctgggactacaggcatgagccattgctcccagctaatatttgctttataattgcagtaaaactctgttgagaatcattttttgctaaaaagttatatttcaaaagaagtttatgcatctgaaattattaatatgtcttgaatataagaacgttttctggaactctcagactcaaaattttaacctatagtggccaagtacttaagattggaagaacttgacacttacctgtcttgtggtgtctgctattggcacagtgagtattttgatgatcatatgggctaatcctgttaaccagcatgaaaaaacctagaacttttcaagcagttttataaagatggtaatagaatgtaggaactcaactgaatggatgcattctaacttttactgtggctttaagcagaaaacattattcgagttcaaatgttttatgttgttatagagttgaactgtcaaagagaaaaggtagttgcaccctttttttgggaatacttttcaatatatatacatatttttcattttactttaagttctgggatacaagtgcagaacgtataggtttgttacataggtatatgtgtgccatggtgatttgctgcacctatcaacccgtcatctaggttttaagccccgcatgcataaactgtttgtcccaatgctctcccttcccttgtaccccaccccccgcctggccctggtgtgtgttgttcccttccctgtgtccgtgtgttctcattgttcatctcccacttatcagtgagaacatgcagtgtttggttttctgttcctgtgtttgctaaggatgatggcttccagcttcccccatgtccctgcaaaggacatgatttcattcctttctatggctgcatagtattccatggtgtatatgtaccacattttctttatccagtgtcattgatgggcatttgggctggttccatgtctttgctaatataaataatgctgcagtaaacatacatgtgctcgtgtcttaatagtagagtgatgtatattcctttgggtatatacccagtaatgggattgctgggtcaaatggtatttctagttctagatccttgagaaatcgccacactgtcttccataatggttgcattagtttacattcctaccaacagtgtaaaagcattcctgtttctccacagcctcaccagcatctattgtttcttgactttttaataatcaccattctgactgggatgaggtagtatctcattgtggtttttatttgcatatctcgaatgatcagtgatgttgagctttttttcatatgtttattggccacataaatgtcttttgagaagtgtctgtccatatcctttgcccactttttgatggcgttgttttcttcttgtaaatttaagttccttgtagattctggacattagatctttgtcagatgggtagattgcaaaaattttctcccattctgcaggttgcctgttcactctgatgataatttcttttgctgtgcagaaactctttaattagatcctatttgtcaatttttgcttttattgcaattgcttttggcgttttcgtcatgaaatctttgcccatgcctatgtcctgaatggtattgcctaggtttaatcagtgtataaaaatcacaagcattcctatacaccaacagtagacaagcagagagccagatcatgaatgaactcacattcataattgctacaaacagaataaaacatctaggaatacagctaacaagggatgtgaaagaccgcttcaaggagaactacaaaccactgctcaaggaaataagagaggacacaaacaaatggaaaaacctaacatcctcatggataggaagaattaatatcatgaaaatggccatactgcccaaagtaatttatagattcaatgctggtcccatcaaactaccattaacattgttcacagaattagaaaaaaattaaatttcatatggaaccacaaaagagtccgtatagccatgacaatcctaagcaaagagaacaaagctggaggcatcatgttccctgacttcaaactatactacaaggctagagtaatcaaaacagcatggtattggtactaaaacagacatatagaccaatggaacagaacagagacctcagaaaaatacacatctacaaccattgcgacaaacctgacaaaaacaagcaatggggaaagaattccgtatttaataaatggtcctgggaaaactggctagccatatgcagaaaactgaaactggtccccttccttatacaaaaattaactcaagatggattaaagacctaaaacactttactttttttgttttgttttgttttgtttgtttgtttgtttttgagaccgagtctcattctgtcacccaggctggagtgcagtggcacaatcttggctcactgcaagctctgcctcccgggttcactccattttcctgcctcagcctcccaagtagttgggactacaggcgcccaccaccacgcctggctaattttttgtatttttagtagagacggggtttcaccgtgttagccaggatggtctcgatctcctgacctcatgatctgcctgcctcggcctcccaaagtgctgggattacaggcgtgagccactgcgcccagccaaaaacacttttcataaatatatttcatgagattttcaaccctgagcctacccaatatatgttagtagatattttattattcagaaaagtttggaaatggtacagaaggtatgggacaacacagttcttgatgatgtgaaaagttaagtgacagtaaactggtaaggcaaaagtaacttaggcaaagaatggccgatagtacagacccctcagtgagcgaccaatattaaggtacattttatttaggatcttctgattaataagctttccactgccattgcacattatttaaaaagaatctataccctggtttcaggtcagatcccatcatgatgaattccacagacactgcttgttgctgcagtgttttatttttaagaaagtcctttgctggaaaccacattctcatggtgaacgagaagtacatctgatgctttgatcaattcacaaggaaaatagtgcttctgattaaaggagggccagagaacactttgtcatagaacacttctgagatagaaagggttgttagagataatttaacccagatttcttacttttccaatgaggaaaactcaagcccagagaagggaaatgacctgtcctgacaattcaatgaatcagtggtgtaggcaagattcatttctacatctatcaagttgcaagtttatagaatcagagacctgtaagtgggttgctgttttaataggtgttatgtgaatatagatactttaatagaaatgttcaagttgagaaggtgttacaattgaagttagaagttattaatattgaaatatagaaactttaatagaaatgttcaagttgaggtgttataattgaaattgatttttctaaccatagttaagcttttctaaagactttttttcgtctacaacaataagttgtgttttgattttatagtaccagcagatacactcttcataaactaataacggatccaggtagcacaccttccttaaatacttttgggagaagaagaggaaaccaatacaggtcatgattggttttatttctcttagcatgtattcagttacactctgcatattgaccaaaacagttttatttctaataagagatttagaatagacctaaaccaatagtcaccactttttgagtttttcctaagtgccagtgactttcattgtctcatttgatcatgatggcattgtacagtagatactgtatcttatccccattttatagatgatgaaactgaagaattaagtgggagccagtattttaatggctgtgtgtccaacacccctttcctatttcttaagccacagtgaaaacagacttagaagttgcgaccttgctctcttctctcttagttttctgaagacttgctctgggcataacgaaattgttttaaaacgatataacaaaatattataaagtaaaagtgctgcctccacttcccatgctctacattattttccaagttaactgccaaaaattttacatgtgtccttctaaaggtttcctgtggattttcatgtctatatatgtatacacagaaacatatacacacacacagttttcatgtgtttgcttttttatgtaaatgaaagtatatccttttcccgcttgttttttaactgaaatcattccttggtcagtcatggttctgctacacttatttttaactgcttcacagaattccgtaatttatccattctattatttacagatatttagatttttccctttttttggttattaaaagccctgctacaatgagcatccttctacacatttctcttacataaaatacatgcaaaggtatgtgcattttaaatctgactagctactgtcaaattgccctctaaagataatttacacacccagcagtagtggttgagaacaccgatttcctcccattcttaccgaaactgaatatcgcagctgtggtagccaaccaccagagatccccgccgcttagcttccataccctttgggttgtcccttttatactaaattagagctagcccatgtgtccaatagaatatagtgagtaataatgtggtatttccgaggctaggacataaaagcctcggctttcttggactgctctctcagaaaaagccagttgccatgcccctaggacactccagaagatctgtggagcggaaccgaggcctgcctccaatcgcaagcaccaacttgccagtcatggaagtggtttctcctgccccagtcaagcctttaaaaactgtagcttcgagggaatgagacaccccaagtcacaactgcccagccaaagcactaatgaattcctcatgcatgcacagaaaccatgagagataataaatgatttttaaaagacattatttctgagtgatttgtttatacatcattagatttccaaaatagcagttacttttgccattctgaactgtgaaaagtatctagttttaacttacatttccctgtttacttgtgaggttaaacagtttttcaatattcattggccatttttgttttgtatttaaattttctatgtatatgtattatatataattatatgttaatatgtttacaatatgtaaaattgaatttatgtataagcacactcatacctttttctattggatgggttctttgttttgataatcatatttaatatccgagtctttttttttctttttttgagacggagtctcactctgtcgcccagcctggagtgcagtggtgcgatctcggctcactgcaagctccgcctcctgggt

SEQ ID NO: 95418 - DNA, 79553 bp, Homo sapiens
  misc_feature (1)...(79553): n = A,T,C or G
gctttttaacacattgccaaatatgctatattgccaagtatgttagccaacttggcagtatgacaaaagggtgaggtttggagtaagagacttgggcttggatttcagtttcactacttagctctgtgactttcttttttttttcttttgagatggagtctagctctgttgcccaggctagggtgcagtggcacaatctcggctcactgctacctctgtctcctgggttcaagcaattctcctgcctcagcctcccgagtagctgagattacaggcatgtgctgtacacctggataacttttgtattttttagtagagacagggtttcaccatgttggccagcctggtctcgaactcctgacctcaagtgatctgcacaccttagcctcccaaagtgctgagattacaggcatgagccactgcatccggctgctctgtgactttctatgagctttaattttcttgactgaaataagaatgatgatactacctctcttagggttgttggaagttaattaagctagtatgtgtgaaagggcctgactagtactgtaacaaattgataccggggttctcaataagtgaggttttccttcttaatgaaataaagtataagcactggcaaggctacagctgatctactttcagaccagaaagtgtttcttttctccactcagtttcacacagtttgatgcttttgttctccatctcccctctccctcaattgttttggtaccaataatttctttttttccttccctcctcacaccatcctgtttctcactactaaagagacacaatgcttcaaccaattcttcatctgttaaccgataaagttagcagattaaagtttaaggtattttaccctctctggtagtcaaccaataatacttgaaaacacaaaagactcaaggatgctgaagaatgaatctcaaatggccaagtttcagcaccaccatggatggtgcatgaaatttttctgagggaggcttcttgataacacctcatatccttttgtaaagcaattatttattgaacaccaactgtatgccagacactctctttgacaagctagcactgtgtggtataccctttattgaataggctagtcttactcttttacttttcccaaacaacatttaaaatggaaatatattccttaaagagtctgcatttctcagcctccttctggatctttccacattttgacaatcatctcaaagaggaaagctgatagataaagatactagttatatatgacatctgggctgacctcttaattcttaagaaacagaaataatttgctattttctgttattaattggcatactaaaagatggtatcttttcgaatttttgatttttaattaccaccttacataacttgcaggtaccttttttgttttgttcctcccaaaatgctagaattacagacaagtgccactgtgcccggccattccctactcttctgaaatgaaaacagtcgagttgggaaagccactgctgtctcattttttaagatgtgagtcttataaacctatgaagtaacaatatcagatgactgtgggcaaccagaaacttcaaatacaacttagtaatacacatgatagattgtgtatcttgttggtgaagggcaggtgcatgataacatctaatgtcccccaaagcagaattttctcaaaacaagatgcatctttgaaagtccatccaattattagacatttttacaaaggccaagagcaactttcttaagacacatgctaattttattctccacgttgtatgaaaaccctgaattattattgagaaccctgaattactgagaaccctgaatattattgagctatatcatataagtgaaagtgtcccttctgtctgtataattagaatgtcaccagaagatcagtgtagcttatttgaccaaaaccaatctaaacaaactcctgcaaaacaaaaaatcaaaacaaatactgtaccctgtaattattgcaggtagaaattgaagaactttacctgctgtctgtcttcctagtggtaataatactcaggaatatgatcattgatatcttcagccatccgcaaacacttgttacttttggtgcttaaatatcattttaaaagtaaaaatatacttataaactgtagcaattaaatagttagaagaagcagagttaataatgtactataatatttactagagaaatactgaaaaccaaaaagtcacattgatagtaacttttcttccttgagctcacttctaaagaactataacaaactaaattacatttaaacatacaatagtcattaactaggcaatcacttactgagtctaccataggccagacattaaaaatttttcttagtccagcaaccttgtatatcgtaaggatccacaaaattaatgcaatgagaagggagaggtgaaattatagacattgaattttgaattcaaatgttagcttctttaaatgctcccgaggttaaagatttgtcctcctcctcccaactgaatctcagtgttggaatgatacacaacatttaaatggaaactattgaaactttggcagatacctagaagtatggttttgagttgctattttcttggataatttacttactgattaaattacctactgtgtataaagtgtgatgataggtgtggctcatcaggtaaattgtttattttttatgtatatatatatttttgagatggagtcttgctctgttgcccgggttggagtgcagtggtgcagtcttggtgcactgcaacctccgccttccgggttcaagcgattctcctgcctcagcctcccgagtagctgggattacaggcacatgcccagctaatttttgtatttttagtagagatgcggttttgccatcttggcaaggctagtcttgaactcctgacctcaggtgatctgcctgccttggtctcccaaagcgaggtaaattgtttattaaacagcaaatgaataaatataaaattgcttttcaattaaatgattagcttgaaactataattcaagggtgaacttaaggcagaaaatgcgtcttcatcacctttttaaattcccaggtcctgagtacctaacacagtaggcatttaatttttttttcattgctacaataaggaaatataagatctaaaaatagaaattctgaagtagttaggataagctcctatggaagctactcagaaatcttgattaaataaagacctttatacagtttatagaaatgactaatttctagtttttccttttggtcagtgcttgctgtggggtagaaattaagtcattatatgtaatatatacatacaaagtagtatctaaaactagacaaacctgatatagaagcttttttttttttttttttgagatggagtctcgctctgtcgctaaggctagagtgcagtggtgcgatctcggctcactgcaacctctgcctcccaggttcaagtgattctcctatgtctgcctccccagtagctggaattataggcacaggtcaccacgcctggctaatttttgtatttttagtagagaaggggtttcatgatgttcgtcaggctggtcttgaactcctgacctcaggtgatccacccctaattgaaaattacttcacattaccccagaagagaaagctatgctcaagttgcgtacaatcaattttatcataaagatatgctaagtctgctgcacagttaaaaaggacaattctttagaagctgagatacttttaatctagattccgtcttccactcatcacaaatctctgctttaaaaatgttgattttcatgtatattcagcaattcttatttgcaattcttctgggtaagtcagtattttcttaaaactagtaacacttattaaaaggctttttcatactgagaagacaaaaggactcaatgcctcacatatgaggcaagtgaaaagaacattatttttattaatctatttgagttttgaatatattgttttattcatttcaaaatctgaacctaggctgggtgcggtggctcatgcctgtaatcccagcattttgggaggccaagatgggcggctcacttgaggtcaggagttcgagaccagggtggccaacatggtgaaaaccccgtctctagtaaaagtaaaaaaaattagccaggcatggtggccggtgcctgtaatcccagctacctgggaggctgaggcaggagaattgcttgaacctgggaggtggagggtgcagtgagccgagatcatgccactgtactccagcctgggtgacagagcaagactctgtctctaaaaacaacaacaaaaacggaagataaagagctttgacaacttaagtttaaaaaaggagacagctatgtattttatagcttagcttctacctagtacatcttcataaaaaaaactcattgcctttaaaattaccccttttcaaacaaaatacatgtgtacttggagatgcaaactcacagtaagaacacaagatcattttaacaagcactaaactgaggctcagggaagttaaataacaaggctatggatacttggtcaggttcagaaaagtttgcaccccaagttcaaggtaaagaaaggcttcactgttctgaagtccctagtatggcaaagttacatggccatcagagagctaattaaaaaaactatgtttaaattatttccatgtttcagagttctccacctctagactcagaatgcagtttaaagatgtgacctgagacatttttgttttcccttgagaggaaatgcacagttggaagttcacaaaaacacctcttcaaaaaacagtaatactgttttcatctttataaaaagctttcatcacaactctttggtggcacttcatgccttcaagtactcattttggtgatcgttggctcccttttagtctgtctcacaagccaggttataaatggtttgaaatcaggggccttgtttttactttgaacccatcgcagagcctggcacagcgtggcagagtgtgcgcccaataaatacttgagtggaattacactgaaaaacaggaagaagtaaagccatcttccatctgccaaagactgtgatgttgctgtattggtaattttcattcttagaaagctttaatgtgaatgaaattattccttactgtgcatttgaaaattccactgaaaacagttttaaaaattaagcatgccctcttagaggcagggggcacagttctggacagatgagaaaagtgacagtgacatctctgcattgttcagagaagaaaggtcaacaaagagtagaaatagaacactcaacccaccctgcattctttccctagaacattctctgtgtgtcccttatcatttaagcttttcatatgtagttttcttgaaactgaccatatgctcttttggggtgaggggaggagacggaagaaggagatggagaaggtctgagatgatttttttcgacagcagcgtccacttaggcccttggggaggccgggtcacggggcctccttgcaccagtggtctacaacgtcttgcctgcggtttacaaccgctcttttaaaataatttccctttgggacggcccccggcttcttcctgccacccccatccccaccccgcccccatcctcatccttagaggccccaggcaaacgcttcggattcccggttaggtctcagagtaaacagcacgcttggaggattacaatcgacccgaggccaattcgaccctttccctttgccgccctcaattgacccttgaagcagcccctgctctcccttcaaatggaaaacccacagacacacacacaaacaaaaaccccaagtcttcctttsggttgctacccgcaatgacgtttcccccctcgggtcccgcccctccagggggcttggaattttgggattggccgagaggctgtggcgacaaggcccggattggacagcatggcgctgactgacagcgggggsggccgccgcgccctccctctctccccggtgtgcaaatgtgtgtgtgcggtgttatgccggacaagagggaggtgaccgtggcggcggcggyggcggctctgtttattgtccctctcggtgtgtgtgtgtgaggaaatcggggctgcagcgaggctaaggctgcctttgaagcagcggcggcgaccgggacgactactctggcgactcgagtggctggccttcgcggagtgtgagaaggacaaggcacctctgcgtcctcgccacgtccgagcgcctcgggctccccggccgccctcgcggctcgcacgcccgggcttcagcccggcctgcagcggcgcccgcgggcgggcgagaaggcaacgccgccgctcggccgccgccggtcgctccctgctttctcctcagccgccgcgctaggcccgggcgacgcggacgccgcgcctcgagtttgagggcagccggcggcgcggcctcctcagcgggctcggctggacgtccgctccggatcttcgcgatggggcgcgggggtcggcgcggctaggagtgcggcgagtggagcggtgggtgcggagcggcggggcccagcggcccgcagggaggcgggagcggcggctgcggcctcagggcctgtgagctggaggcactcgccatggccaagtcgggtggctgcggcgcgggagccggcgtgggcggcggcaacggggcactgacctgggtggtaagtggctggtccccgggacgggcggctgcattgttccgggcccgcggcgggggcggaattccgaacgggcgggggaggggaaagggagggaaatcccgtcccccgaacgggcgctccataggggcctgtgcttgcagaatcctccagcccgctccccgcgccttttctttctttctttctctgtacgtctctggaagtcctgactgccagagcgtaatgtgtacttgaaactttggggggacaaaaccgcgaacgtaacatacagcccccgcttcctctcttttctttttaaccagactcttccggggcagccgaacctgaaatggtggggatggcgataatgcaagtgtgtctgtgtggggcagcattttctccaaatgtagttcaagaaaaccctgggaaaaggggtgtgtgtgtgtgtgtattctaaatgcagctctttctggggctttaatctcaaagaagaatgcattgggatttctacagcaacttgcacttcaatttggaaagcctcattcaatgcgctcaattgagagcgcattggggatgactttcacagcagttaatactgtaggtcgtccctctgtcagggtgagattattaaaagaagtgcttgtctacgtcagcatcgcaggtgtaacggggtgagggctgaatggatgtcctggagaggtgactgaagtgcttagtcctgaagttaaaggatttcgacgctcagttcttgctgggaagtagaagtaactgcagcggaaggaggaagggagactggattcccacgacagatcgataattcgccggcatttcacttgctcagcgtagagttcagaccagggtcatttcctatacagaaaacctaggtatttcggagaaaagtaaaaagtgttacatttttctggacttttgacggtctgttcccccgtccctgttttaaatacctcaagggagctttcatataggcatttttgttacttagttcgttttctctttgtttgggtgaggtttgggtgagttgaatagcaatttgtgctatattgacaactgcttcttataaaaagggtgctactgacagcagcaaaacattttaatcacttatgtttgcgtgccagggtacattgcaaaataacttgycatgctcttattgttgaaattctttgaatgttgtatattactccgattatgtagaatgaaagtatgaagggactagggccaggagagaaaatgtcagatactaagttagtggtccatgtggacttgcagtagagggtatgtgagaggaagaaggaggagatggacacatacatgcaaaataatgactttcagaattaatggcttttacccctgtcactaaaatcagacatcggaaaattgacttagacagccaaatggtattgtaagttctcattcactatttggaagtgttgaggcctgatcggtgtttcctctgaagacctctggttctataatggtaaacattttgctccgtagtggattgttggctttaacatttgatagcagtactttaattaactgttatataattttgtagataattaaatgacaatttatttctttcaagctccataggaaactcattgctaatttagcaaaacttggagcatctcattcaagatagaaaaatccatttgaaactgaaattgacttattgattaaaggaattttcattataaagcagattatggaaaatatgggaaatgcagtaaaataaagagaagtgaagatcacttagtgttttatttatagagtatatcttatggaattagaagtttattaaaaagataatcactcctgtaagtcttctttaagagttgatgcttactctaaggttatatgagcatctttatgtccataatatacatcattgatcatatagactggtttgattttatgggaggcaatatagtgaggtagttatgggctttgacgtcaggctgatgtaggttcagatactgtctctccaacacatttagttggacttttcccaaggaacctaacctttctaagcctgtttttttatctgtcaaataaggttgcattgagaatgaaatgagataacgtgtgtagcacagtgctgggcttaatgatgtttgttattattggtgaacttcaagaaatgcacactcaaataatagattgcagttgcttttacataaaatatcttttagctggggtaaaagcaaattaatttttcctttgcacgagttggggctttattgcagtggtcatctgttttgagaaaggtaacttcgtctgctttattgaagctagtgttatgttgccacctgcttgtggtaacagaaagaaataaaaatagaattagcccctgatttctttcttctgggtgaggagttgtatgccatgtgttgctgatattaactactgttgggatgcatgccagcatgtgttgttaatgtcattgcatgaaaatttgcctttcaatatctgaaactacaaagccaagtggttttaggactggcattaacttattttaataattcatttggtttgtgtttgatttgtaggagtatctcaaccagaattttttataattaaaaaaagtgaaaaatataaacatggcaaagctattttgatttaaaatgtatagcagttacaaaggcttctcttaaggcagcagggtttcttgaattaattctttgtagagctttgattagtagatagtaatagtctggttcattctgtcagtcttgtatcataagtgattgtaacaaagacatttgtggaaatactagaatacagttatatgacttaatctttttcccaacaatattctaacttggtagattaaaaaaaatttttaatggaaaatgttaagcatctcaaaaagtggtaaccagagtagtataacaagcttccctctatttagccttaagcttcaataattatcaacctgccgggtgcggtggctcacgcctgtaatcccagaactttgggaggccaaggcaggcggatcacctgaggtcaggagttcatgaccagcctgaccaacatggagaaaccccatctctactaaaaatacaaaattagctggggtggtggcgcatgcttgtaatcccagctactcgggaggctgaggcaggagaatcgcttgaaccttggaggcggaggttgcggtgagccgagatcacgccattgcactccagcctgggcatcaagagtgaaactccgtctcaaaaaaaaaaaaaaaaaaatcaacctaagaccacccactttatcccttctcattcttttgaagcagagcaaatcctagaattttatcactttctctgtaaatatttcagtatttatctctaacagtaaagtctctttttgaaaaactgtataaccacaaataacattgtagttttctcaaaagtcacattttttgaaatatataacatatttttggagtgtgaatatctctaattaaacatgactatgtatttaaatattgtttaaagatttattttaagaaccttgctttagtggtttactgttgcgagtctaaattgctgagccagactttcataaactatgtgccctttccaatgaaatttatttattatagtctccatagttagatttatctcttcactgtcccctacacaagttakgcttgtttttgtcactttgtctttacatatttgccttccatctggaattactttttcacttctctttactagtctaaatcttaactgttcttcagggctagctcagagccttgtcacattattattttccagttgatactcatctttttctttcattgaatgtttgttactctcatgaatcataaaacagaagtctttattttttatgtaactttcatgcatgataactttgccttaatattacaaatttctgaagttagagagcatgtattttccttgtttatgtccttcagagtgttaaacaaagaactggatacgtaatccagtctcagttatttaaaaattggataattgacatgctgacttcctaaaaagtcttctgtcattagtaggacaagagtttaagtagcagtgttttttagatacattctcaagtacatgatatagcagtatttaggcacgtttttaataaacttaatttttctgaatcgaagtatgttcacctgtaatcccaggtttgttggttaggtggtggcaacaattgcattttactgagtacactttaaaaaataaacttcttgaatttttaaaagtattaacacgtatagaaccccattttaacgaaaagttgaagtagctatagttattcctatttgcagagaaggaaacgggtttagagattaggtaacaaattcttaggcacatggttaaggcacaggtggaatttaaaccagactcagtgttcttaacatttacacagccttcaactttaaaaacattgaaagacaaaacaactcatcttttatactctgataagacagaataaggagacatctgggatatacctgtctttttctactaaccttttactttcatacaaaaagctaaggagtrtatttccttttcagaatatgtgtacttagtatagcataatgctaagagtatgggctgtgaaatcagatcatctagtttcataattcacctttgtcaagtactagttttgttagctttgggaaaacacttatcccaaccttagttatctcatctgtacaaagggaattataacagtgtctatttcatggagatactatataagaattaattaagattatcgtagtgcttggcacatagtagctcccagatgggttcacacatacattctcccttcttttttaatccagtgataagtattttcattccctttattatagagaaagcctattttcatagcagaagtctaagcatttgttactgtcttaagtatctcttatctcttccttgcccctttgtttagaagggtatttctgaaggagcatagacaggggacagtttgttgctttttgcttcattaatggtgggtagataacatggcctctccatttacatataggtgaaatatggttagaatgaacatcatgggatggcagccttgagggagaaaagagagaggagacattataaaaggttggtgttaagtctgaggggattgtacagaagaaggtaaaagaaggggctcgttgctaggctgccagcccccacttccactcttgttggcctggtgatggtgagctttctgtgttgattatgtgaatgagtggctcagttcttttttagtaccaactggcaaaccatctcctttaccctgtttgtcagcaattcattctccctcagaaaaacaaactgggtgcttctgccaaattgctatatttcaggtgacaattctgtccattgaagaatcttttgttttgttttgcagaatgatcttggtgtatagtcgttctgaaaaataggaagttttactggaatgttttccattttcttctgaagactgagaaatgttcttgaaaaagatcaaatcttggattagtattaaatctgtttttttattaggcattagcaatattgcaaaagtgccataagataggttaatatttaaaatatatagtctatatagttattttggtatttttgttataattttaaattttccctaaatgctttgtttaatttggcagctgacttgaaattcagaaaaagtcaatgatgttatcatcatatttataaatgaaaaagaatataattaaaacaacttttagatatgtgtaggaaatttaatatggtgattattttacacttttattgtcttcatgataatgaaaatgtagccttgattttttagattccaatttaattggatgctggcattgtttattactatcagtagtttggtaatttgttcacataaattaaggcagggaaataaattacaaataaacttaacaagttttcaatcgttagtctcaacgcaaatttattcaaaatgcttttggtaaataataataataattattattatatattttttgagatggaatctcgctctgttgttgcccaggttggggtgcagtggcgctgtctcgactcactgcaagctctgcctcccgggttcttggcgattctcctgcctcagcctcctgagtagctgggactacaggcgcccgccaccatgcccagctaattttttttttttttttttgagacggagtctcgctctgtcgcccaggctggagtgcagtggcgggatctcggctcactgcaagctccgcctcccgggttcacgccattctcctgcctcagcctcccaagtagctgggactacaggcgcccgccactacgcccggctaattttttgtatttttagtagagacggggtttcaccgttttagccgggatggtctcgatctcctgacctgatgatccacctgcctcagccttccaaagtgctgggattacaggcgtcagccaccgcgcccagccggtgaattattatttttaaaggcatgttgttaatttttattcaatgtggagtactgtgagcaattgctatagaacatgatatcttattactgtgaacatataagaataaaaagaggtaaaatcaaaagactcttctgggtctaaagtgagtataattctgttagcctgcatgtgtcagatatacatcactctcttttatgatctgtaaagttgaggtgcttttataaacatgcagataggagtttgctagtttgtggttgttcaaggcaatttgctgttctcttttctgaatattgtcagcaagagtgttaaaattgaagagctacccagggtgacattttttttaagagatagagatagtgatgataacagcaagggagaaggtgcagaataggtttctcatttagcttctctcttctaaggccaaaggtggtttgtattaaatatgcatacctgttctagggatgggatcatcatattaactgggtaagttgccctctctccccttaccccagattttgatttttagtgacctggacattgctcaggggacaactttctgctgayaaacaggagttgaaagagactattatttcaggtttctgttacaaaaacatataaaagtctcaggggagaacctcctgtgtttgccactagtgagccagtgagcaatgtaaattaccatttgttgagaatgggaacgtaaaagacaaattggattctagtgttaatttctactttctactctgscaaggctgccaatcttatttgtgtattttgattttgtttttgcatagcctctagtgagaaagttggggttgcagaagtaataaataggtgtaaacattgcctctaggaaaagaaaccttcagttttattctagcttaattatgttttcacatacttgggttaataagcctttaacatatttctttatgcattcattgtagaaatttagaaaaggtgtagaaaagataaaagtggcatgtatttctactctatagataatttttattgatattctgttgggcatatttcacattttttcctatgcatgcatatattatgcataatttttttctgacaaaaatgggctcatgttttatatatactcctttgtaatgcccactaaacagtgccattttgataaactactaatttaaacatacttgattatctttactaatataaattttctataaaaactagagcaataaaagattaacaccaattatttttagtatagtaattatagacttatttactcattgaaacgtccaagtttaagggtttatattaaggatttttgtttgttttttatctatttatttatttatttatttttgtgatggaggcttgctatcacccaggctggtctcaaattcctgggctcaggggattgatcctccggtctcagactccagagtagctgggacgacaggcctatggcaccatgccctaggttttataagttgtttgatattataattggcagttgatttgaaatatctgcaaatgacttccattgtattctataaataatgtgtatcccttaaggcttttcctgactttaaatagaatggtatatctttttctttcctcaatagttgtcatatgatatttagaaaaaagtgtattgtcacacattcatcacacttattttacagtatttctatgttcttcctagagaaaattacaaataatattagacaaagtcatctacatttcacatgttcaattttttttgttgtaaaaaaatacaacattaaatttactgtcttagccattaagtgtagagttcggtagtgttaaatatatttacattgttaagcaacagatctctagaagtatttcattttcccaaactgaaactatatctactaaacactaattccctctccccccagcccttggttaaccacctttctactttctgtttctatgattttgattactgtggatactttatatgattgtaatcatacagtatttgtcctttgtgactggcttattttgtttagcataatatccttgaggttcatccatgttatagcacatgacaagatttccatgttttttgaggctgcataatactccattgtatctatatacgcattttaaaaatccattcatacaccagtgaacatttgggttgcctcgccttttggctattatgaataataccgtgatgaacatgggtgtgcaaatatctctttgagattttgctttgaattcttttggatatatacccaaaagtgggattgctggatcatatagtaattctatttttaattttttgaggaacctccacactatttccataatggctgtagcatttttctagcattttatattctcaccaacagtgtagaaatgttccagtttctccacatccttaccaacagttattttctgatggctgtcttaataggtgtgaggtgatatcttattgtggttttgattttcatttctcttattagtaatgttgattatcttttcatatgctgttgaccatttgcatatcttatttggagaattgtctattgaaatcctttatccatttgaatggggttattttgttattgtcgagttatagaagctccttatctattttggatattaaccatttgatggtttacagatattttctccattccatacgctgccttttcactctgtcagttgttttctttggtgcacagaaattcttaagtttggtgtcctgtttgtctatttttgcttttgttgcctgtgattttggtgccatatccatgaaatcattgccaaatccagtgtctcaaaggttttcctttatgtttccttctaggagtttcagagttttaggtattacttttaggtctttaatctatgttaatttttgtatgtggcatgagagtccaacttcattcttttgcttgttatccagttttcccagcaccatttgttgaagagactgtcctttccccactgtgtagtcttggcattcttgtgaaaaatcatttggccttttatgtaagggtttatttctgtgctctctcttctgtctgtatgccagtgccacactgttttagatttctgttgttctgtagtaaaatcaggttttgaaatcaggaggtgtgaggcctttagctttattcttctgattaaagactgatttagctctatgggtcctcttgagattccatatgaattttagatttttttttgtatttctgcaaaaaataccattgggattttggtaggaatggcattgaatctgtagatcactttggatagtttggacattttaacaatattttaagcttttaaatccatgagaatggaatgcccttccatttattggtatctttttttcatttcttttaacaatgttttgtattttgacattattctcacctctttggttaagtttactctgtggtagtttatcctttttgatgctatagtaaatgggattgttttcataatttccttttttgattggtcatggttactgcatgaaaacataaccaatttttgtatcctgcaacttgctgaaatcatttattagttgtaatagtttttctgtggaatcttttgggttatctactataagattatgccatttgtgagcataattctacttcttttccaatttctatgccttttatttccttttcttgtcttaattgctctgactaggacttctaatactatcttgaatattgataatattgggcatccttgccttgttcctcctgatcttagaggaaaagtttttagtctttcaccagtatatgtgctgttagctgttggctttgtgtgtattgcttttattatattgaggtgttttctttctatttctagtttgttatgtgtttttatcaggaaagtgtgttgaattttgtcaaatgctttttgcacatcaattgagatgataatgtgttttttgcccttcattttgttaatatagtgtagtacaatgatttgttttcatatttggaaacatccttgcatttcaagtataaatcccatttgcttattgtgtgtaatccttttaatgtgctgttgggtcaggcatggtggctcctgcctgtaatcccagcactttgggaggccaatgcaggagaatcgcttgcggccaggagtttaagaccatcctggacaatatggtaaaaccttgtctctagaagaaattttaaaattagccaggtgtggaggcacacagttgtagtactagctacttggggcaggggttgtggggtattaaggaggagggtgggtgtgctgaggtgggaggatcacttgagcctgggaggttgaggctgcagtgagccattgtcatgccactgcactccagtgtgggcaacaaaatgagaccctctcttaaaaaamaaaagtgctattgaattgagtttgccagtatttttggggggattttttgcatcagtctttatcacgggtattgttctgtagtcctcttgttctgtcttctagtttttgtatcagagaaatgctggcttcatagaatgattctggaagtgttccctgcccctcattttttggtaagagtttgaagagttaattcttctttgattatttggtagaattttcaagtgaagccatctggtactgggcttttctttgttgggaagtttttgattactgtttcatcttcttatttgttatagggctgttgagattttttattcatgattcagtcttggtagattatatgtttggaatgtattcatttcttctaggttatctaatctgttgccatatgtgtggtcatgtaagtcttttataatctttatttctgtgacatcaattataatgtcccctttcgtttctaattttagttatttgattatctcttttttttcttatgtaatctagctaacgatttgtcagttttgttaattttttcaaaaaacaaactcttggtttcattgattttttttcctcattgtttttctattctctattttatttatctttgttttaatctttatttcccttcattaatttggtttagtttctcttttcctagttctttgaaagggtctaaagttaggttgttaattcgagatctttactgattgttaatgttaggtgtaatactgttttagctgcattacataaatattgctctattgtgttttggttttcatttgtctcctgatattttctaaattcgcttgtgatttcatctctcacccattggttatatgagagtgagttgtttaacttccacttatttgtggattttactgttttccttctactattgatttctagtttaattccatttttgatggaaaatataccttatatgattatagtcttcttaagtttgttaagacttgttttgtcacgtaacatgtggtctttgttggagaatgttccaagtgcaattgaaaagaatgtgtattctcctgttgttgattggagtgttctgagtatgtctgttaggtccaattggtctatagtgttgttcaagttctttgtgtctttattgatcttctgtgtggttgttctatccataactgaaagtgggctagtgaagtctcctactattattgtgttggtctctctctcccttcacttctgtcagtgtttgctcataaatttgggaactgtaatgttagatgcatatcttactggtgaattgacccttttatcatataatgtcctactctgtctcttgtgacagtttttatcttaaactctatgttgtctgatgtaagtacggccactctcttcagattccagttttctggaatatctttttccatccttttatttgtagcctttgtgcatctttggatctgaagcagatgtcttgtaaacaacctgtagttggatcttatttttttattccattggccaatctatgtcttttatttgggcacttaatctttttttttttttttgagacacaatctccctctgttgtccaggctgaagtacagtggcacaatcttggctcactgcaacctctgcctcaggttcaagtgattcttctgcctcagcctcccgagtagctgggattacaggtggctgccaccatgcctggctaatttttgtatttttagtagagatggcgttttaccatattggccatgctggtctcttaactcctgacctcaagtgatctgcccaccttggtctcccaaagtgctggaattacagatgtgagccaccgctcctggcccaatttatatttaaagtaattattgacatggactcactattgccattttgattatttttttatatgtcttatagcttttttgtccatctttcttcccttgctgccttcttttgtgtttcattgattttttttttttttagtgacatgttttgattttcttctaatttctctttgtgtatattctacagatattttccttgactttaccttgccattacataacatatcttcaggtgataaaaataaattttaaattagtaacttcaatgccatatgaaaactcttccttttttcacctctgccctcccctgctttgtttttgatgatactttacctctttttatattgtgtatattttaacacagatttagaattattttttatgctttaaaaaattctatactatatttaagtgatctgtattactgtattacaatactagaagatgccatatttgtctgtatacaaatagtcttcaaaaagttcatggaaaatgtgtattatgagaaaactatgcatggatttcaaaattttttggtatcaaaataaacttgtactaacttgttataacgtgtctgaacaaaatctagtttgcggtactaagaaggataagacatcatttggaaaagagcccctgtcagagcaatatgaattatgctaaaattgaagcaagaacaaacatcaagtttatgaagaagcttaggtgaaagaatggtgaaatcattgatttacaatatgtttacagggccaatgcctcaaataaatgagcagtttacaaatggataacttcttttaagaagagatgagatgatgttaaagatgaagcctgcagcagcagaccattacatcaatttgtcaggaaaagattaatcatgttcatgcccttatttaagaggaccaatgattaatagcagaaacaatagctaacaccatagatgtctcagtcggttcagcttccacaattctatatgaaaaattaaagattcacagactttccattcaatgagtgccaaaaccattgtgcctagatcagctgcagacaagagcaaagcttttaatggaaattttaaacaaatgggatcaagatactgacacatttcttcaaataattgtagcaggaaatgaaacagggctttaccagcataatcctgaagacaaagcacaatcaaagcaatggctactaagaggtggaagtggtccaatcaaagcgaaagcagacaggtcaagagcaaaggtcttggcaacagttttttaggatgctcaaggcattttgcttgttgactttatgaagggccaaagaacgataacatctgcttattataagagtgttttgagaaagttaggtaaagttttagcagaaaaatccccaggaaagcttcaccagagtctttctccatcatgacagtactcctgctcattcctttcatcaaacaagagcaattttatgagagttttgatgataaataattaggcatccatcttataatcctgattttgctccttctgactttttttgtttactaatcttaaatctttaaaaggcacctaattttttcagttgataatgtaaaaagactgcattggcatggttaaattcccaagacccttggttcttcagagttgagctaaatggctgatatcatcacttataaaagtgtcttgacctttatggagcttttgttgagaaataaaatttatattttttatttttatcttttgattccatttttccaagaactttttggagtctccttggactttaccagggagttatgtatttttgtgttactgtgttgctattttttatccttttgctttaagggactccctttatcatttcttgttgggcaaacctagtggtgatgaactgtcccagtgtttgtttatctaagaaagtattaatttctacttcatttttgaagggcacttttgctggatacaatgttcttggttggcagtgttttttttttttttctttcagtacttcagatatattcttccaatcccttctatcttgcaaggtttctgctgagaaattggctagtaatctaacagaagctcctttgtaattgatgattcacttttctgttgctgcttttaagattctctctttgtctatgacttttgacagtataattatgatgtgtcttggtgtagttttctttagatttatccttggagttctttgagcttctttaatttgtatatgcatttatgtcctcagatttggaaarttttcagctattatttcttcaaataggctctttctccatttctccctttcttctcctttgaggcttacataatgtatatgttgttctgatagatagtggcccataagttctttaagctctttttatgtttattcattcctttgcctttttgctcctttcccttggcaattttgaaagtcctgtcttcaaatttgctgatttaaaaaaattctgcctgctcaagtctactgttacatccctctagtgtattttcaattcatttactgtatgcttcagttccagaaataatgtttgctacttcatcatagtttttatctttgttgattttttccttttgtttatgcattgttacaccgagtttttgtttgttcatctgtactcatttatttcattaagcatccttatggcagttaatttgaattctttgtatgacaatatatttccatttctttaggctcaatttgtggtgatttatttattatttttttgagacaggctcttgctctgtcacccaggctggagtacagttgtgtgcagatggctcactgcagcctcgaccttctgggctcaggcaatcctcccgtctcagcctcccaagtagctgggactacaagtgtgcactaccacacctggctaatttttttttgttttgttttgctagagataagatttggccatgttgcacagactggttttgagctctgggctcaagggatctgcctgcctcagcctcccaaagtgctgggattacaggtgtgagccactgcgcctggctgcaatttagttttttacattgaatcggctgtatttccctgtttctttgtattgttattttctgttagggctttggcatttgaaggcttagctaactctctggtctttgcggtctggtttcatactgggaagactttcttcatccagttagtctagctagagaatcctgagacctcacaaatcttttatggggatgcatcctctttgggtttgtaatttcttaattgaagaggtttgcctctgtccatctgtctgctccctctggtgtgtctttgtctgctttacttgtggcgtctcgtgctgtagtaaactacagtactggagctccaccttgtgtctgtttctgatactgcagggtctgatgctaaaccaaagcactttgcttttgttttcaatggccctcaacctggcaccctgttcaatgtcagtacttagattcagtcaagaagtttctagggtagcactgccctcagctgttccattggaggtatattccttttctgctcctccccagggagaaggtggaagttgttgttgtcttgtttgtttttctcaatcttgccttgctggggcagataggagggaggacatgagctttgatgctattttatgctcacctggggtgctggaacttatcacaaaggcagttggattgtttgttattgttgaatccttgtcttcatggggaaagaaaggcctggggtttcttgttttgccatctggctgaccacactcaaatgttacctgttttttttagacattatcttagcaagaatggtaagtctttgaacttgataggaatttggtgggttcaagctttcaaacttttttttgtaatatatccatttgggaagaggtgcagggaggaagaggtggtgattataagtaaggaagtgtggaaaaagttgtaaattcttgaagaaagcatgaggtaaggttttactcctgtttttttttttttatccctgtgtgccctttagttcagtttagttcatacaaattagatagacatgagcctctggttgagtctaatcttgaaaatattttctttgtgatggggttggttttagaagagtagcctggaatacgaaagcttttatttgtatggttatcatgtgtcttcaacctttatgtcaataattgcagacttagaatagcagttctaagttaatggtaaaatgttacctactttcgattccatagcatctatcttctttgagtactttcttagagtgtgattttaatgattatgatctttgttctaactattttgaggcttcattaaaaaataaattatgattttattgttagaatcgtttctataaattaacgtcactgcgcctggcccttaaatgtaaatttgtttttatcaatcaactatttcttcataaaaagcaaagaatacgattagaaatttgaagactatctggtattttaaaaataaagttcatctttctggccggctagttcatcgtctaacttttgcagaagtggaatgtgaatgtgaaaactttgtgaaacagaattattttcttttatccaaagctacttttaattgtctttgagcagtgttaatggaaaaacttataaatgtaggaatgtataagaatatagtttaaaatctagtaaaatgagttatttttaatacttttattttgaaatattattaaatctttaattgtatataaaacttactgcattgtgaaattataattaacgtttgagtttcctgaggatatattaaattcttatcttcgtttagacttttcagaggtcatgtattttgatttttaaacatacttaatgatacagtttttaaaaataaaaactttaaagcggaattgaaattgcatactgcttgtttaaatgcacaaaatctctgtatctcctattatctgtattctgtttctttaatttctactaaaatttgaaggcctctgaagatattttaattctcattgtgtcttttgagttattttttgattctgaaaagataggccatcacaatatctttttagtgggatgtcatatttgtcagcattaaggaatcccagaaggagagaagtatattctctgctgctcttaagaagacaaggaaatttgtagaccttggaaatttgatttgacatcctcatctgctgtaggaatgtttagaattaagatcaccaacctgtgcctccttgaaactggtagagaaactgggatcagtattgggacacccagagctgatatgtgaggaattattggcatgatctacaaatgtgtgaaatttgaggattttataagccatttcagtcatatcagtgtttattaactacataggttaatattttgtgtaggtcatttttgtttatactgtagtcttcagtagcttaatggtgggaagcttacatctggaagcttttggggctcctgcacctagccaggttcagtcattgtgattctgtaacttcaccagaactcaaatttcttgggaggttttgaggaccacaaaaattaacttgagtccaggtgtggtggctcacacctgtaatgctagcactttgggaggccaaggcaggctgatcacctgaggtcagaagttcgagaccagcctggccaacatggtgaaaccttgtctctactaaaaatacaaaaaaaaaaaaaaaattacctgggcatagtggtgcgcacctgtagtcccagctactcaggaggctgaggcaggagaatcacttgaaactgggaggtggaggctgcagtgagccaagatcacaccattgcactctagcctgggtgacagagcaagactctgtctcaaaaacaaaacaaacaaacaaacttgatatcttacagaattgggaaatgtttgtatttttggattgctggagactgctctagtgattctggtgactatacccacgttttgggctcagtcaaaactacaggttcatgttgtataataagagccagacggtcagtaaatagacctgtgttttctttagatttaaaaaatcagtctgaaagataattttgccattaaaaaagaaaacccatgtcgtgtgtccatactcattgtctaccccttggtaggttatttaaatttgattttttggttaattttagactctttttgatcagaacaatgctgcaaaaaaagaagagtcagaaactgccaacaaaaatgattcttcaaagaagttgtctgttgagagagtgtatcagaagaagacacaacttgaacacattcttcttcgtcctgatacatatattgggtcagtggagccattgacgcaggtaattattgctaaaattgattgaaattaggagatgtgcatctatatttactttttaatatgttgataaaattattgtaattacttgctttggaaatttgtaatttcatctgtcatagtcaaagtagggtgaaagatctagaagtagaaatgtatttacttctttttggggattaaaaaccgtcagaagaggctgagcgcagtggctcacacctgtaatcccagcactttgggaggccgaggcgggtggatcacaaggtcaggagatcgaaaccatcctggctaacatggtgaaactctgtctctaataaaaatacaaaaaaatacaaaaaaaaaaattttctgggtgtggtggcgggcgcctgtagtcccagctactcaggagcctgagacaggagaatgacagtgaacctgggaggcggagcttgcagtgagccgagatcacgccactgcactccagcctgggcgacagggcgagactccatctcaaaacaaaaaacaaaaatcagaaaaatgaagtatagagtaaaatggtgccatacgaactttttatgtaagtcttccccacccgccatctcccatcaccccctgatgcccccccaccccgtgtctcgctctgtcgcccaggctggagtgtagtagtgtgatcttggctcggtgcaacctctgcctcctgggttcaaacgattctcctgcctcagccttccaagtagctgggattacaggcatgcgccaccacgcctggctaatttttgtgttgttagtagagacagtgttttgccatgttggccaggctggtcttgaactcctgacctcaggtgatccatccaccttggccccccagagtgctaggattacaggcgtgagccactgcgcccaggcttgtaagtctttaagttcatattgtcattaatgttaatggtagtaccttgcagaatttgtacatatacactgactattgtttactgcttactaggaacttggcttacatatattatctcatttgatcctaaccattttgggaagtaggtactgttatctctatagatgaagaaagggaagcttacataaatttaagtaacttgttcatatctctcaactagtaagaactgggattcaaagtagatctctctgactccaaagtcttgctttgttcgtattattttactctgctccctgtattataaaaaaaaaaaaaagcattaattttccattatttatgaaaagtaatgtttttattttttcaactatttaatactgtttctaataattattgatgtcttacattaaaactgactttataataatacaaacttgatacaaaatgaacaatttctcaattttgaggttaatttaatatgaatagtgaagttgactattactgaagttgtatatgtttttctactttgcagatctaagtattcatatagtgtaaatgacaggatgtggattatactatgaaaaattgatattaaggatttattgagtaaaattttttttgaatttttcaatgcagttcatgtgggtgtatgatgaagatgtaggaatgaattgcagggaggttacctttgtgccaggtttatacaagatctttgatgaaattttgggtgagtacttgcttaggatttaatgcatgtttctattaatatcatcatagtgtccttttatatataaagccagacttaaccagtataaatttgaaaggtgtatctctggcttttatccttctgaatataaatgatcttcagaaaatttataccatgatctgtaatgttttcatatctctgtttcatctttgtttcattttcttcatctatgaaatcaatgtgttatatttgtaatcccatagttggtctgtactcctctatgtgtagtcatctgggatatgctagcatcacagttacctggagtcatcttgaatatggagatgacagggactgattttgcagattcgttgagttggtgggatatgtaaatatgtttttcaccaacaaatcagatatttctgttgggcagccaagtgtaataaccattgctgtaaatgatctctgtcctctccaaatcacatgattaattaaattatgtgaatgcctagttgactgctagggaatgcttgtactttggaaatattttaaccaaggacactctagaaattctcttgctctcccacctcatcagtgcaacttgaggtttcttagtgcagttgtatgggtctcagaacttcttctgttggtatttggtgaagagataagagattaaaactgtgttgcattttatacctttactcttgcctccatattataattttactgttttaagtttattgcaagtgtttgtcaggagcatatttcttctatgattgtgttcaaatttccttgaagcagtggttaatgaatgcaaaaatatttatattgtcagctatagtgcctaggatacagaattttgatttctaagggtgttaaagactttttctttgtttgtaactgaaaatgaactggtttctattcaatatgcctataaagtcactagtttattgaaagtgatcaatagaatgcaattgcttgttaccaagagaaaatataattaaacaaaagtttttacttttagacctggatttgggtgttgtaaaatgcaggtgtttgttcttacttaatatgttttgattaatatgtatcactaaaacatttcctcctctttttttgtggtggaaaacataacagtaatttggtgtgataatacaatttaggaatattatttggaaaataagattttatatgagaagttaatagtaattattttcattaactattaccatatgtagatgtttatattaagcagtgatgcacatacagttgtgtccakgtatttatttatataattttgtatattactcattgaggtgtttaattttgtagttaatgctgctgacaataaacagagggataagaacatgacttgtattaaagtttctattgatccgtaagtatatttaaagtttaattttttatgctaagttttattcagatagtccccaatttatgagtactcctcaaataatgtatatgggtagtactcttttaaagtttccctgttgtttgagactttgttatttttgcctcttttctgtgtcatttattgtcttttcttccaaagaacttccctatcggggctcttggagaccatttttctttgatgctgtgtatgctatttcagctgctagggtaatcaccctatcttttcttacccttacttttgggactcaaggctaagggctattgttagtgtgattccagttatattatactttaagtttacttttcatgactggtgtttggagttttccattatttatgacataatttaatagattaggtactgttgttgtaaccagttgtttagctaattatattactgtggtgatttttattatttttttgcatagaatgaagatgtataaaaaatagtagcattaaatcagaaacatagctgttaaatttatcctgtttttaccagcatgccttttgtaaaatattacattcatcctttgtaatttcattagtaatttagcatgattttaagatttttctctagtaaacataaaaatctaataattcaggtatagtcttactagtaataatctaatttcagttaagattagtagtataataaaactataatttgtatttggttataccatgaagttaactatattttatatgaaaatgttaccatataactgtgctgtcgagattatttatttttttctccatttttttttaaatttggattatttctataatgaatgcattcttgagaagttatataaggcatacaagacataagttacaacttatacagaagtttaagatggtttcaaggacattttggctgttaagattccttttccttatttaggcaattgtcagttaaaaaccatatctcccttcatttattatgttttaggagagtaaggagtaatagacactgaatgtttgatatctttgaatttttttcaaaattgaacaactctaattaaaactaagaaagaaaggaccttccttaaatacactcttgatgaacatagttgcaattgtttagttcttttatgtggttctggccatattagtccaaagattttagccacattaatgcaataagattgaatttaagaaatagtgtatagcatgccatcataacaaagtgataaagaagtgagctaagccaggtgcggcagctcacgcctgtattcctggcactttgggaggctgagtcaggcagatcccttgagcccaggagctcgagaccagtctgggcaacatggtgaaaacctgtctctacaaaaaacaaacaaacaaacaaacaaaaacaccaaaattatctgggcatggtggcggcatgtgcttgtagtcccagctactcaggaggctgaggcgggaggattgcttgagcctgggaggtcaggctgcagtgagccatgattgtgccactgtactctagcctgggcgacagagcgagaccccatctcaaaaaaaaaaaaaaaaaaaaaaagacaacgaagaagtgagctataagacaactctgtagactggataagggctcttggtttattttacttatcagttcattacagattttgtagaaagagtaattcaacataattctagtaattctagtgcctttatcacttcattttatactctgtttttaatcagcaaacatttttgtgtaggcagaagagggagggaaaattataactaagtttatttgcttcttaatgtcaatgaggtatcaatttttttttcatatcccccacctcattttaactgcttctgctagaaaattattttatttcaatataaacaaaaatccttagctattccaagaagaaaaggtgatggtagtatattttttcacccctcctttcttgtttcttttgttgtttacaaatcattgatgaaaaaattgagtcttgatcttgcctttaattgaatttcatatactcctaaaattggcagtaggcaagcattttgtgagaagttgctgatttgtatattgtatttctgagttttaactataacattttgtctcttgtgaattttgtcccatagtcattttttaccacatatactatagaattagtattattttgattaaaataaatgttatttcagaggtgcaatttttgcttcagtaagatttctaatttaagaagtcattttaaagctaaatttaaatgagaaaaagagctgttgcactgttgatccagttgatccagttttctctgctgtccatttttgtatcctttgagttgcattctttttaacatttttgtatagcagatttttatttttgtacatttktgcacataaacttcttgtgtggaggagaggttaaattttaatagctaatggacaaagtatataggatatatagtacaacctagctcttattctttcttttcctccatagtattctgtgatgtagggataaaatttaaggaaaaggtcatggttgtaaagccttgagaacagattaaatacaagggatgccatgcagaatttggacagttcttccagaagttagagaacttagagcaacttcttacaagggagcttaacacttattaaataatacaacataacagtattgaaacaatttatttgtggatgtctatctgattaaaaacaaatgtggaggctgggcgcggtggctcacgcctgtaatcccagcactttgggaggccaaggcgggtggattaygaggtcaggagttcgagaccagcctggccaacatggtgaaaccccgtgtctcctaaaaatacaaaaattagccagtcgtggtggcgtgcttctgtaatcccagctacttgggaggctgaggcaggagaattgctggaacccaggaggcagaggttgagtgagctgagatcgtgtcattgcactccagcctggatgacagagcgagactctatctcaaacaaaaacaaaaacaaacgtggaaagcatattaaccagagttgaaaatattcctctagcttaagtgttctttatttagagttgaaattttaaaactgtagctttcaaaaaatattgcatactcatgctaaattatatatgtagacatttctttttttaacaaacggaatcatagtatatatactattttatgtctttccctttattcaacatattatagacagccttccttattaacttacatagatccacttaattttttaaaactactcgcaagtattttattatgttgatgtgtcacaatttatttaacctcttgccaactgataagcattggatatttagattttcaatttttttcagcctaattatttttgaaactttatttgtaaactattaaatgcagtattcttattcctaatttttattgaagattatcagtggagcaaagttataaaattctgaataattgtttagagattacagaaataaataccagatctgagaaatgatacagattgaaattttataagagaggtgagtttgatagccagttccaatttcatactcatatggacttagagaatgttaaggatgccaaacgttgatttttttttttgaaattgtgatgaagataattaacttacagaatgcctattttaattacagtaccatgtgctaaacatgatgaaaccttttttaaaggttttctcatgagtatgttgccttttttgtcatcctgagatgtttaagatctgtaattttccattccttgccttcatttccttcataatccttctctattagttacgactcagggaaagaaatgtttgtcctcagcgagtattttcttgagagatgaatcagtgccttccaattgataatgactagtatcttataaccattaaggtttattctagattactttttaatgaattaatttatctttactattttaagctctaaattctgcctttttttttttttttttttttttttttttttttttttacagtgaatctaacattataagcatttggaataatgggaaaggcattccagtagtagaacacaaggtrgagaaagtttatgttcctgctttaatttttggacagcttttaacatccagtaactatgatgatgatgagaaaaaagttacaggtaaagtctgaatggaattttggttgaaaaatactgttttcttaatataaaatgtataacttactaaggaaattgtgcagttttggtgtgagaaaatcattgtcagaattaatatttataaactatcatgtataaataytgtcttggtaatagtttaacagtgacatttaaaaaccttaagwctgatagtacattgactttatgttagaactgctggaagtttaacttggctgacagtttgagttttgatttagrtaggactggtatgatgtctatgtatataaatttgytattacatagcactgtgtcttttggtattaagttacttttaaactgttttccttgagaaggtcaggattgaaaatctagactctgtaaatagagttgaaagtgctttgaccaaaaccatatattttcatacttatttatgttgcccaaataggttgataggttttttgttttgttttgttttgctttttaaaccaacgctccgggaaatgatatagattaaaattttgtaatagagaagcaagtttgagagaaagttcagatttcatactcacagagatttgctgggtcgtgaaagatacaaagcttaatgcttttgaaattgtaaagactgtggtaaatgtacaaaatacccattttaattacactactatatatactaaatcttaattgtatttttctttaaatggaagaaaatctaaatatactctggaatcttcarttggtgattggtaatgcagttagtggaacagttttgcaacagccttgccgtatggtggtaaattaacgaagttcctttaaaatcatttttactaaaccttttacatttaatttttcttacaggtggtcgtaatggttatggtgcaaaactttgtaatattttcagtacaaagtttacagtagaaacagcttgcaaagaatacaaacacagttttaagcaggtatgctagaaacacatctatttctttttttaaaataacgttttattatcttgccgagatagtagaaccttgggtaaattgcagtgatgcctgtataacttcattttttttttccaaagcattatccaagtcaaatcatcagagtaaagagacatcagaatgyctgggagatttaatataagcctattcctctatcattcctttcaaacaaagtgctttatttaacagactttatttaacttagttaagtattagtgaaaatgtcctgaacctcgcagactcatgtacatgcaaccacttagtgtgtttgaaaaattcctcaatgaatcatcaaatttatatttcaaaattttattttattcttgaaggtctatgaaaatgatttgaaattttatataagctaaaataatttttattttaaattttctttattgctctccagcaaccccgttgttgaagtaagctaaaataattttctcaggaaaagcatcatgcatgtttatttttgtaaaagtctatatagtcacgttgaagaatttgagagattttgttggcagtttataaagttgtacagtttagtttatttttaacatgagattattatcacagtaatacagttgcctcaggaggattggttctgggatgccctttctataccaaaaatcagaggaggatcaagtcccttatataaaatggggtagtatttgcatataacctatacacatcctcccatgtactttaaatcaactctagattacttataatatgtaatacagtataaatgccatgtgaacagttatgctgtattttaaaaatttgtattttttcccaaatatttttaagctgcagttggtcgaatctgcaaatgtagaacctgtggctacccaagggctgactgtatttactatttttttttgtctgtaatattatcaaggatttgtttggtttgttgtgaagttgtaaaattgatatagtttgataaatgaatgaatttaatgagtgtagtctttatatattatgagatatggaagcattatagaaatatttgaatttttttcttttaaagacatggatgaataatatgatgaagacttctgaagccaaaattaaacattttgatggtgaagattacacatgcataacattccaaccagatctgtccaaatttaagatggaaaaacttgacaaggatattgtggccctcatgactagaagggcatatgatttggctggttcgtgtagaggggtcaaggtcatgtttaatggaaagaaattgcctgtaagtgtcctgtaaaatagttttaatactatgttattttatagagagaatattgttgggtcttccttttttaaagctcatctggtagtctcttttactggtgtgttcagatgattcacatttaaagtgattattgatacatttggccattatttcttcaaataatgcttctgtcttgttctttcctttccttcttggttatatatatgttacattatttgatactgtctgcagttcttgcatgctttgtctattttattcactctacttccactttttgtattggtttaatttctatcccctctcttcaagtttagtcatttgcagtctctgcatcaagtttcctgaagagcctgtcaaagacattcctcatgccttctatgttttttgtttttaacatttccatttgattatttcttatagtttacatgtctttgctgaagttgcatattgtctacattttccattagatactttaacatactaattaattgtagttatttaaaatactttatctgatacatgttacaaaatctgtgagatacttactctgtttctgataatcgctttatcttttcagattgtttttttcttgtcttttggcatgccctgtaagttgtggaaaaccagatttgttttgtagatatcgaggtaaataagcattagtgtgggacttaggttatatttacccaggagatgggctgtgtttgaagtttgtttttgctgtagttattagtgttgaggtttgttgttgccgtgaataccagagacttccagattctttcttgtttttgtctttccccttggcttaggcccttctttttgagctgcccctcagaggtgatctgtctcttgcagctcttccagctgaaacccactgttgttaatggaagcttggtagcatgatggtagattttgggggagatgttctctaatgtctcattacatcccagtctttggagtgcatggtgaacctgtatctcaggggtttgacctttataagtttatgcctctcctccataggtaaagactttttttctgccctctattctctttccccagctgcagcaggtttccaccagtgttctcagcctgtgtccttgaggtttcctgccctgcagaataagcctttttttgktttttttttttttttttttggtaagggagatagatctgggttgatttcccagtgactactgtttctgtctcccagctagcaccatgggagtgcagaggggaaacctctagattctcactggtcttccctgtgagaatttggtgggttttctgaaagaaaaacctgcaagagtatgaatgaatgaacttatgactatagtccctagaagctttatgcattcaaactagtatacactcttccagtagcaattagtcaaaatttctagtttaaagttcctactagcttattaaatatctgccccaggtaagcaaaagcttaggttttgtggtctcctacagacacttntgtctctccagacttcaggatggccagctctcctgtgatctcagttcttcagtgggttcatgaaaaacccattaatttgttgtctgatcacccgttttcttacaaggatggaagctttttttcctgctagttcattatctgtctgaactgaaactggaagtctaccttatcattttaaaaatagaaatttctgaaatattttataacaatttacctgtcccttcacatcctctttttgtcaagtacacatagaaatgaatttcttttttaaaggtcaagggttaaggaatagatctgggaaatgccrctaaggtttggatcggtgcacttagaactgttgtaagtgagaggaaatgaaagtatacgtactgaaggtgattcacctatttgagctgccagtgtaagatttttaattgtttttgttttttaaattaataggtaaatggatttcgcagttatgtagatctttatgtgaaagacaaattggatgaaactggggtggccctgaaagttattcatgagcttgcaaatgaaagatgggatgtttgtctcacattgagtgaaaaaggattccagcaaatcagctttgtaaatagtattgcaactacaaaagtaagtaagcaaattatttgtttccaagtcagtggtagaacagtacttcaataaaaactacaaaacaaataacaatatccacaacccccaaaaaacccaaatctgtttttgttaaataagaattgacttatgaaaacaaaaacctattttctatgaaattgctgtattaaaatttatttaaacaattattgagaaataaatttatatgactagtgtttgtagttgaacatatttatattttatgaaatttagaataacaaattcctttttctgtaacttttagccccaccttccccaacctctggggagaggagagggggctggtgactgagttaaaaatcaattatggctatgtgataaagctctgtaaaaactcctgaacaatggagttcacagaactcctaggttggtgaatacatttgaggtgccaagagggtggcatgtctgggtaaggcatggagctttgtgtaccctttcccctgtactatgccctatgcatctcttccatttggctattattgctggatcctatataaaaaacttgtaaatgaagtaaagtgtgttcttgagttctgtgacctgttccagcaaattatcattcctgaggagtgggtcataggttcgttagaagtacaggaggcctaggacttgtaactggcatctgaagtgtggggagtcctgtgggattgagcccttaaccaaccctaaatacttgtgctaactccaggtagttagtatcaaaattgaattacattgttgaacatccatttggtgtctggagaatcagagaattggttgctggtgttgaaagcacctgagaattggtgttagaattgaagtgaggaaarcaaacaaacaaacaaacaaaaaaaacacagcggttggtttattggctctgtagccaaaatgtcttatttttttaaaatctcaactctcgttctgagactctattactcttttagaaaatagggtttataatacagataaagtattttgctactttaacaatacaggatttcagatttcatatatttttttttctttagggtggacggcacgtggattatgtggtagatcaagttgttggtaaactgattgaagtagttaagaaaaagaacaaagctggtgtatcagtgaaaccatttcaagtaagggatgtgttatatattgtacatgatgcatacatatgcattatatatatactgaattactaaatatcagctctgatattgacttttttkggtatgttttcaacaggtaaaaaaccatatatgggtttttattaattgccttattgaaaatccaacttttgattctcagactaaggaaaacatgactctgcagcccaaaagttttgggtctaaatgccagctgtcagaaaaattttttaaagcagtgagtaaaacttgtattttttttattgttgttattaagagttgattaggtagttttcttgatttactttatttgtgattagtttctttcatcgtattaackgtgggtataagcatgcttgcactacaaactaatatgcttaatttgataactttaaaggrtagactttaatgtttcctraaacaattgttttgccaagaactaaagtagggaattatgtaactaattgcatttttagctttgtattgaccattgtaaaggtcagatttcccctaacagatgtccagatccttatgcaactctttcatcttttctactctcatttcaacttgatctactgattcttatctttatacatgtttaaaaattgtggtaacatgtataacaaaatgtactattttctacatgttcttaaattgctttgctttgcacataatttttttaggctaccttaacttctctaaaataaggtgagagcacaaataaataatggagatgaatcaatcacagcctctcctctttggaattttggtggggaaatgctctataactgccctagaactaatgtatttctcaaattccaaaaagtagattatcagaaacaaaaacaaaagttgttttttaggttctaacttaaggcctgtagaaatagtacttttggatctaatcttaatgaattctgagtacaaattatgctatattaatgctttcccaaatttctgtcctcataacaattgtttccttgatgaagtgatttgattttaaattttatactttttcattttaggtgcactaagtttaaatttgacaacacagttcacctcttttgtttatgtcttaaacattccagaaaactgttttatacacctaacatcaaatcaccgaggatgataaaaaaacttttaggacttagagttggagatgcttaactttcttttcctttttctgtctgggttaacatcttgccacagattgattcactgcagagtacaaacaatatgtaatgttgaaatctttattaccaagctatttaaagaataaaagtctattcataagttaccaaggttatcctaatgttccttttaggttaatactttttgtcatagtgaattaaagactcacgttttgtattgaaggatatcagaaatgtcaacgtctggaatttgccggctagtaggttcatgtgtggatctgttttcactgtgttaattttaataaaattaatttgtaacaagagcaatgcatattcctcatggagtttattataatagaatgtttctcatatgtaaaagttatcctttttcatgtatttatattttagctttaattttacagtagttgagtaaaagctgattagcatgtatcatgatgcttatcaccattattgttttgccctaaaataccttaaaattgcacagattccaggtcttgcattaggccctatacattttagctaaatgtatgaattttcagcttgtttgtataccattattcttttatttttaggcctctaattgtggcattgtagaaagtatcctgaactgggtgaaatttaaggctcagactcagctgaataagaagtgttcatcagtaaaatacagtaaaatcaaaggtattcccaaactggatgatgctaatgatgctggtaagattgatatttttaaataagattttgatttaagtttcacttttatttagttacagaatttttttattttctacatatagttagactatgattttccattcagagtatgattttacttcattgaaattatcacatacacaacatattactaattttcaggggataggaatttaataaaatatacttaatatttatactgagcaataatgtaaaataacttttatagtctttcactgtcagcattctaatgttaattttctgacttcatttttctcatcagtgaaagtatgagaaatttttactatgtataattttaaatttctctcaggtggtaaacattccctggagtgtacactgatattaacagagggagactctgccaaatcactggctgtgtctggattaggtgtgattggacgagacagatacggagtttttccactcaggggcaaaattcttaatgtacgggaagcttctcataaacaggtatgtatgtgtgtgtatatatatrtgtatacacacatgcacacatacatatgacatttctaatactttactaaacttctcgaatttttaaatgtaatttctgactcgtatatttcaacacttcaaactactctcagtgcttttcctttttgaacagatcatggaaaatgctgaaataaataatattattaaaatagttggtctacaatataagaaaagttacgatgatgcagaatctctgaaaaccttacgctatggaaagattatgattatgaccgatcaggttggttttaaagttaccacatatttcaaattcatgtcttcttcagattctccctttaatatttgttttatgagacttgcccgaagatggtataactgaaagtgattatacatcaggaggaaaaaatgaaaaaaccacgtcatttagtggaaacatttttatgaagcacattttacattgtctgatttttggggtaactaaggagaatataatacagtgtggtactatagcagcctacctacaagtaggaacaaaattatggaattaacaagtaagaaagattaatgataagggttaatatttatacatgatggcatgatttggaatgcacaaataccaggacttaaatagtaaaatgatggtaatcgagaaagaactagaaaattgaaaaggaagaatttcagatgcattcaactgttttctcttatgcactctaaagtatttgtagagaaaatctgcaactgaaaaaactgctattaatatatagttttaagcagaaattttccaattttttatctagggaagacttgtgaatatctgtattacctgggtttccctaccattgcccattaaggtggcattataaccatgttttattttatgtattttctatccttaaatcattcttttagtgaaatctggggaaactataaaacagataaaatgataatatatttttataatgacagattcagtctattactactatattctttatttgtgtattaaaaaatttagtatgatcatcttaatagcttttgtaaaatgcatttctaaaattcagaattttggttttttgcattcacgttttaaaatttgtttatataagtaatcattttataaaagtattacaacattttttactttactaacatttatttaggatcaagatggttctcacataaaaggcctgcttattaatttcatccatcacaattggccatcacttttgaagcatggttttcttgaagagttcattactcctattgtaaaggtactctttgcattaatatatttttatattgttgtcttaaagggtagcagaaaaactaattttgttttttaattaatttaaggcaagcaaaaataagcaggaactttccttctacagtattcctgaatttgacgaatggaaaaaacatatagaaaaccagaaagcctggaaaataaagtactataaaggtttgtattttaaaatacttagattttaaatactgatataaatgtattcttatgaaagcaatctaaaagatgacttgaaagtttgactattttagacttcgaaaatagctatcactgattttaaagtattgttatagaaaaatgtatgcaagtagaatagtgtaatagatttcattgaatgggatcaccatttcaatggctagtcttgtttcctgtaaacctcctttattgccactccattagtttgaaaaaacttccagacattatagtctagtatttcacctataactacttcagtatgtatttctgaaagaatttttttaagtaacccataataccattatcataaccttctttaatatcctattgttgagacagggtcttgctttgtcacccaggctggagtgcagtagcatgaacacagctcactgccgccttgactttccgggctcaaatgatcctcttgcctcagcccccscaagtagctgggactacaggtgtgtgccaccacacccagctaatttttgtatttttgtagagatggggttttggtttgttgcccaggctggtcttggactcctgagttcaagccatccacccaccttggcctcccaaagtattgggattacaggtgtgagccaccatgcctggctccctttttttttttttttttttaaataatgttaaatacccagccagtgttaaaattcccctggactgtattaaaattgtttatttttagagttttttatttttatttttatttcgtttttttttaattgtttttatttttttgagatagagtcttgctctgttgcccaggctggagtgcagtggtgggatctcggctctcttcctcatgtgttcaagtgattctcatgcttcagccacccaagtagctgagattacaggcatgtgccactatgcctggctatttgtagtatgggtggggttttgctgtgttggccagggtggtctagaagtcccggccttaagtgatccgcccacctcagcctcccaaagtgctgggattacaggcatgagccaccatgcttggcctgagtttgtttgtttttttccaaagtcaggatccaagtaaggtccacacattgcatttggttgataagtttattaatatagcatttctctttttatattttttccttgtaatttatttgttaaagaagttgggttgtttgttctgtgtaatattccacattctggattttgttaattatattcctctagttacatttaatatatagtattttcctttgcccttattttctgttaactgatggttaaatcagaggcgtgatcagatttgggttacatttgtttggcaaaaacatttcataggtagcgttgtgtgctttcatcaggaagcatctaatgtctactttgtctttagttgcttattaagattgatcacttagtataggtgttgccagcttgatccatctattacaacttttccaccagctttttacttgatggttttaaacagacattgatattcatgactcacttttatttttaaaattgtgcaggattgggtactagtacagctaaagaagcaaaggaatattttgctgatatggaaaggcatcgcatcttgtttagatatgctggtcctgaagatgatgctgccattaccttggtaattaagttaattttttaaaagcttttgttagccatccccctaccttctattcctttcctcccagtcctggttccctatgataagtctcttttgaatgctcaagctagttaattttaatttttcccccagatgatgctgtgcttgtataaacttctttaattgaaagaccttagtttaaatgtgtttttgattaaaatattgtaaaataacctaattttccagaaattaagaattagttattggccacttatacattttaattttgtaataaaatttattttatttttaatgtgcaaaatcgttacctggaatctttcaggcatttagtaagaagaagattgatgacagaaaagaatggttaacaaattttatggaagaccggagacagcgtaggctacatggcttaccagaggttagtcttaaagagtggtgacctggggaaagaaggagagagagactagaattcatgcagtaataatgataatattgctatataacttttctcttagcaatttttatatggtactgcaacaaagcatttgacttataatgatttcatcaacaaggaattgattctcttctcaaactcagacaatgaaagatctataccatctcttgttgatggtgagtaatatttaaaaacctcattttttaatgttatttactatagtttaatttcatgtactttaagccatccttatgatacatattaaaattcttactttaaatcttgtatatgaagagyttattcagaggaatttaaggcctttttgattttgcttttgttttatgttttcatagtgctgaaatctttaatattccttaatttgaaacttttaaaccttttccgagtttttcaggaaaattaactttaaaagtcttaaagcttttgcccaagttgtctgcagattttctaaaaaagtaaaatggaactttgataatttctaaaatatttatcagagattaaattttaaaaagcttttattctgtattacccaaagcctaatgctttaacttaacttgaaaaaaatttaggaactatttctaatttgaaaaaaatttagaaactatttctcgttagttgaagcagattttgatcttctatctagaacttttttttttctcataacctttatgaagtttgttgatctttgtattgcttggcttttctggtaatagcagatgtttctacctatccctcaagttctagccacaaatcgcctttcttctatgaagccttcctagcaattctactctaaattggtcttagatacctaaacttctataccaattattatgtacctcttattttacctttgttcattttgcctctagaattagattacaaaattcttaaagaagttgccatattttatcatcctcatgtttttaccatactctgggtccagtatgattacagtgatagcatatactgaaaagattgttactgtgcttattggcctagagccagggtgtctaaccttttggcttccctgggccacattggaagaggaagaattgtcttgggccacatgtaaaaatacactaacactaacgatagctgatgagcttaaaacaaaaacaaacaaaaaacaaaaataattgcaaaaaaaccaaaaaacaaaaataatcgcaaaaacaaacaaacaaaaaacctcatgatgttttaagaaaactgacaaatttgtgttgggccacatgcagcccacgggccacgggttggacaagcttggcctagagcaagaagaatggtaagggagcagagtgatttgctcacattgtttcatgcaatccttatgaaaactatattaagaaagtaattatttctattacttggatgaggacatagacttactagttatttgcttagtcacatggtaaatggccaagttgagaagaatatacagattagtgagattctaaagcctttattcttcactaccacaataaatcgctttttataagggttttcctgatgtgggatacttagaatagatttcaggctccttgatggcatgctggcaatttagttagctacaaatggcgttttggttgtttgagtgtttggaaactactgttaaaggagtttggtrccactaggtgattctttaaggccagaatgttgtctttcaattggcagttcacttttggagtagatggagatggcataaaaacatcttagtatatacytgcagatggctttctaggaaaaaacaaacaaacaaaacaaacgtgttagtatgtactcactttgttacagaatctcaagtaacaattttactggtgttcttgaaaagcaaattgtatctttgctttattcccytgaattgttacaactatatcttgaagtaacattttaaaagagctcttttaaaaataggctttaaacctggccagcggaaagttttatttacctgtttcaagaggaatgataaacgtgaagtaaaagttgcccagttggctggctctgttgctgagatgtcggcttatcatcatggagaagtaagcattaagattgraatcaattgagaactgtaattattgtcttgaagaatgataattacacatagtatttttcctttagtaaagtctttggaaatgtaaaagaattaagagaatatacagattagtgagattctaaagcctttattcttcacttggattttaattcaagttggggagtaattatagaaaatttagaatattaatgttatgttctgccttcttctgttgtatagcaagcattgatgatgactattgtgaatttggctcagaactttgtgggaagtaacaacattaacttgcttcagcctattggtcagtttggaactcggcttcatggtggcaaagatgctgcaagccctcgttatattttcacaatgttaaggtaaatatttgctgatataatggtataaagtttgatttgatttggaaccaactaactaaatgttcgatggaattatagctgtggagagatgtgattatctggttattctacttagaaggtgaatgttccaaattatttgaccacaaatagaatgaagtctgttgaccttaatttttatgaattgttggtgaaatcagtcctagtgaattaaggatgtttttctcaccaactttactctttaggctgaagatgggttatgtactttatttagagtaataggaaattctttaaaagttatcaatattaaatcaggtaggtaagtacataagtaaaataggactattttattctgggcttgtaactgagagaaagatgcatttgaataatacagttaggcaaattttattattaagcggatgtaatcaaaattattaaaaatgcattctcttcaaaagatttgtttttgcagtgtgaagtttttaattatgtataaagttttctttcccaaagccatgacattttttcatttgcttctttttgttttcattagcactttagcaaggctactttttcctgctgtggatgacaacctccttaagttcctttatgatgataatcaacgtgtagagcctgagtggtatattcctataattcccatggttttaataaatggtgctgagggcattggtactggatgggcttgtaaactacccaactatgatgctagggaaattgtgaacaatgtcagacgaatgctagatggcctggatcctcatcccatggtaattatttggaacttattatttatttaacaaatgataatgtgtaaactacaaattcccgtcattttagaaaagtaatggaacatttttattttagaacatattgtagaccgtaaagacctaattagggtataatttgatatgtgcctacagtaaaaagtataaactttggaatragttttggaggtaagtttcatggggagaaactgtttatttaaatttagaaacacctcatattccaggttttcaaacctctaaaccctatattattagaaaacaatccttttctgataaaattatgtgtaaccttgtttctgttctcaaactaccgcttaatagtttgtaaggatgcttaaaaacacattgtattcattagtgtaccatttgtaaaaagacagaaaacaaactaccttgtatatattttaatatatccccaaggctgggcgtggtggctcacacctgtaattccagcactttgggaggccaaggcatatggatcacctgaggtcaggagttcgagaccagactgaccaacatggggaaactccatctctactaaatatacaaaaaaaattaggtgttgctcaggctcacgcctgtaatcccagcactttggaggccgaggtgggtggatcacctgaggtcaggagttctaggccagcctgaccaaaccaggtagaaccctgtctctactaaaaatacaaaaattagccgggtgtgctggagggcacctgtaatcccagctacttgggaggcagaggcaggagaatcgcttgaacccaggaggtggaggttgcggtgagccgagattgcgccactgtactccagcttggggaacagaatgagactccgtctcccaaaaaaaaaaaaaaaaatccccattttttttttatgtttgttgttttcttgtatcattcactctgctcagacctcctccaagaaaaatgtccttccttcctccccatgatttaaaattacctggagaaaagtgtatttttattaccaaaatgataatgtttattgtagaaaatataggtaagcaaagagtaaaaaaatccataaacccacaatatagagacaatattttgatgtatttttccaagttttatttcatttttgtattttaaagtgaaagttattctttagcaataagacatatattctgctttttctcttaaatacttcaaagtacttcaaaatatttctaacataagcatcaaatttttaatgatagtgttttactgaaatggttttggatttttaaatggattttagattgttaagatagtgtatttgatcaatacatggttcttatgtgcctactatgtgtatgaaactgtgctaagtggtgagataaagagctatggtttttatctttgaaaagttaaacagttgtcaagacaagacatcaaagcatcaaggcttgaagtttaacagtgacaaacgatattgatagttgcttggtatgccagaagaaatgtcctatgctatatgctcaatttctttctttctttttttttttttctgagacagagtctcactctgtcacccaggctggagtacagtggtgtgatcttgggtcactgcaacctctgtctcccaggttcaagtgattctgctgtctcagcctcctgagtagatggggccacaggtgtgcgccaccatgcctgtctaatttttgtatttttagtagagacggggtttcactgtgttggccaggctggtctcgaactcctggcctcaagtgatccgcctgctttggcctcccaaagtgctgggattacaggcatgagccactgtgcccggcctatatactcgatttcttaatgataataacgaataagaattttagartaggccaggtgcagtgactcatgtctataatcccagcactttgggaggctgagctgggcagatcactagctcaggagttgaagaccagcctgggcaacatggcaaaaccctgtctctacaaaaatacaaaaattagctggacatggtggcacgcatctgtaaccccagctacttgggaggctgaggtgggaggatcctttgagcccaggtggttgaggctgcagtgagctgatatcgtgccacggcactccagcctgggtgacaaagtggagaccctgtctcaaaacaaataaaaacttagaagagggagagaggacttgtaattcagttgggaaggatgagtaagatttatgtagatgaatgatgaatggaatggggttgggcctgaatatgtgtcaggacttgtggatagagtgaaagtgagaatattcaaaatagtcaaacaaaatatgggagaagagtagtggttttgtaagacaaatcattagagaaaaaattgaaagccagattgggtccagactatgaaatgctttcaatgtaaggcccaaggagtttgaatttaaaggatattgatctaggagagaagtaggtgtaggggaagtaggctgaaagaaagtactgttctaggaagactaggaaagatgatactaacattttgagattggaggatgttcaggttgtatgaacagaagctatgaattcaagcttaattgatcagttggaaagggacaattgaggatgagaaattctgtttcagttgtgttaatctgtcartgttagaccatagactcatggtactrgtactcaagagagaagtcaatgctatttacctttttctctacagcttccaaactacaaaaactttaaaggcacgattcaagaacttggtcaaaaccagtatgcagtcagtggtgaaatatttgtagtggacagaaacacagtagaaattacagagcttccagttagaacttggacacaggtcagtgtaaatatgtgatctgcctgagggaagggcagtgtattaagcaattttttctggtaaggatgattccaccgttgttggtcctaagcgtgcgtagtgttaaaaaattcctgtaccttcttttacccttcagttgaatttgtgctttgaatatttaaatagtatttatatctaagtagcgtagtatgacttatgttaggtaaggcttttatagactattatctttgtatttatttaaaataaaaggagtagaatatgacagtgtttttaattcttgtaaatatggtcagtaaattcatgtcagcatcagctttacaaatctaaaagtatgcatgtcacctcttgacagttccagttgatgtcatccttttcatactcagcctttatcttgccctttagagtatgagtgggtcagcaccattacttcttatgtcttttcccaccaccgagatccctgtgtattgccttctatactgattggataggagatgatagagattgaggtttcctttttaattccccatgagagttgagaattttcaagactgtatgacttgtagtatgagaacatgagagtgtgtcatgaaaagaatcactaatttttaaatctttataggtatataaagaacaggttttagaacctatgctaaatggaacagataaaacaccagcattaatttctgattataaagaatatcatactgacacaactgtgaaatttgtggtgaaaatgactgaagagaaactagcacaagcagaagctgctggactgcataaagtttttaaacttcaaactactcttacttgtaattccatggtaatttattagatttactgttaatttaatctttcttgcatggtataagtcggattattataattggtttcatgatgggagtggctatagtaagcctgaaggcatttttttttttttttttttcccatcctgcagatttgctgaagattctaggggcacatttctttcttctagtattgtccactacccttattctcaactctgtgtttatgcatctgggcttgaaaacacaggatacacacatcttcacacacattgactaaaagttatgagagtggttattgcagggcctttgtgtactttatggccatctctattagcattttaactgtagagtactcataactctaatctgctttattaaacttgcacatttatctttatttatacaactggggaggaaggtagaaactttaagtgtgtgattcaagttccattccaaattagcttttagatctaaaaaagtaaaaaaagttcagcagtagtacagtggctgagaaaaagtgccataatccgctgagaaaggctgatggaagaaagaaaaaggatagagaggagtttgggtgactggattatagcacaagtaaatgtgaaagcgagagaaaggggacaaatgcgtatacacagaatatatgggggaggaaaaacttgaacatttttaaacttagcaatagaatrtgtatgttttcagtttggggaaaaatcatttttgtaggtggttttatggttactttaagagccctttttttaaggcctatttttgtctttcaatattattcctaaatacttttgttgtgagaattgaatttattggcttgcagtcaccaaagaaatatttacagaaatgtgcttaatagtcttagttctgtttaatggtttttaggggtagtctgtgttcacacacatgcattatggttatatattatggttattttaagtattgtagatgttatataagttaaaataccagtacagatctatatgatctgcaaagtatatgtgttttgcttaggtactttttgatcatatgggatgtctgaagaaatatgaaactgtgcaagacattctgaaagaattctttgatttacgattaagttattacggtttacgtaaggagtggcttgtgggaatgttgggagcagaatctacaaagcttaacaatcaagcccgtttcattttagagaagatacaagggaaaattactataggtaagatacaacctttaaaaatttgaacattagttaaaatggaaaaaaaactttattaatagaagacatttttatcagtagaatataagcaaatacaaattgaatctcttatcttgatcctaactttatttttccctcacatagagaataggtcaaagaaagatttgattcaaatgttagtccagagaggttatgaatctgacccagtgaaagcctggaaagaagcacaagaaaaggtaatcatttgcagaaaaagacattcagagaagcttttaaaagcaacttccaaaacaaacaaaaattcaacccctaaattttaaatttagtactactaaaggtgctgagttgtctatttagagactaaagtcttctgtttatccacagaacagataaagtacaggaatttatagtacacacccaccacaaagcacttggccagtgtgactcaaccagagcctggagaaatgactccaggtgtgagaaggtagctcagtctccttgaccttttttcctgagtctgccattaaaaggtgttgtggtggtggtttttgtgaggtacatgtatattacctgggaatcagactggttgcacccagaatcagcctatgttcacagtatggcatccagtcaccactcacttgatctggttttggttaatactgggaagacaagagacaaaatgttaattattatagacagtatttatcaaacaccaagctctgcctcatgcttagatttttagccagagatttaaaccctggaacttcagattaaaagtctgatgttttattaagtaagttgcccattgcagatcacaaaatagtaataatagttaaatgaatgggatattgaagctttgagagtcccctcaattagctttttgatgttttgtataactaaaagaaaaatttaagcaacagtacaacattgtgattgagaacagaaatttattacagaagaggaagaaaagttgaatgattaattttttgggtattagattattttgtgcatatatgattccataacattaacatctttaaaacatagttataattgtgtgacataacttgaacctttaaacttccctgtacttgagttctcaatcataatgtttttgtattttttatcaaactacattgaaatattgcttttgcttacatttttcagtttgaagtcaataaaagtcatatattaaagtgagtaaaattagactaagttatatagaatagcaattacatattaagataataggcttattcattatttgaagaaaattcggtaggacaagatgggcgcattcagagttaagatgattgaagccctttgttttcctcttaatgtgttttattgaaccccaaattatggtttctacaacacttgccttttgcctttctgtatcaccgttggtttaaactatatgtttttttttaaaaaaagtaactagtaagctgatgaatttttaatgcttagtcttaaaagataaagatttctacagtgtcagaatgtccttctggtggaagtagaatttatgggtaaagcctagcttgatttcagttattgcattaccaccatcagaattttttcagcatcttggccatgtgtacattttggggagttcaggtaacaaaaggaactgctcttacaagagtgtcctattatacagagttggagaaaagagaattataaagtagctaattagaagattaaagttttttgtaaagcataatggaattttgtcattagaacttgcaaagtttatttttttttttaatttctggaagtgttcttagtcatatttatgttaacggtgatagatacacatattcatagaacacttcttaacaatactttgggtgtagtcaaaacctagatctaatagactagacccactaaatgtgggtctaaacaggattttgttgtatcctagtgatatttttatagttgtctaacaacctgaatactccatagaaacaagctgtttcatgaagaatttttcaaaagtgtagaattatttattgtaagttatctaggtacttattaatcatctatcaactcaacaatagcattccgtatttggctaatgtggcttaatcaaatttatagtttttgtttatataatgaagcatcttgctttgcagttttaatttttatcttacttctgaagtacacgtaaactgtactttgtgtatatacattgttttgcttacaaattttaattataaagctttttttttttttttcctcttttggttaccaaaagtaaactttttgctttatggagtgtcatggttaactcagtcattttaaattaaacaacttagataaaattttatttaatggctattgttattttaaaaaatttaaaggtgatatcacctaaaataacttttattaaattcattgtattttgaaatttaatattagcacaaaataatttttttgttgcagctgtttctatagacaagggcctgatgaataaaatttcagcaaaaccctgacgaaattcttactctaactcaccaactcttaaattcttaagtggactttctctgagtcctgacatgaatattctggctttagagaagtttttattaagaattcaccctcagcgagtgaatgtaccttaacatatttattataactgtaaaataattttcataactggtatttattttgtatttcagattgttcattcactcaccagtataaaaatctgacaagatgcagtgataaaacattaattctactctcttaactttaaaatgtggtatcctctcattttgttactgagtacctgaggaaatcagttaatttttcatcagattcctggataaatagggatagtgtataccattccttctgaagatcttattgtgcgtctttagaaaattttaaactttttataaggaaatatatttttataggtaatccaaaataaccccaccatcctgaagatgtagcatttatagtgtagcacttgtagaattttaaactaattattcaataaaattcaacattaatttgatactatacaagactttaatatacagtttgttattttttacaggcagcagaagaggatgaaacacaaaaccagcatgatgatagttcctccgattcaggaactccttcaggcccagattttaattatattttaaatatgtctctgtggtctcttactaaagaaaaagttgaagaactgattaaacagagagaygcaaaagtatgaacttttgtgggttaaatagtttgaaactatttcagtgttatctgtatctttttctttttccaaaaataagtattttgatttatccttcatatgttttaaaactattgaatgtttaaactgtacttttttattataggggcgagaggtcaatgatcttaaaagaaaatctccttcagatctttggaaagaggatttagcggcatttgttgaagaactggatgtaggttaagtctctattaaaatttatttggaaaagtcatgtttatgaacaagaatgaaattcttttaagtgatcttaaagttttctttaactctgtgaaggttaatatgtttataagttgagttaggcttaagcttctagttatgtgaagttataaagaacttcttgtatggaggaatttaaatgctatgaaattgaaatttagaataaattaaatctgctttcaattagttaaaaatttttaactgagttttagattaaataattgattcagtttaatgttttcctggaaagaggtaaggctaatatgtgtgtataattgaatgtaagtactttgattttaggagtagaatgatagtctctacatttataacagacatttcaatatttgattgttataacatagttttttccaagtagaattctaatttaaaaaataaaaaaaatgtagagatataaaaagcacaccttttctaaaattgcccaattaaaatattggaattaatggtagcattatgaatacctgatttttgagtagcaaaatgtaaaataccatttattactcatactactttttttttttaaagttgctttgttgatttattgtctacatgctctacttttacttcagtggtctaagtcagaattagaactcttaagaacaagtgtggtaaattagctgcctaaaagaatttagaattttttagtgctatttttctaggctccctcaacgatctttcaagtgctgcaatgtgagtcttcctttttttgtgctttccgtatattgttcattaattagtttttttgcacattgtttcctgctgagttataatttatttaaaaattattcattaaaaatgaagccatcatatattaaaagaaaaattattcctaatattattgatatcctgatattgctttaaatttggtcactaatatagtgaaacacaggaaacttttgtggttatgcctgtacatttcctcactattgaaaagtcgtcattcaaaacaaccctagcaaaaaatactctttcacttttaatttatcatcttattttattatttgacaattaatgaaataggtccaaacaacttatttaaattctggatgtatttatttttaacatttaaaaagatttagacttaaatttcatgtctctctgtatcatttaaagtctaatgataacattaattgaatatctattgtacactggcacagccttctatgtaatgcttagagtgaccctcaccacaacttcaaatgaatgaggttatcattaacctgtattatacagataaggatcctgaagcttggagaggttaagtcactttcttaggaattatatcattatagaattactcatcttctcagacacccactttcctcatctataaaatggggatcacaggattttttaaatgcctagcacatggtggatgctctataaattatctggcttttttgttttttttttttgagacatggtcttgctctgtcacccaggctggagtgcagtggtacaatcatggctcattgcagcctcaaccacttgggctcaagcagtcctcctaccttagtctcctgagtagctgggacatgtgtgccaccacatctggctaatttttgcatttttgtgtagagatgaggttttgttatgttgcctaggctggtgtcaaactcctgggctcaagtgatccacctacctcagcctcacaaagtgctgggattacaggtgtgagccactgcaactggcctctgttatttcctgaggatacataactagtaagtggaagtgcagttgaaatccagaactatctgatttcaaagcttgggtaatttctattaaactgttgtgctacaaagatcttttaaaaaaatctctaaagaaatgtcattttttccttgtgcctttcaaagcttattttaaggaataattctggtaaatgcaaaatctaggatattaatcatgattatatcctaatttatcattacatagacctgcctgagttcaatctaaytatattggcacttttaacttctcatactttctgactttaatttacatttaggaggttttttttcatattttctattacgactaaagcaatagaaaaaaataacttcatacttattagcagaactgcctttgtatatgatttgctaggattttgatgatactaggttatcagaggtcttgattccataatatatcacgggatccaagaattggcagagacttctcaggtcatttagtcactattgccccctcgtattacaaatgggaaactagttagatgaattgggattacaatccaggtcttctgatttagaattctttattttttttccattatttaatcttgaattagataagttaaaaggaaagctttattctttactgagtgaataacatttgtttcagtattttatgaagtagtgattatcttttctaagaagttgtttatgttccttctgccttatgattatactttagaaagtggaatctcaagaacgagaagatgttctggctggaatgtctggaaaagcaattaaaggtaaagttggcaaacctaaggtgaagaaactccagttggaagagacaatgccctcaccttatggcagaagaataattcctgaaattacagcyatgaaggcagatgccagcaaaaagttgctgaagaagaagaaggtatgacatacctcttgtcattgatagactcatttctataatgaaatatatgtataatttaaaaaattttaatgcgtgtttaaatcatgctttgttttattcaaaatatatttcaatggtaataggaaatccttctatgacagcagttgatctatagaaggaaaacatattggtaaaggatcacatattgtaaagagctacttaattcagcttttaaaatgagaaatagaaacactccactcagctgccttctaagttaaaatcttggaagccggccgggcacggtggctcacgcctgtaatcccagcactttgggaggctgaggcgggcggatcatgaggtcaggaggtcaagaccatcctggcaaacatggtgaaaccccgtctctactaaaaaatacaaaaaattagctgggcgtggtggtgggcgcctgtatcacagctacttgggaggctgaggcaggagaatggtgcgaacccgggaggcggagcttgcagtgagccgagattgtgccactgcactccagcctggttgacaagagtgagactccatctcaaaaaaaaataaataaataaaaataaaaatcttggaagccaaaacaaaacaaaacaaaaacctccaaaaacccaaccataagtatatcaactttaaagtataaactttagtgctacatcataatccattagagaagacttagagtgggaaagggtctgtttggcttacaaagtactctgtcatcttttactatttacttgtgtttgtccttaaactaccaagcacatcctgtgtcattggcactgataggtgctattgaggattaaaaaaaaaaatggcgttgacctaacctcaagcaggattgaccagagttagccggaagaaggaaacatcagaaaaaatgttcagagctgaggaaacagggtgcatgttggtcttagagaggctaatgtttttggacaggttgatttttacaatccagaaagtatacgtttagatgtgtccaacaagtaggtgggaatatagcctcattcttactagagcttggaaaatgagcctaaagagctagagttagagattggagagttctctgtgcagagctaatatttgaagcgtaggtgcattttgacaccagagtagcctttctcttctgttctgataaactcaggtctctactactttcctcttacttggctccccacggcacacaggttcatttacccagatactcttgcctgtctccctcggaagatggtttcttttcagttggcgtttgtcagattcatttctcagcattcttttctctaccttatatggtcccctcaagtaaccttatctatgcccagagcttattccattcatactgatggcccctaaatctgtgttcctaagctataatgctttcaggagtgccaagctcatagccacttgaatgcttgaagcccatcaaactcagcatgtctgaaactggattcattatcctgatttcaaaatctgttctttgccttatcccagttaatgacactatcagccatcaatgatataagccaaaaacctgggagttttgtcatttaatcagtaactaagtcctattgactgcctactaagtaattccaaaatccacccccttatcttggtccccatttgacattgccttagaattttgtgttttctctgagatactttaaagtggtcctcttaactctctgtttctagtcatttaatcatgatttctccccttttctacttcattcctttaagttctatattttactactagaatgaaaattctaaaaagtcagtctgattgttaggcttaaaaatcttcagtgactccccactgactatgcacaaattcttggtatacagtgttagcacctgtatgcctctgtgtgtttctyctcctggctactttgttctcacttttccttgagttctagcagactattacatttaaaaacctaattctttaaacatttaattcctgttagatggctttgtgccttctgcctgggatgcccttccctccttaattcccacctggcaaacctatgtgtttcctttagaactcagtcagaaaaggtacttctccatggagacttttttgaccctgccttgagcagagtttctcacttctccccttgggccatggctgtaccagcctctatatttgttatttgtattgtaatgactcatccttgttgtgtgcctctgtgttttttgtttttgtttttttaccccatggtcttagggttggggtctaccttacagtgcctagcagtgcaagacacatgttacttattttccttcaataatttgaagattttttttttttttgagacagagtttcgcttttgtttcccaggccagaggctcaccgcaatctccgcctctcagattcaagcaattctcctgcctcagcctcctgagtagctggggttacaggattttttaatggtatataaaggcctgcctgagctatagaaacttattttgcaggtaccttttagctagtggtctggaaatccctctgataatcaaaagctgccttcttattttttatggttgcttctaagtagctgtcatttcactgaatgtactggaaaattaagagttacatgcaatattatttactatagataagtgaagtaaaacatggtctgatcaaagtcagctgttaggacctcatcagaatcactgtttttaaatttacctgatttgaaggcgctatctgttgattgaaactatctctaaaatatgtgatgtttttatttttactcgtggcttgattttctttttattatgtagggtgatcttgatactgcagcagtaaaagtggaatttgatgaagaattcagtggagcaccagtagaaggtgcaggagaagaggcattgactccatcagttcctataaataaaggtcccaaacctaagagggagaagaaggagcctggtgagaaatgattatagttttgcatgtgtgtgagagaaaaaatatttgtatagagtattactagattcttttgattgtgctctttttctggtagttgaaataatgccttcaattttcataaacgtttattttgtartgaacttttcattataacaattttatttttactaatgacatttctataaatatggatacataccttattgctattcttttgctttaggtaccagagtgagaaaaacacctrcatcatctggtaaacctagtgcaaagaaagtgaagaaacggaatccttggtcagatgatgaatccaagtcagaaagtgatttggaagaaacagaacctgtggttattccaagagattctttgcttaggagagcagcaggtattgtaacacatttaatattactgtatattatagtttaacctatacgttggtattgttagtattatcagtgttgtttaagtactaagccattagtatttcagaagttaaagttaggaagaaggaaaaaattgccttatagaacrgtctttctagcaaagttggacataaatttctctaaagtgaatcatgtttctttcctgatttttattataaagtttggtttatattccttccacagttttaagatgtttgggaaaaaatgtaccttgccacaataccagcaatgatagatctattaatattagaagtgctttgtggttttgtttttgtttggttttctaccccttatatcatgaaaaatttcctcccgctttaaaagtctgagtacatagctctcttttagataatgatagttgtgcgggtgaactgcagaatcccattttgctgttataataatatagtacttataagaatataatttgatcctttctgaattttcattaaggagaagtgttgaagttattaacatctagtgagttttctattttgtacattcttctgaaattttgttatttgaaaatttgtcctaatttattaaaatgaatgatacaacattgtgggtgtttacctctgggaagtacatttttaattatatatcagaccttaaattctttggttctgcaatcaccaagtgattgaatttctttccctagtgtacataggtagcataatataggtgaatctttaatatgagtaagttatatgaaaatggtttattacattaaatgctttaaaattgtatttacatacatcaaaagtgaagtgcaaaattaacatccaagtaatttaaaaattttattccataatacatgctagaaattataataaaacatacttgctttatggcaatatgcctttcacgataattggtatctttttatgcattgtattattgttttgtgaatatattgaggtctttatgtctcctgtcttttttcattcatctaaaaaattactgtctttgttatttcatagtaaaactaactctgaagagaagatagaagtttttatccaaaaagttaagagaaagtttaggtgtcggtacwgtggctcacgcctgtaatctcagcactttgggaggctgaggagggaggatcacttgaggtcaggagttcaagaccagcctgggtaacatggcaagaccctgtgtctaaaacaattttttaaaaaaaatcagccaggaatggtggcacacctgtagtcccagctactcagcaggctgaggggtgaggattgcttgagcccaggagtttgaggctgcagtgagctatgatcataccactgcatttcctgcccaggcagcagaacaagactctgtgtcaaaaaaacaagaaagtttagcacttttaaaataactgtaaaatttgttgtttgtgattgcaaatatgggaaacattgtatttgttgtcatttgtataatggctgtatgagacaaggccatattgactactttcctcagtgtttttgattaattattaagtatatcaataagtacattagtttatgcyctcctaacatgcacagtattatgtggtagcctcctggaaagtgtaagacagacattaacactaccagataactaaggccaaagttgttggcttttattctgtaaatgcttgcttttatttcttatggtatttttagagatggttggaatatacttcaaatgctttatcagtaataataattcatgtatacaaagctaggatttgagtttaacattcatttttatttttcctcctagccgaaagacctaaatacacatttgatttctcagaagaagaggatgatgatgctgatgatgatgatgatgacaataatgatttagaggaattgaaagttaaagcatctcccataacaaatgatggggaagatgaatttgttccttcagatgggttagataaagatgaatatacattttcaccaggcaaatcaaaagccactccagagtaagtaatgctatttagtgatgtggtatagttaattgttgtaaacatttgccaaagatattatagtgagctcttctaagaaattgttatcattctaggcaagttcttcttcatgaaggaatcaatcttgttaatattgcagctgttcccatcacagttgctgtagtttaaaggaaggattggcaaactttttccataaagggctcaatagtaaatgttttaggcttcgtgggccatattgtttctatcacaactacttaatgctgccattctagtaaaaaagcagccacaaatgatatgtaaataaatcagtgtagccatgttccagtaaaatattgtttacaaaaataggcagcaggtccatgggatatagttggacaacccctggttttgagaaaagttactaagtccttagaattgggaggtttgtttcttccctaaatttggccttgatagatttttcttgcttttggtgagcgtgaatacatctgggatttgaggtttgtgaactattttagatgtttttttaaaagtattttctcacctattacaattggccttcaccagatcctgaaataattgcccacctgtagtcttgaattagaaataggattgttgcctggtgtgatgggaattctgtctttttccttgggtttttgtccatagtttgctgatcttaaattctggaatggttatttctatcaactgtagaatttggtttaagaatttggttaagtattcaaagtattttgaataactttaaaccattgcttagtttccattcttttttatattaaataattgatttgtatggtgtctgtgtgcatacgtggtatgtgcacatggatcatgggtatgtgtgcacacttttacacataagagagaaagagttttattaccctgtctttaacagagaaagagaaagaaatgaaaactaaagttttgttctgtgattataatcctgcagtaaatattatatataatttatcaggattgaaatcagatatttaaattgtatcctctgtggtgtttattttctttctaatagaaaatctttgcatgacaaaaaaagtcaggattttggaaatctcttctcatttccttcatattctcagaagtcagaagatggtatgttcatttagtcttttcattggttattgtattattgcttttagtggtggagagaaaacagtaaataaatcgttaggtcatgatttaacttcagaatttttaatgagtagaaaacttcctttttatattttgctcaagataataaggcttctttactttttctgaggtgattcctaactaattggtcaaaataggcattatggaagcatttaggtggacaggcaaatgcttatctgtgtttatgggtgtgagtgtatgtgtagtgttttaatgagagaaaagaaataatgaaattttgaaagcttgaaatttgattttcatggcaatgtgaatgtatatacgacagttttctaaatctgtaagggcaccagtgtgattgcagattggttgttacctgagagattaaaaccgtcataagaacaaatttaatcagtghgtatacttcttgtttcgtattttttttgtgtatggaatttttaaggtcacttaattgattcactatcattttttaatacacacatctatacatttagacatatttggtacatattctatatgtatacgtactcatttttgacagtgtgtcaaaagagttgtgtaaacatatttatttacatccaagtagctattttaaaagtttgtgctatggtgttagggaagaacgcattacactaatttgagtgcaagagtaaactgaaggtaagcctgtctgccttttaaattagtcttcaaaaatttatttaaaaataggaatacttactattcttttagatttaaacattattactgatattcctgaaatggttaatagtattatttgtgtaggtactaaaataatacagtgggacattttcatatctcattttaaaataaattggcagcatgtatttttgaattggtcagttatgttttaaatatttagcatttgggacttttaatttttactactttatgcacttctgtgttatttcaccacatagttaacatttttggtgtataactgatacattttatttttagctgtttgtatattgtggattatttggtcacaaaatagtaacataagatcaattgtctagctaaagggaagtcatcagttaaaagagtcaaagtttactgagagatctttataacatctctttactaaaagaaggctttgcaatttttagattcagctaaatttgacagtaatgaagaagattctgcttctgttttttcaccatcatttggtctgaaacagacagataaagttccaagtaaaacggtagctgctaaaaagggtatgtacttatatttgattgagttaagcattggatagagatagttaatgtaaaaggaaatgtaatttaatttgaaactatttgcatttttttatcataaaacaattaagaagtataagtgcttataaggagaacctctcgttttctagccatctgagggcgttaataaaatttctgtaagacttaattttaaagctgttgtaattataaaataatcccgtgcattactatctaaagatagctttctacaaaagctcccttgtggttaggttgtaatggagattaaaattttgtcttgctagtagcttgcttctgttatctatgttgatcatgactcaactccttatgtggagggattggtcagctcagttgaggtcctctttttctatgtgagtcatgcagcttctctctttttcacagccttagattggccacaaaacactttgagttgattaatgaatctcttactagtaccaagatatatgtaccgtggtctttttgaaagaggtcagtatttgtgctttgtgtttgaaggatgacacttaaaaaaaamcccacaaatctaattgagatgtgtgctatttaagacagcaagtaaataatatggattgttccctcaaggattttaaaaattcacaacagacaacatcattacagacacatgtattgaatgtagcagaacaacaattttgaaaagtcctgcttattctgaatgcagtagaaccatattgagaaaytggttatttacaagagtctctgtagccaacacactgggtgacctacccatgtcccttaccacttagtgcatattgggcaatatctgcctttckttgcctgaggacttcctctttgccactgtgctggaatattaacacccccctgctcccagctgcctttaactagcagattgaggaaagttggtctataaatatctcagtgtccttgcctctcatgtgagccaactgtgggatgtgtgtttcacactgggactcaaaaatttcttatggaattaagctcctagagtgatgattggcttggtaacttacctattactggctgccttctcttcattgtctcatttttgtctccccctcctttatctctcaaataaatacttatacttgaatccatactctaggattaggcagattggcccaaatctggggaacccacattgagatggaccctataatttctcttttttaaaaaaacaatcaggctgggcgcagtggctcacacctgtaatcccagaactctgggaggtcgaggcaggcagattgcttgaggtcaagagtttaagaccagcctggccaacatggcaaaaccccatctctactaaaaatacaaaaattagcctggtgtggtggcgtatgcatgcctgtagtcccagctactcaggaagctgaggcacaagaatcgcttgaacttgggaggcagaggttgcagtgagctgagatggcaccactgcactccagcctggacggtagagtgagactccatctcaaataacaacaacagaacaatcaaaaagcacctttaaaaaataatcttcatatgagcatcttataaacaccctgaaaacttgggagccgtattacttcctgaaacataccccgtttccttcatcaaactgttcacccatatttaacctaatgagtttagcatgaccaaaaagctagattatcatggtacctatcctacttgcttccttcttcagtagctgaactggccttgtctaagttgaataggtagactgcctgtgtggtgtgatttcagggaccccagcaagtcctcagctttcctttagcctcccttacgaaatataattccaataaaatatcatttcaagaagaggatgcatcatatccctctgtgggattgtctatgttaactccaaattgcgtatgttacacaagttaaattctgtagttccaatagtttacagcagaaaggcagctatagtactcagatatctgacctgtttgcctggtagaattgaaagtgccatgtaactccaagccaaggaaaaaaagtggttcctagaacacctggctaagtttatactccctgctaggagctgccctgtggttcttgtggtagatatagtcatgaagactcaggtgggaaaagccacacaatctgggtgccactttcctagggctcctcctgctcttggctaacgaggggccttatttgtagtgtctcaaattgcgactggaatacattttccatagaatcagtgtaggtttttttttttttttaaacaaagtctacagttaatatattttcttccaaattaggttttcttaattacaaaaagtgatttatcagttttttttttttctttttctttttttttttttgagacagagtcttgctctgtcaccaaggctagagtggagtagcgtgatcttggctcacggcaacctcccttgcctgggttcaagcgattcctctgcctcatcctcccaagtagctgcgactacaggcacacgccacctcactgggctaattttttgtatttttagtagagatggggtttcaccatgttgggcaggctggtctcgaactcctgacctccagtgatccgcctgccttggcctcccaaagttctgggattacaggtgtaagccactgcaactggccttatttatcagttttcacatagaactgcagataaagctgtaaaacaaggtctatttttcaaaattccagaaagcaaaggcctggtatcaattgtctacttatctaggattttatatttctttccacataaaaatgccaagtctggatttcagcttttgaatggaagtgagttggtttctattcattgtattcgaggatcccatacatttttttctctaaaacattctaaaagttaggacttaatctgtggttatatctgggttataattaatttatcaaatatgctactcttttgtcatgactattctgtatttaaaagttactgcttaatttattttaatggctcttccttaaaatgtcttaattgtattacctaagggcaaattatacataattaaataaaaagcattttgtcatctatgagaaattgtttgcctttacattgccgccaagcagagagaaaccatttcattatttaaggcgactcaatttttttttttgaagatagagttttgctcttgttgctcaactggagtgcagtggcgcaatctcagctcactgcgacctcccgggttcaagcgattgtcctgcctcagcctcccaagtagctgggattacaggcatctgccaccacacctggctaatttttttatttttagtagagatggggttttaccgtattggccaggctggtcttgaactgctgacctcaggtgatccaccccgccttggcctcccagagtgctggcattacaggtgtgagccaccacgcccagccaggcaactcagtttctaatcagctataagaaattccatttatataggactctcttcagtttggtttgttggtaagtatattgacctgtgaaatggaaatttgcttactaggaaaaccgtcttcagatacagtccctaagcccaagagagccccaaaacagaagaaagtagtagaggctgtaaactctgactcggattcagaatttggcattccaaagaagactacaacaccaaaaggtgaggattatcttcttataaccctttaaacatatgctgtgtggaaaagattgaattttttctacctcattgaatttagagaggctaggtatctattttgttttaaattgctttactcctcagtaagcagtgtgtctaggaatcagtgctgaatrtagtccaaaggaggcatagcaatttagttcagtcactttgttttacaaattaaaaaattgaggctcaaagaggttaaataagaatccctaagaatggtccaaattctcccctgcagccaactcactgaaagttgttattaaaaagtcagatcagtactccacactaactgtgacacttatagtaatgggctagatccaggactcttaggctagaactttttttctcacctaagaaataactgtattcagggccacacaaggaacagcaccagttctccrtggcatcccctctttaactccagaatctggaaagcccttgaagatgttttgkaaaatatgtttgtaagacatgatatgagggtagctcatgctgtgagggtagctgctctaccttttattcaactgaaggatatcttcctcagtgtgtttcttatatttctttaaggagtggttgggataaggagctgtagacctacagggaaatggggataatagggtggaaaagaatcacagtgactgggaaagtagtactcaagatatgcaggattgaaagcctttataaattcaaaaatgctatttccctgattcatttgatsaaatatgacatcccaagattatttaagtctatcttcgtacttgtccagtctagctgtcaagggattttaaagatataaaattgctatttagttgttttatttcattggcatcattgtgggatggagaacatctggcccctacttaaatattaccttttctccttccacctccaatgatgagaataagaggttaggtaggtgaaaaaaaatgctgcatgtgctgagtytaggtctgagaaggaatatgtatttgacattttatagttaatactggtggttctcatatggtgccacttaatgtgggatatgcaattggttgttactagtctttgataagtaaaacggagtaaacatttagacctttataataatgtgttactaaaacagcatgtgattacattttttagtaatttgtgttctatggtatttttaaaagtattggcccatgacaaattagaaatgaaaaaaaatatttaaatcccatgtaatttaagaagtactcttccaagatatttccttttcaggctcaaggaccaaatagcaaatacaaatgttttatgtatgaagggattcatcattaaaatttgtctttgggactttcccactagtttaaatgtatttgtcaaaaagtctttggtcatgtcaaccccagaattgaaatgctactgccaaattgtttataatcactcatagtaagagatcaggactgcaatgctccactgattgggcatgccaaagaaataaactacaatgttgtggcatttatctttttatattgcacttaaccacggaagaaaaaaccttttgtatcattttaaggtaaaggccgaggggcaaagaaaaggaaagcatctggctctgaaaatgaaggcgattataaccctggcaggaaaacatccaaaacaacaagcaaggtaaccgggaacatcattgcatattagtgcatggctttttaaaaaaagatctgtaagtgacttagtttgcttatgactatagtcctggaacagctttccacctagcatctcgtatcaatatggggcttgtatttggttaagaaattattcaagtataaatttatataatcaggactatttcctaaataactgtgctataaattaacctacttagaaccttccatttcatccactgaactgtagtagtgttatgctacctaaatattagactctttcagactaaaatattatttttcagactaaagactgtttccttttaacttggatttatttgaccagggctaatttgattttttttttaattgaattcatttgactgtggctgatttttccaattagtctgrcccttttccagaagtacactatttcttttaggtaaatgaatgacatcagctcccccgcatccctttttatgttgatttccacattgacctcttccattcagtcatcttctatgtctcaggtccacctcggtgatgctttgcatttttttaaacacttacagtgcacacatactacacacggtgcaggagtcttgtttcctcccatgaattcttgatatgtacttaccagtaggacagcttgaatttttactaatctgggcattgtgcatactttttgggtaatatataatttcagaaataaaggtgttacatttttcaggctagaacttggtaaatatgaaaccaccaaggtggtgaattactgtatgtaatctttttcctccaaaaaataagataactggtcttacacttaggttagcattatgattctaattttaaaagcaccattatttgtaatacttcctaaacataagcgaagtttaaggagtgatagttcttaatactagtctttacttcctttcataacttttaaatctattgaaaaaaaatctagaaacygaagaagacatcttttgatcaggattcagatgtggacatcttcccctcagacttccctactgagccaccttctctgccacgaaccggtcgggctaggaaagaagtaaaatatttygcagagtctgatgaagaagawgatgatgttgattttgcaatgtttaattaagtgcccaaagagcacaaacatttttcaacaaatakcttgtgttgtccttttgtcttctctgtctcagacttttgtacatctggcttattttaatgtgatgatgtaattgacggttttttattattgtggtaggccttttaacattttgttcttacacatacagttttatgctcttttttactcattgaaatgtcacgtactgtctgattggcttgtagaattgttatagactgccgtgcattagcacagattttaattgtcatggttacaaactacagacctgctttttgaaatgaaatttaaacattaaaaatggaactgtgttctctgtctctttactgaagataaaggtgtagtaaaagctcccacacacctttaaaataaatatattttattctttgccmggagactccatggaaaaaggtaaacagtatatgaacatagaaagcattgttaaacaaacaatctcaatgtacaaacagagccagtgaaagtacatcacagacttgctaatatatcaaaaaaaaaaaattccactagtgcttaaatgagaactaagaaactgacacttgtatctgttaaccactctaccacagctttcactctgcttcatagtgattgaacaaggtcaaaggaggcagattctatgcctgtttctttgggagttgttaatattaattagccccttggcatcaagaaggctggaaaaaaaaatcccaatatcaggcatgaatcaggaaggacactagagttacatggtccaggtggtagaccagcctgctaattatcccatgaaatttccctaatggcttgtgaacaagtaaacaaaaacttaacactgaaaagtgtttctgccttggaggctatcattactgtaaaaaaattttttttaactaactgtgtagttatgtcattaaacaagtaataaaccacttttaatttaaagtgacattaacaattgaacaaatgacatttgattaactgaactggcagttacactgatacagaattctcttctgctagtgcagggaatttgtatacttttactgggcaacatgaaataaaagatgcagtttgagagcatcagaaagagcaaagacaagcttccatactaactaaagtagaatatcttcagccttatcttgtcatactgtacaatagtcctgtcaatagtcctgtttccttaccttgatgtcttgactattccatgaaagcaagacagttatctttttgaacctaggtagacgtgtacagtagtctatttcataaccttggtgtcatggttattttgagtatgcaagacaaaaggaaagcaccaaacatacagtatagaaagaacagagccatacttctgtatgtacaaagtcttcagaaacttaaccaggggtaaatcattttgactgggtctttgccatgcaatcttgagtgttcaaagaggaaaatagaagcttttaactagtttctggttgcatgaaatggctgattttttaaaattggaaaagtttgtatttctaggtaagttacacagtgaggagtatatatattgatacatatgaaaacttcttggtccttcttgagttttaatatcttttcagtccaaaaactaagcagcagtaaaaatgttttttcttgcattttaaatcctggaactgaaggtactggggaatgtttgaagtagctagaaaatgtcttattgcacgagtggtgactgactgaccccactgttttccactgagctgggtgagatgctaggactgtgctctgctgtgttcccacttgaacttggggtcaagggttcatgtccttcagaattctccagcatttcttgaatgagaggtggcattgatccaggaatttccattttcaaggtaattacacgctcygcaccttttcaaaagagataatggaaatatggttaagataaggagttaagctatgacagataaccagggaccaattttcatatattttaacagaggtgtttcctaagattcttgcttaggaattatgaaatgtagatatcaggtggctttttgttgaaaaagatctatcgattactatcacactcataaatacaaagaaagataaatgtatttggaatgggaactgcatccaccaaaaatcatgtgttagtttattgcaaagttagttagattgggttctcaaccagctcagactcatagtatgttgatagagagggtctttttatgatctgctagaacttcattcgtcttttatgcaagcaataactgatacaattgctccttttgataacagaaaattatgcaaacaatgcctcccagaggctatccttattttacaccattaaaacatttttactttgtggaaaagcagctgagatatggtgacgtttaaatatgatgtcttagtttcaggaaataacaatttacaaagagaagttcctgatgaaagaagtgtatcttgaaaaagacaggttgatggcagttacccacaaacagaggagttcacgatgtgcagtgactattgacaactagatttagcagcactctgtccagtacaatacccactaggtagctaaatttaaatttgttaaataaaatgagaaaaacagtgcctcagttgcataagccacacttcaagtgctcgagaacctcttgtgtctggtggctactgaactggacagtacagattatttctgtaattgcagtaaattctattagatatcactagtctagtcatctatacagaatgatagtattatgttaaacagcctcatttttaaaaatcaaagataccgtattcacaaccacactggtatctgctgtttacttctactcttaattccatgcaaggatgaattcagaatgctcatctaggagacctcttagaaggagctcgagttaagactgcttgtcaaacaagttccctgtgcttttaagcactttctgaaatacagagtttattccttggctagcaaacatcttcagagacagagtaagtagtctgatggggaaaggagaatgacaatagcccatttggtaccagggatagctgctgagttgtctctctacatagaaaaaccttactgttaaacactcaactgtgatatggatctaggcacctctattaattgcttgagttgctacataaacagaaaatcactaggcaaagaatatacctcttaggcaagaattcctttgcttagaagtgtgcagaagaaaatctgcctatatacaaaagagcaatggctaaagtgattgagagaaacttaacaaaggtttagatattcaagaaaaactggagtcaaggtaacataaaccagagatgtgtagaaagctggaattaaatgtatgaacctagagaattagcctgttttagtacattctcttgaaaacaatgtttttctaatcagtcatgaattttaaagctctcaatcgttaagataattgaatagggtaagatttgaggtgttttttttttttttttagaggggggagggatagtatttccttttgatttcaatgagaaatgagttccaagactttaaaagcagccattaaacatcctgaattgaataaagcaacacaacctggtaaggccctcaagtccactgtgtgactacagtactgagagcacgaagacatacctttagcactgatgctacggagatctgtgattttcattaagatctttggaaacatgtgaggcttgctgggtcgtctttttctgatataaatttttagtgcttccagcaatggttcttgtagcttatctacttttgtcggttcctcaaggtcctggcggtctggataccaggaataaagtattaaacaaaatcaggatttatgcccttttcccctcttccttgtttccttattcctactgttatgagttcattaatttggtaattcaattacatacacaaatttgcagacttatgcagttgctttaagcagtgatacttgaaaaacaaaaaaaaactgcccccccttggtagtataaacattttgatgcctggttgcttttgtcccagggaaagaattacctcctttgaccagaaggtgtcactaccaaactgaattaaaacaaatcttgagcaggatggttattttagcataaaataaatctgctccttaattaaaaccattactttttaaccacttacgattcagcctcctataggccagtaggggtcactacaaagaagaaagctaaattttatcccagtcctgcaagggttggtgggagggcccagccaaatacttgtatgcctacccactagataacaaacagcacatacaagtcccttgtcatcattcaaatgtccccagacaattcattttataatagtgtgatcctgcctttaagaaaaaaaatctgtggcaattggagtaatagctttttgggatttctttctgagcagaaggatcccaaataccattagttaatttgtaacaacatggaaaaatacaatgaaaccaggcatgtatgcctggctttattcacatgttttcccatgtaaaacaactccaaaagggaaatgaggaatttttcacaaattacaagtataaactgttcttcatggaatttcatgaggcttttctacatagttggtacctccacagattaagcagatggcactgagaaggcctgtttctgtgtcatccatttccaaaggcaggagctggttggcaaaggtgaacacaaggtcagtcagaggaccaaatccagcattgtgcatctgagttcgatttagggtaaggccgtctgagaaagtcatggtgtcttgttctggggtatacctggtgcaaattctaagaatctggaaggaaaaaaaaattgatggatgttctaagccatcctgtcctgaaatcatcaatcagatgtaagcaggaaataacatgaagatttccaaggagctcttggggcagtctgtccccctttcacatgttgaatgtcttctttagctctttcattaagagactacagaagtcaaaacccaggggctaaagttttttaggaaacactaaacaggacataagaaattttgagaaatatctttttaaaagtaattcattacttgactcaaataaacatttactgagtgcctaattatgtcccaggcactgtgccaggtgctggagataaaaaaaaaaaaagatgaataagattctattttttaagagcttacagtctgcaataaatgacaatttattaaatgcatagtatatatcaagttttgtacataccctacattcaatctttcaaacagcttggtaaagtgaatattattcttattttacaaatgaaggacttaaggctcagaaaggttaggtgatgtgcccaatgtcacatagttaacatgtaactgaatctgactcaaacccaagttaggctctctctcccatgatgcctctgatcacacggttacacaggcagctgtaatacaagggacatgagtgaaaccagcaaggtactagggagttcagaaaaaggaaagctcagaaatagccaggaggaaatcaagggcagatccataaagaggtagcatttcaaccgaaccctaaagtgtaggcaggatttctacaggcaaaaagcctgagtcactctgccagagtctcccagtcccacccagtgtatgcttgacacataaccctgttggccccctggggcgctagctactaaggagactcttgctcactgccctgtgcctctaggcctcactcagagcaaaacaaactaaaaatgccttgcttctgtagatactcaatcctggttcatgtttccactgccctattaagcctaaatgctggtaaggagctccgtgcattgcagagcacttccccacccagaaccacatttctgcaccgacaataaagggtctctgctgaccaggtttccatacttgacttttctctctgaaaaagtttcagagctgcttgaagcacagagagaagtaaatcccacctggacaaaagtgaataactcaggaggttgaagaagttgaaagtttttcccagataatggcattcaatttgactgggtatagtcctgtgaatgtccacctcagtgtcaacctacaggagggcagatgtgatcagaaaggcctgcattattcctgttacacagcyatgtgcagagaggagtggcctctgaggaagacacaggacctctacctaggaggagtagtaaagccctctccatcctgcccatattcccatcaggtctcctaaaagaaaaacttctgtcaaatctctcatcttgtcagggaaacactgggggtttgggaccaggacacttcccatggggaagacagtcctatctgactggtggtggatccacaagagcctcaaacccactggaccacatgaaccatgatgggacagttgtactgcaatggtcacatgcttttgggttctctaaatctccaagaaggcagtgacctaggagccagccttctccctacacaaaggactccagcgtggataaggaggaaggcaccaggacatcctatagagtgagggtgcagcagcgcctctgttgtatatatttttaaaagtctgacttcagtgtcttattggttaaaactccgagaggaaaactgaatgagtaagccctcttcatccctaacatacagtaatagctaatgttttattgatcacctaccaggtaccatactaaacactagtatattatttctcctatcaacccatgaattgttactattagctggggaaacaaatctgaatagcttatgctaggtcacataagctagtagaatgatttgatttcagctttttctagaacccatggttttaaccattgctccacagctgcctcattttctctccacgccaatagtcaaacctagacacctctctaaggttagataatctttagcccagtactgatttcgatatcggccttactgggcacttttgtgcagcacataactgcataactattcacgttg

SEQ ID NO: 95419 - DNA, 38339 bp, Homo sapiens
tcaggtacctcggggatctgctggcacattgtaagagcaaagaaactggaaatacggtaaatacacacccacggaaaacacaatcgtacaacagggtacagcacagccgttagaaagaaggaggcggattagcagcgtggatgtgaaaagatctgccgagatgtgttttaggtgaaaaaaatggcaaggtccaaaacagtgggcagagtgattttctttttataggtaaaaaatgctggcatgccaatgtcttcaggaaggaaacaaagagacatcgtttctggggagagcgactgtgatggaaaaagttttagttttcattttataatcctttggtatggtttgaattttgcaaacgtgggcattcgttaactttattttaaaaataccactgggattatctgtgtggcagcattacgggccattttcatctttatgcttttctgtattaaaaaagaaaaccttttaaaatatcctgcggtccagaaaaatgtgtgttggttctctgtgtgcatgtgatgaggtactgctgtcgtcccagaggactcaaattaaagctcatgccctccctctctgggcctcagtttcccctcctcaggagaaggcagcaggatgaggtaggggtgtgagtgcaggggggtgttgctggctctgaggtccagaggctgactccttagtgagtgttgggcagctccccctcctcctgctcatcttgtcctggggccggaggtgaagggtgagaaagctggagtggggagcagggttggctcctctgtaacaacaaaatgcagggtctcagaagatgcctgtggctgtagaagcagctgggggaagcctaagatctaagccagggctgcaggggcctctctgaaggttggtgcacagaggcctccctagactgccctgagagcgcctgaggcgcggagcatgtgtgcgcatgcatgccggtgtctgtgcgtgttagtgtgtggcttgaggagcctggggtgcctgtgtttgtgctcccacgtgtatttgtagggttatctctctgtttcctgcgtgcgacagaagctgatttcttgttaagctctggggctcctctcttagttgggctccttcccaggtctctagttttgtattcacagttttaatctttttttttgagacagagtttcgctcttgtcacccaggctggagtgcaatggcgcgatctcagctcactgcaacctccgcctcccaggttcaagcgattctcctgcctcagcctcctgagtagctgggattacaggcagctgccaccaaacacagctaaaattttttttgtatttttagtagagacggtgtttcaccatgttggccaggctggtcttgaactcctgacctcgggtgatccacccaccttggcctcccaaagtgctgggattacaggcatgtgccaccacacctggcctttgtttaaaaagaactgtccctccctcattgtatgaacatcaggcctgacaaaccctgactctgtccttggcatatgtatatctagattcacatctatatctgtgccttcctttcatatctgtgctccaggaacgtccctttctggggaggggacacggcagtgaagacactcagtgttttggggtgtcccaactttatcctgggacaatcaggaagacggagactaggagattggcaggggtggccaggcatggggctgggtgtggcagcactcactgtaggggtgcatctctgtctgtgcctgtgtgtgcatctgaatctggcaccgtgggtgtgtgcctgtagctgtgagctgtgtctcccttcatctgtgcagctgaggtaacaccccagagtgtgtgtgctgggtttgtcattggcaatggtgtggactaatgagttcccttggggccagtcctggtagttggagcaaatgacttgttgccaggagcctagagcagggagtgatgatttcacccacccagggtgtccagatatcccagctggtctccagaggccctgctcaactcatctggttgagaccaagactggggcctctcacaggggctctagcagtgcagtgatttctcatccccttggccatcacctggtcaccagcttggtatagatggtaggcagagatagccaagagtgagtatcaggtttccatgttgacaggatatgtgagtgtcccaggtcaacaagacctttgcaggcagtactggggacaggaggcagggttatttttcaagcccgctcactcctgttacagagctggctcacgaggctggaggaatctccaaggttgctcagaacatcagtggtcattctctgcttacccccaacctgcagacccactcaccagggtttcccaccctgctcggtgctccctgacaaagtggaccctcatggatgccatcacagaggattccttgatcttggggttccagttcgatccagccaatgggaagtgccagcagggcatcagaggctgggagaagagctaatttggggtattttccccatgtacccctagttttggcagcgactgtgtggcctcaaacctcctctcaggcttccccgtggcccataactagctattctcactggttccaggaaaccactccctctcctggacccttcaggtttaggggtgagagctccctcccctctgttgccaaccccaggtgctgcaccatctcctgttggtcccctcaacctcacccacatctcaggtaaatggcctgttcattaaacttttttcagaaatccctgtggagtgagacctctctttcttgctagggccctcctggtgcatagagttacatagaaatacaacttatatttccttgagaaaatatattttcttatttgaatgcaagctccttctggcctccgggactttgaacctgcagtatcttctggttgtttaagaactcatctcttcaccaataaaacaaacaaaacatgttttacatatttagctgagcttggcactcattaagggcataacaaatactagctagcattactgttattgttaccgttgtgttaaatgtgtatgaaatcacagggtcttggaatggaaatagaggtgctcacttgaattgaaaggggcatggttttaatgttgtaataggatgtctcaatctaatattagttagtgttttgaaatattgtatctgtgccaataattcatgtttggtgcatttctgtaatatcctttgcgtgcctgtatttttctttttttgtgtgacagtcttgctcttgttgcccaggctggagcgcagtagcgtgatctcagctcactgcaacttccgcccctggattcaagctcctcctgccttggcctcctgagtagctgggattacaggcacctgccaccacacctggctaatttttgtactttttagtagagatgggatttcgccatgttggccaggctggtcttgacctcctgacctcaggtgatccgcccatcttggcctcccaaagtgctgggattacaggcgtgagccaccgcgcccagccgtgcctgtatttttcaaaagaagtgttatatttgggactttcttatttgttttaagttgaaatatatttcaatattgcatgaaaggggaaaaacagttaagtatacaatgttcaataagtcagtgtcttgtttcattaaatgccatttaaaaataaaatacatatggttaaaaagtgaaaaaatgtatttcttcaaaggggccttccctgaccactgtccaaatcagggaccccattattctctctctcacagtctcagcctatgcctttcacagcagttaccacattttgtaatcacaattttccttcctaggttaaggcttgtctctcccactaaactattagcttgacaaaggctttctgaactcatctgctctgtgcagctgtgtccccagtgctgtgtcttagtgagcagacacactaggatactgcaacaaagaggcccccaaacacagcagcgtgcataacacttatttcttccccacgtgataatgcggccggttggcccaggctttcatggtggtttgaaggtgttcacaagctccagggcctccgcagaccacttaactctttagctaccaggacacaattttaaaaacccttggccaggcattgtgactcatgcctgtaatcccaacactttggaaggccaaggtgggaggatcgcttgagcccaggagttagacaccagccttagcaatatagtgaggctgtgtctcttaaaaaataatttaaaaattaaaaaaatttaaaaacccacttatccagaccaatcccactctctttggcctcagcttcaggtccaggctgcccagatcctcattctcccaaccagaggatcatctgtgtggcttcccaaactacagagcaagttccctgaggggaagtcggtctctcacaaatgccacagggccactgcatgcactctgtcactttataaaatagtacttattccttctgtggtttacatctgcccacatccctgacctttgagtgagttacttcaccattctgtgcctcaatttctttatctataaaatggggatgacaatagtttgcctcctaggactgtcagaagagttcgacaagcaaaaagcatttggacttcaacttagcacatgacagatggtctctgaataataatcaacattattgtctcttgattccctggacttgcccatgaaatccagagaatgaagtgcaaccagaacttcattttcttccttttttttttttttgagatggagtctcactcttgtcgcccaggctggattgcaatggcgcggcctcaccgcaacctcccctccccggttcaagcgattctcctgccccagcctcccgagtagctgggattacaggcgcccttcatcacgcccagctaattttttgtatttttagtagagacggggtttcaccatgttggtcaggatggtctcgaactcctgacctcaggtgattcacccgcctcggcctcccaaagtgctgggattacaggcgtgagccaccgcacccggcccagtacttcattttcagatgcagacatgaaggaccagaaggctgaagcaacctgcccaaagccactatgctggcgggtggccgagtttgggtttaatccaggcccgaacctcagttccctcaagataaagttggggtgattatggcacctttctcaggattaggttgtgaggctcagatgccatcatgcaatcatggcaggcacacgggggcccctcttcaaacgtctgtgcgcttcccttgtgccccgccctggcacacagccgcccccgcggagcccagggatcccagcccggcagtcctccgtcagctgcttctgtttggatggcggggacggctgggccgacagagaggcccattgtctccgtcctctggggctctattgttggggcctcctcctgggttgcagccccacggacaaccccagctgtcgcttgggcctggctcagcttaccccggcggtgagggtgcgggtcggggacggagacgcgtgcaccctgaagacagtaactaggcctgctctacagagggaaacgcaggctctgagagcctacatgtcttcgccgggagtgcttgtcccggagctgctcgcagactgggccgggggtgggctcgggtcggagaggtcacggggctccttaggtcacaggcggcagggccagagaaactcccccgcccctacgtttaactcgcggaaacaagggcccagagagcccagacgccagcccaaggtcacacagcgaagccccggcacagcccgccgggaacctgtcgtttctaacccccagcctctcgccgtttctacccagcttgggaagcgcaggaacaggacatacggtggtcgcgccccttccgcgaggccggggtgaaacccgcttggccctcccgccagggggcggagcttccgaaccaggcgggattccaccgggtatttgcctgcggaggcgggacttcgggcttgatgggcgttgggggtggccttcctgcgggcaggctctctgtgtcgcaacactggcggggcgggccaaatcggccagagctctgcccccagaggacgcggctaagcccgggggcgtgtcctgggctggccccacccgcgccccgccccgccccgcccggtcgcggagctgcggccagctttgggagggccggccccgggatgtgagtgccgcggggcgagggcgggggtgggctcccaggggtcccggtgggcgggcgcgctagggcgagggcggggacggccgggcgggcgcgccaggtaagggcccagatttgctggtgaggggtgagggacgctcgggacgggtgtttccaggccctcccggcgcgccaggccagccccgcgcccctgctcggtggcccgagggacgcgcgccggccgckggcctgggcccggacccggagcggtcgggcgatgtgcgcgggtctgacgtctgcgctgcccagccccctggctacgcggacgcccccacggaggcagccactggggcggatttctgtctctgggtgacgactgccagggtgtgatgggaagggttagcagcgcagcggggtcaggggatccccgccccccgccctggctcaggttgggtcccgacttgggtttctgagtgcttactgtgctcagctcctcagttgcattctctgagtcctcacaacagccacacattttgcagccgaagccttgtgccacacagctgtgggggcatttattacggtgcagaggtgatgcgcggaggccttgcagccagacacacctgagtgcacgcctgcttctccacagacctgcactgtgaccttgggcacacctggtctgctctctgagcctctggtgcgattgtggtgcctacccccagggctgctgtgaggactggattggaattgggttccgggaaaggcagccagtttaagcagctgttgttgaggggcccttgtctgcggctgaggggctagtggtgctgggcaatggctggtgggtcagtccaggcrggctcgggagggagctgctttctgccgaggctgccccagctgtgcgtctgtctttttccacacggtaggctacacacaacccagctgtaccagcatgtgccagagacacgctggccaatcgtgtactcgccgcgctacaacatcaccttcatgggcctggagaagctgcatccctttgatgccggaaaatggggcaaagtgatcaatttcctaaaaggtatggaaggtccsccttggactctcatctgcttcctccaacccacctgtcctctccgtcctcatccccaacataagcytcaggctctctcccatcttcagtttcagccctcggayggccttccacccatgcttccgcccaaaatgatttttccaacacagaytcctaatcacgatatgatgtccctgactcagactctccctggctccccatcctgtgggcctaagtcctgcctctgcccaagaggcctagtggaaaggtagctgattactgatgggcacagggaaggtgaagcttggaggagtccatttcctaaggttcagagagtcaggaggtagagcacctccaccgcacctctcttgattacagatgggggaaattgtgtcctagaatgattaggaaacatgtgcacccaattccagtccagtcctcacagcagccctsggggtaggcaccacaatcgcagcagaggctcaggagctcactgtaacctccgcctttcaggttcaaacaatttttctgcctcagcctcccaagtagctggaattacaggcgtgagccaccacacccggccctgatttcttaatatggcactcattataagattgtaaaagcccacctgtagaccgaactgggcacactggctgcctgcttgtgacctctttccagggaaggacacagctcccattagtggctgaagtaacacagttacaagaggcggagttgggtttggaactcagagctccaggcgccctacctttagggctcatccccttgagcaaaatgatgcttcgaagagcatatcgttttaactgtggtttgtaatcaaggggcctgatttaggtgggaaattcacttaaacttgttttaaaaggaaacattatgtcatcaaaatgggaaaaggcagtttcacttgccataaataggtcatggtaaaaaagtaaatgcaatgaaaacaacagtataattcaatccaggctggttactattgcctgcaggctgtgagactgattagtggtttgaacggaagatgagcaaagcacaggcaggtgttgcgaggccatgccacactgagcctcctgtaatatcatcagaaggtggagggaggccgggcgcagtggctcgtgcctgtaatcccagcactctgggaggccaaggctaggagaacacttgaggccgggagtttgagaccagcttgggcaacatagcaagatcctgtctctacaaaataaaaataaaaaacttagctgggggtggtggtatgcacctatagtcctagctacttgaaatgctgaggcaggaggatcacttgagcccagaagttcgagggtgcagtgagctatggttgtgccactgcactccagcctgggctacagagcaagaccttgtcttgcatttatttatttgtttatttatttattgagacagggtctcactcccatcacccaggctagagtgcagtggcggaatcaaggctcattgccacctcaacctccctggcttaagtgatcctcccacctcatgtttttgatattttgtagagatgcggtctcactatgttgtctaggctggtcttgaactcctgggctcaagcaatccacctgcctcaacctcccaaagtgctgggattacaggcgtgaaccaccacacctggccaagaccctgtctctttaaatgaattaaaaaaaaaaaaagggcggggggaaggtggagggggaattcctaagaagagtttttctcactctgagggtcaacatccctgacccttgtgccacctgctcctgaaggttgtctagcacacctgagctctccttgtgactatcagtggcttgggaaacatggggatygctgtgtgtacgatgttcattgctccctggccagagggactggccactgtccacagtggctggggaggctaccccttctcagaaggcccacaagccagcagtgcctacctacccctggggcaggggctgccacaggccaagtctgcagcctgtgggagggtctggggctggccctggccttgaggtcagtggggaagcaggatgctccctctgtggtttcagaagagaagcttctgtctgacagcatgctggtggaggcgcgggaggcctcggaggaggacctgctggtggtgcacacgaggcgctatcttaatgagctcaaggtacaggatgtcgggcctggggggctgcgggcctggggcagggggctgctggccaggagtggccagaggcaggaggtgactcagcctggggaagccaagtctcacagggcacccattcatgtccctagtgttggaggaacatgggagtctgtggtccccaagagaaggagagaggtcataaaaaggcagacctcagtttgggccaggccactctgagggtggtgtcctccccttctccagggcgtatgaaagccttcatagaattttaggcttctacattatgactttcaagctgtgctctgtcgacacgcctccgagaccccagcccctgtcctccaaccatacatagctctttcactttggtctattttgtttgtttgtttgttcatttttttgttggtttttgttcttgaaatggagtctcactctgtcgcccaggctggagtgcagtgatgtgatctcggctcattgcaacctccgccttccgggttcaagcaattatcctgtctcaccctcctgagtgagtagctaggattacaggcgcgtgccaccatgcctggctaattttttttgtattttagtagagatgtggtttcgccgtgttggccaagctggtctcgaactcctgaactcaggtcatctgcscacctcggcctcccaaagtgctggggttacaggcgtgagccaccgcacccaccctattttttatattgggctgaagtttaagactctggtctaagtacttctgctgaagttttgttgaaaattgttggtctaaaaactaatttgaaaccctcagggctcagcagagaagagaaacaagtgggagggccggtggtagagtctgaggtgaactcctgccccttcccaaggggcggctcctcagctccactgtgggcccggcatggccagagcacctggtcttcaaagagaagccaggaatccagattattaagtgacatttcctgattttttttttgagactgagtctcgctcttgttgagcaggctgaagtgcagtggcacgatctcagctcactgtaacctccgcctcccgggttcaaacaatttttctgcctcagcctccgaagtagctggaattataggggtgagccaccacacccggccctgatttcttaatgtggcactcattataagattgtaaaagcccacctgtagaccaaactgggcacactggctgcctgcttgtgacctctttccagagaaggacacagctcctattagtggctgaagttctgagggctgaggcattcagttcagtgctctttgtaggaacagaggggaggttggggcgggggcttgcwttggaatctggtactgccagcctgccttggtgggggtggggtcagggatgcctcaggttatctgccccaagagtgtgggagccctgacccccaggctccctggctgagctcaccttagactcagagccacagtggatgcctgaggccagcaggcccctctgctccacaggtggaaaagcctaggtccagaaagaggctgtgctcaaggtcacctgggaagttggccgggccttggggagacccctggcaggtcatccagtccagtcttctaggttcccagtcagggctgctgcctccctgctccccaaccgcagcctgaggtgtgagaattctagatagggccacgacagtgtgagcacatgaaagattaccaggaagaggttgaaacctggctcctgggagagagaggggtgtgaggccttggcaggaagcccagtgcttggctgccctggtttcctggggcccaggcatgcgtggtcacagtccacagcctagggctgggccaggaggacatgcctgccagagtcccgagggtgaggggaaggaagggacaggaggcgctcagctggggcagggagaaaccaaaacagaatggtgtgattgaaccaggctgggggtggggggcctaggttccagggccccacccatttgaggggccttcaggggaactgtgttgggcaggctgcatgcctggccttggtcccccaaaagcctgaaagcagcttactatgtgatatataataatrcaaaatagctgggtgtagtggcatgcacttgtagtcctagctacttgggagcctgaggcaggagaccttgagcccaggagtttgaagctgtagtgagctatgattgcaccactgcactccagctggtatgacagagtgagactgtctcttaaaaaaaataataaaagtattaacaggyagagtcccaagtagaaaactgaggttgagggtaggaggagaattcaggtatgtccactgaaaaagttaaccaagatggtgatccagctgcatatttggcttggagctccctggcagtcagaacaaaaggagaaacatgatggtttytacggcacctattaagatgaagaagtaggccggtgcagtgactcatgcctgtaatcccagcactttgggagaacgaggcgggcggatcacttgaggtcgggagtttgagatcagcctggccaacatggagaaaccctgtytytactaaaactacaaaattagccaggcatggtagtgcatgcctgtaatcccagctacctgggaggctgaggcaggaaaatcacttgaacctgggaggtagaggttgcagtgagccgagattgcgccattgcactccagcttgggcaataagagtgaaactccatctcaaaaaaaaaaaaaaaaaaaaagaaaaagatgaagaagtagtcagtcattcaacacatctgtattgaatgccaactgtacagagagaataagacagcagggctctctgccaccatggatttgcatttgagtcgtggaagattaaaattaaggaagcaaccacccaagagcattttagagagcaccaagggctatgaagaaagtgaaaaatagagggtaattggatggtcagggagggcctcacagaggaggtgatgtttgagttgagactaaacaaaggagcaggtgatactcatgtagaggtgttttttttttttttttttttggagaaggaatctcgctttgttgcccaggctcgagtacagtggtgcgatctcagctcacagcaacctctgcctyttggttcaagcrattctcctgcctcagcctcccaagtagctaggattacaggcacctgccaccatgcccggctaatttttgtatttttagtagagacggagttttcaccatgttggccaggctggtctygaactcctgacctcaagcaatccatctgcctcggcctcccaaagtgctgggattacaggcatgagccactgctcctggccctcatgtatagctttgaaggaagaatgtttcaraatcccaggcctggagggtggaggggacttgatcttccaaaggggagaagaatgcttgggaggccggatggaagggaataaaacatygtggctcgtacacggtgcagttagggaggccagagccccaggccacacaaggtcttgcaggccgtgggaggagtgtatatgttgttccagggaccttggacagtcacgagggggttttcagcaggagggtgatatggtgtgacatgcccttgctgcccaggtgggacccaagcccgtttcagacatcatctggcacctaaggctgcagctcaggaacatctcccacctccctgcagatgtctgcaatgtttcttttctccttcctctgctgtgggcgcccagagagtgccctagagagtccttcaggtttctcaggctgcttttccctggtcattctgtgtgtgctgtgtaacatccaccgtctcccctgcctcatcccattctacccccaacccctgcctggggctcatgcctgactctgcactggtgtggcctttgatacttaataaacagggcactgaaggagaagcaggagctggacgtttgcaagatgtcaattcagggaaacccatgtttatcaagctcctgctgtgtgcaaggtccagggttggcccctctgagggtagctgttgagctccccagtgccccagcactgggctcttgcctttggttgattctcgggtgacagtttgccatggagtgtcggttagtgctgggcagcatctgacatcctgcccctgtgcactctgcactggacagtgctcagaacacgtggatccagcaagtgctcagagggcaccactctgtgatctaggtgctgcagggatgggatggagcaaaagaccacatccctttcctgctggagctggcatttaggtgggagagtcagacaataaatgtaataattaagtaatgagataatatgttagatggtgctgagtgtcgtgaagaaaggaagggacagcagaaaaggggtggggagagctggtgagaggatggcagttttaaatcaggagtcaggaaagggcttactacctgtgatcacaggtgacatgtgggaagggagtgagggagtgggtgatgtggtcatctggggaagggcattccaagcagaagaaacagcaagtgcaaagatcccagggcagaactatctgtcatgagttccagtatagtgtggagagaaggagacacagaccatagctccatggagcacctggagggaccctggagagtctctaggggagtgagctcctcttggtctccaactctctcttctcttccctgaggggctcctctctcctttaaaaaaaaattttttttaattgtggtaaaatttacataacaaaattcgccattaaccactttaaactgtacagttcagtggcctttagtccattcacaaagtgctgcaaccatcatctctagttccaaacattttcatcactccaaaaggaaaccctgtgtcctttaaacacttgctccccatttatccccccaagtccccttggtaatcactcacctgcattctctctctatggatttgcctatcctggatatttcatataaatggaatcatacaatatgtgaccttttgtgtctggcttatctcactaagcacagcgttttcaacattcatctgtgttgtgttgtagcatgtatcagtacttcattccttttcacagcagaatgatattccattgtaaaacactacattttttttatccattcattagtttataggccttttggctattgtgagtagtgttgctgtggacatgtgcatacgagtatttattagaatacctgttttcagttatttggggtatacacctaggagtagaattactgggtcacatggtaattctgtttaattttctgaagaaccatcaaggtgatctccacgggggctgcaccatttccaccagtaatgtaccagggtcccaatttctctacatccttttcaatgcttgttattttctggtgtttttttttttcccccccagtgtggccatcttactggatgtgaagtggtatctcatggttttaatttgcatttacctaatggctaattaacactgaggatcttttcatgtgctgattggctatttgtatatgtcatttggagaaatgtttattcaagtcctttgtccatttttaaaattggcttgtctttttgttgagttgtagggttctttatatattctggatattatttaatttgtaaataactcctcccattctgtgggttgtcttttttttgatagtgtcctttgatgcacaaaaattttagttttgctgaagtccaatttatctttttttccttttctttaggtgtcatatctaagaatccattgccaaacccaaggtcatgaaggtttaccgcatgtgttttcttctaagagttttatagttttcacttatatttaggccttgataaattttgagttaatttttgtatatgtgtgaggcaagtccaacttcattgttttgtactcagatatccagttatcccagcaccatttgttaggctgtttttcccctgttgaatggtcttggtacctttgtagaaaatcaactggccatagatgtatggatttatttctagactctcaattctattcatttttttggtttgtttgtttaagaaagggttgcattctttcgacagcccaggctggagtacggtggctccatcttggctcactgcaacctccgtctcctgggttcaagcaattctcccatctcagcctcccaggtagctgggactacaggcgtgtgctaccatgcctggctaatttttgtgtttcttggtagagatggggtttcaccatgttggctaggctggtcctgaattcgtgacctcaagtgatttgctcacctcggcctctcaaagtactgggattacaggcatgtgtgagccactgcgcccagccaattctattcatttgatctatatgtcaataccacactattttggtactgttactgtggcttactgtggttattgtggctttggagcaaattttgaaattccagattgtgaggcctccaactttgttctttttttttttttgagacgcagtctcgctttgtcgcctatgctggagtgcaatggcgcgatctcggctcactgcaacctccgccttctggtttcaggtgattctcctgcctcagcctcccgagtagctgggattacaggcgcccggcaccacgcctagctaatttttctatttttagtagagatgaggtctcaccatgttggtcaggttggtctcaaactcctgacctcatgatctgcctgcctctgcctcccaaagtgctgggattacaggcatgagccaccgtgcccagccaactttgttcttttttaagatcgttttggctgtttgaggtcccttgagattccatgtgaattatagcatcaacttccattttttgcaaaaaaggccattgggattttgacaggaattgcattgagtaaattgctttggggagttttgccatcttaacaatattcggtctttcaatccatgaacatgggatgtctttccgtttatttatgtctttaatttctttcagcaatgttttgtagctttcaatggacaaatcttgcacctcttggttaaatctattcccatgcattttattcttttcgatgttattataaatgaaattgtttgaatttccttttaagattgttcattgctggtatatacaataatcagttgtatagaaatacaactgatttttttgtgttgatcttgtatcctacaactttgctgaatttgtttcttagcatttttttctttttttttttttttttttttttttagacagagtctctctctgttaccaggctggagtgcagtggcatgatctcggctcactgcaacctccgcctcccaggttcaagcgatttttctgcctcagcctcccaagtagctgggactgcaggtgcatgccaccatgcccagctaatttttgtatttttagtagagatggggtttcgccatgttggccagtgtggtctcgatctcttgacctcgtgatctgcccacctcggcctctcaaagtgctggtattacaggcatgagccactgcgcctggcctgtttcttagctttaatagttgtgtgtgtgtgtgtgtgtgtgtgtgtgtgtgtgtgtgtattctttaggatcctctatatataacatcataccgtctgtgaagagaggtagcttcctttccaatttggatggcttttatttatttttcttgcctaattcctctgattggaacttccagtactatgttaaatagcagtagtggagcaggcatctttgtcttgttcctgatcttagacagagggctttcaatattttaccattgagtataatgtcagctgtggggttaaattttttaacgccttttatcatgttgagggagttcccttctgttcctagtttgttgagtgattttatcacaaaaggctattgaattttgtcaaaggctttttgtgcatcaactgagagatcgtgttttccccttctctgcttttgctccccttctactggtagaaaggacccacctaaagcaagcagtgggcgccctagaggggttacagcctagctcttccctgagagcagttcttggtttgaacctgagggcagcgggtccgcctgaggaaaccaggtgtctggaaggtgaaggcttgtggagctgagtagatggggcagtaggtcccagagatatggccagccccagtcatgtcctgctctctgtggagtcccacagaggctgacgaggtatgggggccctgatagctggctacatgcaggccatgccctttggcgggtggtggcgtcagtctggggcagacctcccatgctcacatagtgtgctcattcacccagcactgccttaggttgggctccctagaatggtggctcttaaaccccagcaagtatctgaaacactggagggcttgttccagcagatggctgggcccctcccagagtttctgatccatgttgtcttgggtagagactgggaatctgcatttctaatacattctcaagtgttgtggatgctgctggtctgagaaccacatccctagaagcagagtctgagatggtgcaggcgatttcagatgaaccctgcaagaggcacaggcagtggggagcgggcagagtgagcagctgagcacagatgtggatttggaagtgtggcctcagcctgattccatggagatctctggggcgtgaatgtcaccacagggttgccctgcccagaagcatgtggcctggctgttacaggcccttgtcagtcatggctctcctgggatgatgcaggtgaggtggcttctgtcaggagaagggctctggtgcaccagccagaaaaggggatcaacggcatgcatggccagcacctactgtgtgccaggcatggcctcagcactgtctgcacagcagtgagcagacgcgtgctgtcctcctggagctggcatccttttgagggagatagatgctaatcgggacagtctgtagcctcagggagagaagtgctatctgggaagatgaagccaaggtgtgggctccagggggccccaggtgggagtattttattttatttttttgagacagagtttcactctgtcacccaggctggagtgcagtggtgcgatcttggctcactgcaacctccaccccttgggttgaagagattctcctccctcgcctcctgagtagctgggattacaggcacctgccaccatgcccggctaatttttgtgtttttaatggacaccagatttcaccatgttggccaggctggtcgtgaactctggacctcaagtaatccgcctacctcagcctcccaaagttctgggattacagatgtaagccaccaagcctggctgggtgtggggattttagattagatgaggaggacaggcctctctgactggtttccacctctaagtcctcatccaaagccttgttttatagatgagacagaggcacagagaagtgaattctaaattcacatagccagtggcagaacccagacttggaccagtttggggaacttctgagcctgtccaccccagtcctagcctcacccacagtgcccttgcccagggcgagactatcagggagcctgacctgctggatctgggcagtcccaccgtggcatgctgcatgtcccagagaaggtatctgtcagcagtgcagcaccccccacctgccccacccacagctccctcgggggctatccctggaagtgttggtcagaaagtgaatctccagatgtcacctggtggtgccctgagctcctcctacctgccacctcctctgaccacatagagcctgctctagcccaggccctcttccctctcctcccctcacccagggacccgccactagtccgccccacccactctgtttatttctcaccttggccactgatgggtggtttctcctagagcggtgctgccctgtggaaccttctgcaatgatggaaatgctcagacctgctctgtgcagtccagtcgccactggccgcatgtggctcttgaaatatggagagtgtaactgaggaaccaaacttgaatttttaaaattttgatgaatttacaatcactcgtaagtagccacctgtggctggcagccactggattggatggtgctggtctagggtgttggcaaccacatcactgccttgtgcagaaaccactgctgcaccaggagaaggcccaagtgccagcctcctcttcactgcccgaagcctgctgctccgctgaggggctcgtctcgccaacgttggcacagcaaacacacatactttctcctgtgggggctggtcctgctggccaagtcccgtgcatgctcctgggtggctgcacctggcccctgcaccaggtcaggtccaatctgtggaggataccaaggaacctctttgaggttcccaagtgtgtcccatgccactgcagttttgcagaaggttagtgtgtgtgacttaaaaggcaaagagggcaggcagatcttctgacatctggggggagcaaagttagaatggaatatttgctgcagaacttctcagagcctttagcatgctaggatgtgctgcaaatctccaggaggcaggcggcataagccatgcttcccaaacgacttgccggtggaagcctccttgaggagtgctgtgcgagacccgtggctgtggagcacacgagagaatgcctttctcgtggtttgtgtccatgctgggctctcggctgcattgtcttccagtctgtgtcccctgctggcttcccagggagggagggaggctgtgactccatgtgctccttcagcggctcgtttgtttgctcattcgttcatggaaaaccatggttccatgccagccacacgcggggcctctgccgggcagtgggatgagtgtggtgaacaagaggagctgatgacctcaggcagggaccttcctttctctgggtctgtcccgcaacatacacacacgcacacacgcacacggacatacctgtgcacacatgtatacacaagacacatacacacacatacatacactcatgggtgtgtcctgcagctgtctggctgtgctggtcccagctcttayactcccaccccttcccaggccctgtgatgcctccatgttaccgccagagggcctgggcttgtggaagtggtgccccgtgggcacctctccttcccgaccatgagtgggaccctgctcactgccttctctaccagagtgagggagtgatgccagcttcccccgccttcagccgcccttgccggcctgggctggtggccatgggcattccccagcagtgtgggcaggctgggtgcctggcacccccaggactatgacagaagcctcccctggtggccagggcctaagccatgaggcccctgctggggcctgacttagggtgtgtcctgccttttgtccggccctgagtggcctggctacagcacctcttggccctctgaggttcgtcacccctctgccatcacacccatccctggccaccctctccctgcytgctgcctgctgtctgtcattgaacatgctcgtgtttctcccatcctaaaactcctcctcctggttggtgaacgcaatggccacacttcccactttcctctcatggaatgtctgcagcttggtgcctccctccacctgctccttccagccaccctctctccacctggcctcctgagcactgcaccttaggtctttccacatctcaccctgtcccagggaagcccttgatcgtccccaggggttctctctctgggccttgcccttcagcatgggaagcctgcagtcccaacccagcccttcacctcccactctcccacccctgttctgagctccagtctcacttaaacctcagctgtctcacctggctgccccaggggctgacttggcccatagagagcagaacctagtgccgcctctgtaccctgcttcaggttcacctccaagtgccattaccctcacaggccccagacccgacacctgggccctctaccccttgtccctgcatgctgcctgctaatacctgctcctcttaccaccccagacccttcttatctcatgcttcctcyctagggctgctacttctctattcctgttcccctaattggttctccttgctgcagctagtgcagcttgggacagcaccatctatggttccctactgccctgacgacaatgtgtgagcctgtgctaggagaccaggccctgtgtgataagctyagcctgccctgttccagctgcacccaccttctctrgatcatggactcacttctctgcccacagatacctttttcccttgacctctgcatctggataactcctattcactcttcacctcctgcaaatgccaycacccccagaaagcctctctaataacccccacccagttctcctcttcatcaccacactcatcacactgcaaataagtgtctgcaagtgtcctggcatgagaatgggccctccagtgcccacctggggcacctagcaggcacttagtaaatatttacaaagtgagtggctctgcctcgcgtgggtggggagcagggatgcgttttcagccaggagatggcttggggtttgggttcagctgggcagccagtgccatggatrtttacctggtgcacttggaggtcacagggcacactctgtcctgatcttagtgcagatacctttcaggtaccgtagacccccccagcctcagcagctggagatgagggcagtgcatcccttttgccaggaaggtccgattcccaatggacaaagaggcaatgcagtgcgagggagccagaggccagggctcccgtcccagctctgtcagtgactcattgtgtggccttgggaagatcctcgctgcctaggcctcagtgtccccttctgtacagtgggtggtctagactaatttgttatcccaaagcagtcctagacctgcactgctgacttggagccctctgcacctcctgttctgggcacaagagggcagccaagggcctcagaacgctgaggaaccctggccaactagctttaagmaatgcattgtgtaaactgctctttactgagcccagagcttgycaggagcctggtagggttgtggctstggctctcatttctaccaaaggaagtgtgcttgaccagggagttcatccaagggcacctggaaactgtcctcaaggcatttcccggggaaccaatttctcacgggttgcctcagggtggggaagcggaggccaacagcccctgtctttttccgcagtggtcctttgctgttgctaccatcacagaaatcccccccgttatcttcctccccaacttccttgtgcagaggaaggtgctgaggccccttcggacccagacaggaggaaccataatggtaggtggggtgggggggcatggctgggctgggggcccccacaccccagggtccttctcacctcctttgccctggaatgccctcctcccacttagtagttgaacagaatcctaaatattcctcaaggctcggcaacaatgaccctttctccaaaagccttttttccccatcttgggacatcagaattctcttctcatcgttccttctcctatgacctcctatttgttaccgtaattgctagtatataatatacctctccacccaccaaagcggatatcctagcactatggctttaaggcacaccccctcaccagttttttctttctttctttcttttttttttttgagtagagtctcgttctgtcgcccaggctggagtgcagtggtgtgatcttggctcactgcaacctctgcctcctaggttcaagcgattctcttgcctcaggctcctgagtagctgggactacaggtgttcgccaccatgcctggctaatttttgtatttttagtagagacggggttttaccatgttggccaggctggtcttgaactcctgacctcaaatgatccactcaccttggcctcccaaagtactgggattacaggctttgagccaccatgcccagccctaatgcacccaaaattaagatggagaactgatcctccatgacttcagtgatgaataagcctccacgtctcccccactgcgggtgtggcaacaaagaatccccacagcaaaattaggtttcacattgtgtgtgtggttttttwaaaaaaatgtgccacacactgcctagttatttggagatagaggaatgtttcacatgcaaatgtatgaggatctaacccagccctggatcactacctactgatcccctacagttctgttatgtttgtaaatttgtactttttcctttagcttagtagaatattactgcccatccccaaaactatgatttcctggaagatttcagtatttagtctactatatttctttttttgctttttttttttttttttttttgaracagagtctcactctgtcctccaggctggagtgcaggggtgtgaccttggctcactgcaacctctgcctcctgggttcaagtgattctcctgcctcagcctcccgagtagctgggattacaggcacacgccactctgcctggctaatttttgtatttttagtaragacggggtttcaccatgttggcgaggctggtcttgaactcctgacctcaagtgatccgcctgcctcggcctcccaaagtgctgggattacaggcgtgagccactgcgcctggcccagtctactgtatttctgtgagcaaaactttgcctattttccctttgaaagccatatcaaaattattgtcagctcatatgtgatggatgataagtacttttattttttccagtttccttgcacaatttcaaaggtgcttatgcactgtacatctcatatgccagccaagctggcacttacttcctggactgttgcttggggtagggagttccttctatacccctgccttgtagctcagctcatccttcccccagagctggctagaagcagtgtttatggaatgagtgcatgaatcagtgaatgaatgactggtggatcggctgcctgcgccccctcaccctctgcttgtctccaaaggcggggaagctggctgtggagcgaggctgggccatcaacgtgggtgagtgctgggaatgtcctcgggaatgtccagcccggcttggtggaactggcctgaaagggggctgggggagggcgggaggatcctggaggtggcagctgtgaattcagaagctctggttttcccaagtcaccctagcctccttgtggagtggcctggaggttgatgtgtagcctcctaggtacctgggagagactgaccagtgcctccatctgacgtgggatccttgtctaaggaggtccccgggtggttccccagccccctctttgcgtacttccrgtggcagggagcttcctcccttccagagagcgtgtgccatccttgggcagctcagcatggtctgaagcctgccttgtgtcttccctgaaggactccacctgtgtcctggggcccaggacagcccacagaggcttggtcatgttgggttgggtgggcacatcctgggtcaataccaccaccttctcaagggtccagagggcccgtgctccccagcccccttgaatctcccacaagattggctcatgggagggctgcacgggagtctcccttgtccctgtcattgtccctcctggaggcacagcacttgacaatttacaaagctctttttcaccaggctctttttttctttttcgagacgtagtttcactcttgttgcccaggctggagtgcaatggcrcgatctcggctcaccgcaacctccgcctcccaggttcaaacaattctcctgcctcagcctcctgagtagctgagattacaggcatgcaccaccatgcccggctaattttgtatttttagtagagacagggtttctccatgttggtcaggctgggtcttgaactcccgacctcaggtgatacgcccacctcgctcggcctcccaaagtgctaagattacagacatgagccaccacgcccggccttcacccagactcttatttgagctgggcataattgtcaggcctgtctcactgatgaggaaatggccatggaaagatgcgtactggatcgtgtagagccctaaagcagggtcccccagcctttggctctgaactctgcaggggagagtccaccttgggccactgcacagttgaggggagccccactctgcaggggctgggtctcttccatcttggtattaccaggtgcctagcattcagtctggcatagtaatgatgttatggtactctgctgcacaaacccgggagtgatctgtgccctgcgtgtctacagcagggttccgaggagggcctggatggccctccccatggcaggtgttactgcctggtagaggttaagagcctggatcctgatccaccctgggtttgatcctggttctgccattacctggctgtgtgaccctgggcaagttgctgacctcctctgtgggtcagtctcctcatctgtaaaatggggatggtgatrctaatgcccctcctcgggctggagggagtcttcagcaagctcagttgctcagtcaggtgttcactgtggctgtcttctcatcattaggagccaacagtagcctcctggggggtgggagaggcaagttcctggtatccatggggccagctgcacactgtctgacggagcagttgttgggctcaatttcagagggcctctgcaattcaggccatcccaggggctgcaggggagggggtwtctatgggccctagggctctgaggctgtgtctcagggttgaggggtgatggatcccgggctctagggccctcctcgtggctgtaggcagtcatgaccagcagagggtgcccttcctgaccacccgctttggccactggcagaatccgtgtggcccccataccaccactccttcctggagtggggagccacatggagccaggcccagcttggtggggacaaggagcagctttctgcttctggaatgatgagctatctgttgcttaggggtgtgagtggcactgaggacttgctggggacaccctgaagatgtggctgccttctggcctggggatggtgacatgccccagcactcagcttagtttgccaacccagagtccgaggcacaggttcctgagagctgagcagggaggatgctgggggaggtgaagggatggaggagctcctggactgagcctgggagcctggctctgagcagcaccgctctctgcccttccgcagggggtggcttccaccactgctccagcgaccgtggcgggggcttctgtgcctatgcggacatcacgctcgccatcaaggtgtgtctatgagcaagtggggtctcgcctccaagagccctcctggaatcctccccatagctccaaattaactgttctcaccctgaattatagacaaggggcctatgctggagcagggagggggcttgtttgggttgctcagccaggctggaactgaatccagatctgacacttgctcctcttccatgttgcttagaagggttgcctgtggtggaagggagttattccagcctcccacagagccaggggactagagagggtcaggatctgctgtatagccacatattaagttgtaggaagaagggcatggctggcaaagggagtagggagtggaaagaatgatggtgctgatagcacctggcagttctgcatgctccaaccygcgctgtgctccaggacttactccctgaatcctcgcagacagacaggggcccacagaggtgagggcatgcaaatagcaggggcagaattggcgctggcctctggtctgtggggccccacaactcccctgccactctgtgcctggccttgtgctgggcatcaggaactgactgacctgttcctatgtgtgcctgctctcatggggcacatagactgatggggggaagcaggccattaggagaagggggaagcacaggagaccttcctggggaggagggaatgaaggcttcctggaagagggggcatttaggacttggccttgtaggataaggcagaggttggggactgaagtcccagggctgtggggattctctccttaacccctacacatttcctagggaatctgggaaaatccagggcctgagtgacccacttacctcctgacctatgacccttcagggcacaggacatgccccctcctccagggagccttccctgaccacctcctgcatgcacacatggagccccacagctggagctgcacagctctccctggcaagtgacatctttgctgggtggcctgattacccacaagcattaggcccccctccccgcccctcgccagccagctgggagttgctgtagggctgggtcctctgtccgccccagatcctcatgtctaccctctcctccctggcagtttctgtttgagcgtgtggagggcatctccagggctaccatcattgatcttgatgcccatcaggtgagtgccctgcaggggctggactcttaggggacctgccacccccagttccagaatcttcccggggcaggagagtctccctcctcatgtccccacggctctcacggcttctgtcttctgtctctcgggctacaaatgcagggtctgtctttgtcactctgtccaggacagcgggtcctcctcattgctcccgagggtcctccctccctcctcctgactgcccccacatgaggctcttcctgaagcccactctgatgggactgctctcgtgtgcagagctctgctgtgggtccccattgcttatgaataatttggggcactgccccctgcccagagctgctgagcactggccacctgcccctcaggcggatgcccacacacatggcttggctcgggcacctggggtcaccatttaagaactcggcgcctagggagtaaagtgtcaaagcagagggttacctcctcctcaggacccctaatgaggccagtgcctctggtcagacagggaggggacccagtgggctccggaaggcacccccctgcaccattactgctgtggctttgtgctagttggggccctgccttgggttcttgcgaccccgaactcctgagccaggtcacatgtggacagtcctttacrgtttgcttttcacatccctgatcccaaccagtcccaccacagacttgagagggtggcagagcgggatttcttcctctgatagggaacctaagagcactgggcttgctcaagcccatgctagaaggtgtcggggcctggttttaaggttgaatcccagctctgccccttaacagtcatgagacctgctgcccccgagagcaggccgtgctgccctggcaratggggagtttcctgagrggtgggtgggtggcagagccccagccttgcctagggcacctacccgagagcggctactgtgacctccccacagggcaatgggcatgagcgagacttcatggacgacaagcgtgtgtacatcatggatgtctacaaccgccacatctacccaggggaccgctttgccaagcgtaagctgctgcccctaccctcatcttgggtgtgtccttgtggatgaggctctctcctgagtgtctcctgtctgctaggccctgcagaagccactgcagtggttcatagcatccctgtgaggtgatcctttccattttacagatgaggaaaccgagacctggagaagtcactcgacccacccaagatcacataacccttacaataaacatgcatttgtctggcaaaaaacaggaaagaatgaaagaaaaaaaagaaaaataggataaatttgaaaatacgaaataagaaataaattcacataggctgggcgcggtggctcacgcctgtaatcccagcactttgggaggctgaagtgggcggatcacctgaggtcgggagtttgagaccagcctgaccaacatggagaaaccccatctctactaaaaatacaaaattagctggatgtggtggcgcatgcctgtaatcccagctactcgggaggctgagacaggagaattgcttgaacctgggaggcggaggtttcggtaagccgagatcgcgccattgcactccagcttgggcaacaagagcgaaactccatctcgaaagaaagaaagaaattcatgtataatcgttaaaatgaaaatgcattaaactcatcaatcaaaaggcagagactctcagatgagatttaaaaacagggctgccacctttgcaggtaggggacatttttgcaccagtcacgatgagtctggtgtggataagtcagcagctagtatggcccaaggaaccaatttctgaacagaacctcacatgtgctgagcctgggcttaagggcagggcagggtgtccatgtgtgtaggcaagacccagaggaggcagtgaaatctgacattgccgacacagatctccacacccccagggcagtgtctcagcttcagtgccccttctctcctttgagtccccctttttgcagctcttggtgctcttttcaccttagttttgggtggaatgaggctgagcagtgctgaatctgacagaccagtttccagtcttgcctggtgtccacagtcttgtcctgagcctcagtttcccttctctataaattgaggccatccatgtctctctcccagaggccatcaggcggaaggtggagctggagtggggcacagaggatgatgagtacctggataaggtggagaggaacatcaagaaatccctccaggagcacctgcccgacgtggtggtatacaatgcaggcaccgacatcctcgagggggaccgccttggggggctgtccatcagcccagcggtacgtcctgacccttggggccacgggagggtctgctctatggactcagcagcagcaggaaaggtgggcggcctcatgtcagggaggagatggactgaagcaacagcagtttggagcagggctagccctgcagcaggacttcctgacaccatgggggtctggcctgcctgagtcaccctcctcttcccctaacagggcatcgtgaagcgggatgagctggtgttccggatggtccgtggccgccgggtgcccatccttatggtgacctcaggcgggtaccagaagcgcacagcccgcatcattgctgactccatacttaatctgtttggcctggggctcattgggcctgagtcacccagcgtctccgcacagaactcagacacaccgctgcttccccctgcagtgccctgacccttgctgccctgcctgtcacgtggccctgcctatccgccccttagtgctttttgttttctaacctcatggggtggtggaggcagccttcagtgagcatggaggggcagggccatccctggctggggcctggagctggcccttcctctacttttccctgctggaagccagaagggcttgaggcctctatgggtgggggcagaaggcagagcctgtgtcccagggggacccacacgaagtcaccagcccataggtccagggaggcaggcagttaactgagaattggagaggacaggctaggtcccaggcacagcgagggccctgggcttggggtgttctggttttgagaacggcagacccaggtcggagtgaggaagcttccacctccatcctgactaggcctgcatcctaactgggcctccctccctccccttggtcatgggatttgctgccctctttgccccagagctgaagagctataggcactggtgtggatggcccaggaggtgctggagctaggtctccaggtgggcctggttcccaggcagcaggtgggaaccctgggcctggatgtgaggggcggtcaggaaggggtacaggtgggttccctcatctggagttccccctcaataaagcaaggtctggacctgccttcccaggcccttctgtgggggtgaaggtggggaaggcctgcggcgcccagatcactgccttagcagtagtcttgcctgttcagtgyaaggggcaggttttggggggaggaattcttagcgcaaggacgggcctcagccctgtcgcctccagggggccgctgacccaggtggggagagggcagaagaagggtgggggacgtgggcaggccaggctcacaggtggaaatcagggatgcagggtggtgcccaagccaggtcctgcaggaacccaggcccagggagggacccagacactggtgaggcggggcaggggttcctggagagagggcagcgaggatctctatcctggcctggggattatgaacataggtagccggggcagggccctgggtgggactgtggcctccactggcctcaccaaagtgcctgggccccaatccttctccatgcccaggggccccaggtgggccagacctctggcctgttcctcagccctactcatggggacattcagggacctccaggaagtgggcgggggagcatccacccctgctagccggcagctgtggccctgatcaaatcaggggctggggagggaaagtgggtccattgaggtggccctgctccatcagccccctacgggacttgtgttcattacagtgagggggtgctcccactgtctcccggcctccctaatgctccctctgctgcagggagaagggttccaagatcacaaaatgtcaacaatgctggcctcctggaccagaccccgaggctctaacaatgcactctgagatccctacccttgccgttggtctctgtcgctgactcgaggcacctaacatccattcacacccaacacaggccagcgacttctggggctcagccacagacatggtttgtcactgttgagcttctgttcctagagaatcctagaggcttgattggcccaggctgctgtgtgtgctggaggcaaagaatccctacctcctaggggtgaaaggaaatgaaaatggaaagttcttgtagcgcaaggcctgacatgggtagctgctcaataaatgctagtgtgttatttcatcttctgagtcctgtggagttggtaatgattcccatttcacagatgaggaaactgaggcttggcaggggtgagaaatttgccccaggccacacctcccagcagatctcaacagtggtagagccaggcttgaatccagctctgccagatcccaaagtaaaagttctcagctgcctcacacttggcaggggggtggggtgggggtggggggttactctggacagagaagggtctaggatcccagggtgataaggtcactgggctggggtctgggacagcctgggaatgggtgggcaggcacagctgggctgtgatggtggctctgctgcacagtgggagrgggccctggcagggcagtgggtggatggggtgtcttccaggcctggggtgcttttggagcgcttatggggatgggctgccccgagatgaggctgggctggggtggggtatccaggcagggggaaaggcagagccttggccgggcagagtgaccagagcatccccagtatcagtggcacagcctggatggggggcagggtggccccttgaggttcagacagggtgtcagggaaaaggacatggggtagcaggcaggggtcccgattagccctgtgctgggtgggaggagactgataaaggctgatgctgaccaggtggtactaagggccaggccctatccagactctagctgggaactgcatatggaacttcatggcactctgaggtgagaactgtttccatgcctacttcacagatgtagaagcagaggcaggaaaggggttagttatttgctgagcaccgcagcccctaagtggaggagtgaggactggagcccaggccccagctccagaacctgtgagctgtttcttccttaaagatgctcgtggaagaggttgtcctgggaataagagcctcagtacctggaaggcactcaggacactgggtggctttctgctgctcccagtaactgtcagggtgagggggaggaatgtcctgtaggtcaggcggaagaactgaggccagatgaagtgtttggacctgtttgcaggatctgtgcattttgctgtatgtaaattacaccacaagttacatcaatcccagtggagcaggtcagcttcatgaagtggctgagaggtggcacagcagccctgacgccccagtggctgctggcagccctggataagagcagggacaggctgaggacgactggccatcagactcatgatctggggagaccttgggaggcatgaccttgcaccatgcctggccagtgagccagctgaggcttggggagagggatttcatcttgggagacacagctctgttctctacgggacagacgcagggaggttccagcaggaagcagcagtgcccggctgtaacctggcccctgcccggaacccacccctccaggctaggctaatagggccccagcgggggcgggggcagaggcaggcatgaccatccccactctgctgcctcaggcataaacaaaggcggttgctggcacggggcccctccctgcctagcgggactcctgggcagacctaaaggaagacttttatgatgcctccctggctgctcagccaaacatttggggtttagggccaggaactcctccagggcagcctgcccttgagttggtttcattcagcttagccagcactggctggggacaccttgctcaggcccagggccaacgcgtgaggctctgcaccactctggaagtgacgccgtcacgtgattgctagggaggcccagggagcggacgcgtgggctccagtccctccggcctggctctgagtcctgcctcctcccctcgatagctgtgtgccttagtttactcatctgcaaaatggggatgatagcacctacctcctaggtgttggagaattaaatgagtgaatgtttgtgaagggcttaaagcaagagtaaacactcaattaagcatgcttgattgtggctgtcggcactcatcatcaccatcatcaccaccaccatgttactgatgggaaacaaactcagagaggtgaaatggcttgccgaagactgcagagttgggcaatggcaaagccagggaatgcacccacatccatccgactccaacactagtgccctttccccatggccaggccctctggcaaacagtgtcttggtgagcatggcatcttgcacactgcctggacttccacgcccttccccagctcatagtcttaccagcaaccccgggagaggcaggcctcagcacccttgttgtccagatgagacagagacccggatgggaaaggcagtcccacggcccctcagcggtggtggcagggcctggtggagggaagtgtggcacctgtgggtacattgctgtctactcaggctggggcccgcagagacgggtgctcccacatcctaccctggaaatgctgttcagctggaaaacatacactgggctttctaaagggccattggctttcagcttgaactttcaaagtacaaagtgaattaaaaaatagtcataaaacagcaggcagctgagaaatgcatcatggattggcgtgtgcagctggggctagggccctggagagtacctgttccacctgcctgttccacctgcagaggcccagcctcggcactgcagctggacagggtgtgtgggggtggacgagaagggaggtatcctttgaggaggcctgctcaccctggctcagtgctggctgtcagcgttgtcgatttgtggatggggaaggtgaggcccagggagggcttgaaggagcctggcaccccctggcaagcaaaccagaaccccggcctcctcccctcctcacctggtagcctccttgcggggggtggctgtggtgagcatgtgccatgtgccaggccacatgtgtgagaggattgcagaggcccgtgcacggcgaggcccatgccactctctgcgtgcctggtccttgtttatcctcacagcagcctccctgtgcagggtcctggagctccattgtccaggctggaacaccaaggcttagaggggcctgcaggcccttgcccatggccacacacggtggagtggcagagtggccagtcttcaccaccaccccgggtgttgacctctgaactccctgattttattagggctgaggcactgtggacagggcgggtaaaagccaggacctcagctcagggtgacctcagctcagggtggagagtggcctccagagaaagaatgcagctctgtagttgcccagccagggtttcagtcctgcctctgctgtatacctgcgctgtggccccgggctgagcctcattgcctcctctatagaggactctggtaaacagtgggaatgaggctggcatacagcaggtgcataatacatgtgacactggccaggggcttctttaccctcttctgttctcatcacctctttgactcagcaacagggcaaagtcctgtttccatctctggtttagggcctcccagtgagctgcggggcagcccttttaggcagggccccagaccaaggcttacccagccctcgcgtgcacctgcctggggctgggcctgagccctccctcaaccctcccatggctccaggctcctggctggagagttcgcagggtccgttcagctgaaaggacctggggacacatatcatcaggcctggcgcctgggatgctgggtagcctccctgaagcctgctgcacctccctgctcttggccctggggaatggggctgggcaggtcaccatctctaaactgtgggaagacacccatcttccctcggcgagggtggtcccatacagggaaaattcaggcctggacttggatctgtgtttgaatctaggctctcagtggctgtgggcaaatcacttcacgctttgtgcctcagtttcctcctctgtaaatrgcgatgataatcccttccttccctagggtggcttgagggtcaaggaggctaggcaggtaaagcaccagtctgggtccccctcacatccagaattcgcaggtcacccctgctggtcctgagacagtgacgttcttttcttttcttttcttttcttttttttttttttttttttgagacagagtctcactctgtcacccaggatggagtgcagcggagtggcatgatctcagctcactgcagcctctgcctcccagggtcaagtgattctcctgcctcagcctgcccaagtagctgggattataggcacctgccaccacgccaggctatttttgtatttttagtagagacgggatttcaccatgttggccaggctggtctcgaactcctgacttcaggtgatccgcccgcctcggcctcccaaagtgctgggattacaagcgtgagccaccgcgcccagctgacggtggtcttctgaaagaaagaggtagcgtgcccagtgcatgcacactctgggagccagggcagcagattcaagtcccactgctgcctctaccctccatgtgaccttggacaggtgacagctcctcgtgcctcagttttcccatccgtcaaatggggttcacactagcaccggcctcacagagtggttgtgagaacgaatgaacccatttaagcatcagaactgcacctaatcagcctcagctcttgtatcactgaggggcaggggttgccaacattactgtaatcaacgcctccacctttatttaccctgcaaagcagtacagtaagtccacatttaagtccttgataggttcttggaaactgactttaagtgaaaccacatgaaatcgtttgaatcaggccaggccagtggttcacacttgtaatcccagcactttgggaggctgtggacgggtcacctgaggtcaggaattcaagaccagcctggccaacatggtgaaatcccgtctctactaaaaatacaaaaattagccaggcatggtggtatgtacctgtaatcccagctactggggaggctgaggcaggagaatcgcctgaactggggagctggaggttttagtgagctgagattgtgccactgcactctagcctgggcgacagattgattgggattccatctcaaaaaaaaaaaaaagtttggatctgtgtccccttccaaatctcatgttgaactgtaatttcacataatccccaatgttggaggtgaggcctggtgggaggtgattggatcatgggggtggttttcttatgaaaggtttagtatcatcctcttggtactgtcctcatgacagtgagtgagttgtcatgagatgtggtcatttaaaagtgtgtggtacctccctcctctgtcccttgctcctgctctggccatgtgacctgtgggctccctctttgccttccgccacgattgtaagtttcctgaggcctcctcaggagcggagcagatgcaggcactatgcttcctgtagagctgccaaaccctgagccaattaaccctccttcctttataaattatccagtctcaggtatttctttatagcagctggagaatggactaacacaccagctataacaaaaccaattttaccataggctaattgatataaacaagagttcagttcctacagcgtatttttggtcacaaaaacaacatcaaacttctctaatacgaagcacctctaatattaaacattgaaataaatgtgaggtgtacatacatttaagaaagactagtaaaaacaagatatgtacccacttattccagtctcggctctagggtggctggagcctgtcccaagagcacaagatgggaaccagccctgagctggatatcaccccattatcactatagggcacactcacagacacgctcacactcagactggggccatgtagacacactggttcacctaacacccacatcttcaggatgtgggaagaagccagagtacgtggagggaacacatgcagacgttgggggaacattgcaaactccacacagacagcgggcatggccagaaatcgacatttttttcttatcaacgagacgatgttgaacaaaacgatgttatttgaggacctgctgtattcagtgacttctctgctattttctgggtgccaggccctgtgttgggtgccagcacacagaccgtgtcttccctcctactggtctccaagtttctccaga

SEQ ID NO: 95420 - DNA, 13655 bp, Homo sapiens
  misc_feature (1)...(13655): n = A,T,C or G
acatacatattttttcaagcacaaattcatgcacgctagcgacaggctcacgggtgtgagaactacgagcagatgaacagtgctcatgaggagctaggtcagaaggggtaagacgtaggtgcgtagactctggctggtgactgtgtgcacctggctttataactggtcatcaaaacaccaagatgaacaacccaccttctaacaagatccatcaaaggcttcagggaccaccacatacgcagtcgcccagagagcccggatctggagatattttacctttcagaaaggcagatgaacgaaaaagccatctcttcctttactgaagagtcccagcattcgggattatggctgtgggactgtccctttctggattacgatccagacccctctggggcagcctctccttcacatcggcgcgggaagcccgcctggaggagaggcctctccggcaggcgctggggagctcccagcaaggcttggaaggaggctcagagtttggagggggagcccccatggggtggggggcctgagaagcaggagggaaataaccagggctctctgcacggttcagaagagaggcttgggggcgggcaggggcccaggaagctgagtctgagctgggaaaatggtggagccccagcacacagtgacccccacacccactcagcacacatgtgcatggacccctggcccaccagacctgagtgtgcagacctaggcaccgcactgccctccctcaggtctccttggaaccaggtgttgggggcggctcgagcggggctggtgtgaaagctgcctaaccacagccccatctccgccctgtgctgctgaggggaccccggctgcccacaggttccaggaggctctgtctgacttctggctggccckggagcagctgaggggccaygctgccatcgactacacgcagctgggcctgcggttcaagctgcaagcctgggaggtgaggccgggcagggctcactgtgctgctggctgtggggtgtccacgggcggtggcactgtcacaggagggccctgtggactggggagcgcctctggccgaagctcttggtgccatggaataccctggccactccttgacccgcaggaggttctggtggcagtggaggtggagggaccattttgtgccatttcaggccaccaggggtggctccacccaggaggagggcagaggcgaaaggctgctgggtgggcagggagcaggcagggggttgtgcccaccctccactgtgcccccagccctttcctggctgcctggaacgtgttggcaccgaaggaggggtgctgagaggcccccccaccagaccccggaaatgcatcgccctgaagccttctgggaatagcattgtcttttaggacaaaaagatggaagggaaagcccactggtgtgggtctggagtcagggttaaagccaggtgggggcccgccagcccaggacacagaacggtgcaggggaggggccgggtggggggattgggagaggagctgggtggggagacgggggagaagccaggtggggggactgggggagaggctgggtggggggatgggggaggggccaggtggggggactgggggaggggctgggtgggcagaccgagggaggagctgggtgggggaaccgggagagggcctgggtggggcatcaggcccctgccatcaccttggccccactcccaggtgctacacaatgtggcgtcggcacagtgccagctggggctctggacagaggcggccagcagcctaagggaggccatgtccaagtggccggaggggtccctgaatggcctggactcagccctggaccaagtgcaggtgaggagtgccagcccggtcatggttttgggctggtgcctaccaaagctcctcaagaccaatttcatgagatgaagaagcttccggagggagatggccctagtgcccagtttcgggtgccaggcgggggcttcctgtgacctgcgggaagggggtggggggcccaagcggccccttctgctccaaggcacaggggctctgcggctgcaggcctggttggtcaccccgtctgcatctgctggatacccaccccctccagagacggggctcactgccgccacggcaggtccccaggggygaggtcttccggccccaccggtggcacctgaagcacttggagcccgtggatttcctgggcaaggccaaggtaaaggtggggacggcgtcctggggcatggcggctggtgctgagccctcgaactgtgttcccagggatggggggaggtgcagtccaggccaccgtaagggccaggagggtagagagtgggcccacagccatcctcaaactggcgcccacggtaggggggcggtgccccaaatggggctgtgagcttgaaggcagagcccactagagccggctgcataggagggggctccagctctctcaacaaggaccctgcaggtgccaccccgcccccagactgggccatggccacagccacagccttgcagcctcccagagtccctgcgtctctctgcgtcctttcatgcctttgtgtctccctgtgtccctgccacagacagcgaggtcccgggggggtccctgcgtccctgccacagatagcgaggtcccgggggggtccctgcgtccctgccacagatagcgaggtcccggggggggggggtccctgcgtccctgccacagatagcgaggtcctggggggatgcctgtgtgcctgccacagatagcgaggtccccgggggggtgcctgtgtccctgccacagacagcgaggtcccaggggggtgcctgtgtccctgccacaggtagcgaggtcccggggggggtgcctgtgtctctgccacagctagcgaggtcccggggggcgggggtgcctgtgtccctgccacagatagcgaggtcccggggggtctccctgtgtccctgccacagatagcgaggtccctgggggggtccctgtgtccctgccacagatagcaaggtctcacgggggcrggggctgcagtccgacggtctgggccacgtcacgcccacacttgggtcagagccaggcaacacccctaaagtcacaggaatggggagctgctcacccccaaaggcagcgggcgaaacatggcggagaagaagaactcctggtgggcaaagactgggtcacccttggctggccacgccccggactggccacgccccattggctggccacgccccctcggtcacctgcgctgcgccacggccgactcctgggcccagtgcagctgcccagcaggggaggcctggggtgggcgaagccgggctctgagctgtgttaatgcattaacttagagtccgcatatcacagtagagtgctgtttataagaaaccaaaatgtttttaaagttgtgctaaaaataagttaacattgcagcagatgtttttctccatcagacatttccctccatggtggtctggcagacgtgggccgggcatgggcagctgtcacccagcccccggggacttagagctgcggggcacggtggggcgggctgcagggagcagaccctgctgggccgctgatccctgacccagcgtccccactgtccccgccaggtggtggcctctgccatccccgacgaccagggctggggcgtccgccctcagcagccacaggtgggtttgcggcccctcagacccctgcctggcctcacccagctttctgggaaagaaaatgctgcacaagctctgagccctcctggggctgcgaagttcctctgatgggaggtgtggggtggccatcccatccctgtgtaagacctggggaaaccactcttcaaggttcaggaggagggagggcggcccccgacccttaaccagagcgaggttgttgctttgtgtccacagggaccaggagcgaaccatgatgccaggtaggaggggctgactgggccctgcgagcgcgtgcctttcctgctgggcagaggccctccacatggggccacgcgggccgggcacaggagggcagtcagatgggcagggcctgagagcctccctcctctccctaggtccctaatcatggactccccaagagctggcacccaccagggccccctcgatgcagagacagaggtcggtgctgaccgctgcacgtcgactgcctaccaggagcaggtgcgtgggcctgggcctcttcccctgctgggggtcggtgcttctgctgcctccgcagactggggaccacaatgggaccaacatgagggtggagggagcagctcactggggggtagacggggccgggctcacccgtggtcctggcccagcccagccagatgggaggatgcctggctgtgcccgaggcgagtgggcattggccatcaggacaggagagaggtggtgtccagtggagacatccacgtagccctgcaggccctcagcccccaggaccacctcagtttggccattgcccctcccctcccactggggtgcgagtgaccaggagtgacccagctggggacaggcgggaggcaggacagctctggaggggccccaaggctcccgccccccatgggggcccagcagcgactccatcccccgagtcctcccggacaccccggcacctggggagaggcggaggaaggcaggaaccccagctgctcccagggtggcagccgtgggcggaggctctgctgcaggatccgggaggcccagagaaggcacctgcatttcacgctgagcgcatctgaggatgcgatcaggaagcagccccggcactctctctttatggatgcccacttccagtttaaccgtggcatcccgggggcaagggcgccctccaagctgtgcttcactaattccctcagggtttggaactatttgcccagttcccacgatgggcctttaagctctcgtccttcctaacctaaggcaacttcaaccatctgataaatctaataataagttacaatcgaggccgggcacagtggtctgtaatcccagcaccgtgggaggctgaggtggaaggattgcttgagcctgggaggtggaggctgcagtgagccatgacagtgccactccactccggcctgggcaagacagcaagaccctgtctcaaaaaaaaaaaaaaaaaaagccaggcgaagtggctcacgcctgtaatcccagcactttgggaggcctaggcaggcggatcacaagatcaggagatcgagaccatcccggctaacatggtgaaaccctgtctctactaaaaaatacaaaaaattagctgggcgtggcggcgggcacctgtagtcccagctactcaggaggcagagccaggagaatggcgtgaacccaggaggcggagcttatagtgagccaagatggcgccactgcactccagcctgggcgacagagcgagactccctctcaaaaaacaacagcaatgcctgaccctcagggtctagccagcgctgggctgtgactttgtgacttgcagctggtgaactggtctcctgctcagtgcccaactcagggcacacggttaatgtcgagcccacacagaggccggggcccagggactgggtcctcagcttcctggggtcactggggagcccacccacctggagctgccacctcggtgggccttgggggacggggcgctccctcctggtgacaggcagcctctaggtctgcagggacccagccccatcctaaggcagccgacttgtggccagtgccctgaattcaacacccacagaccacctgctgggtgctggccgggcacacaggccacacccttggtgtgggctctgcgaggacagtaccggcctccagcacctgaccgccccagcccacccagcctgtgcttctcttgcagaggccccaggtggagcaagttggcaaacaggctcctctctccccaggtatgggcgtcctcagcggcggggtccccgggtgaaggaggaagctgctggtgcatgggtgccggctgccctccacccacagggcccactttggtggtagtggctgtgtcagtcttgctctgtcctacagggctgcyggcaatgggggggcctggccccggcccctgtgaggaccccgcgggtgctggggtaagaggctctagacccttcacctgtcagtcacctgagggaggctgaggccaagccccatccctcagaatcaaggcttgcaagcccccctcacctgcccagtctctgtccacacccctcgggctgaagacggccctgaccaggccctgggcctcagcgaccacccctccccctcctgcctggacccagggagcaggtgcagggggctccgagcccctggtgactgtcaccgtgcagtgcgccttcacagtggccctgagggcacgaagaggagccgacctgtccagcctgcgggcactgctgggccaagccctccctcaccaggcccagcttgggcaactcaggtgggccagaaagccccyggtggctgcggtggagctgggcaccgccccgactgaggcagctgctggaagagggggtggcagaggtcactgccctccctgcaggccccacccaggaggccccctctgaggaatctctttgcagttacctagccccaggtgaggacgggcactgggtccccatccccgaggaggagtcgctgcagagggcctggcaggacgcagctgcctgccccagggggctgcagctgcagtgcagggtgagccaagggcgaggcaggggcaggggcaccctgaggggcggtggaggcccctcctcccagtgcccggcccgacctgcagcccactctcctgcctcagggagccgggggtcggccggtcctctaccaggtggtggcccagcacagctactccgcccaggggccagaggacctgggcttccgacagggggacacggtggacgtcctgtgtgaaggtagggtgggcatggcccttcccaggcagcaccgtggtgcccggggtgtggggggcttagagctcggcctgtgctgtgagcagacgtggcacccagaggccacgcctgggtaacgccctgcagagccygatgtcccccttgcagtggaccaggcatggctggagggccactgtgacggccgcatcggcatcttccccaagtgcttcgtggtccccgccggccctyggatgtcaggagcccccggccrcctgccccgatcccagcagggagatcagccctaatgatgctgtgtccatgatgcttttaataaaaacaacccccactgcagtctcaccctccaagtgggkgtgggaggccgggctggcccagcagaagcccccaggcctggactccatccatctgctcagacaacagcagggagagcgggggtccaggtggggcagctccctcccttccacccctctccgcccctcctgaggccccatcaggagcaggacccctgtgcctccgtggtcttgccctgtttgcaggcagcatgtggccctgcagtcacacagcctggagacaccacgagtcctggcggcctgtgtgcagaaaggcacctacggccctggaagcccagttgcggaaggaggttgggggagggacgccgggaggggaggtcatgcagcctctgtggccagcaccaccctgacggtgccctggaggtggctgtcacctgaccgtgggcagagccacagagcaaggccccacggcgctcagggctcaggaagcctccagcatccgggacgcagctgcctgtgggctctgtgggggcccacctccgccttcccactagtcctgcaaccagaagagctggaccaaggcagcccccaccaccgccaccagggccagcaccatgaacaccactttggccacccagacgccgtagctctctgcccgccactgagccggcgcatcggccgggatcatcccggtcaggttcagcatgtagcccagtgtccagccaatgtccacaccgcccgcctgcgggacacacggctgctcagggctgcggggcagctaccccaggaccacgacctgcccacgcccacgccccgcccacgcccaggggaggcagtcacctgctttcggaactcgaggctgggccaggtctcctcgctgaacccgtagccctcgtgcaggagggtgaggatgtacaggcctgaggcacagtagtcccgcagccagcggtcctgcccagggtagctggcctccacctggggcccaggagaccaagaggcgaggtgagggcccctgatccccagtcatgcggggaccgccccatctgtcctggccaacctgagcacgcagacaacaagagggtgccgggcagtggtagagagcccctccctggccccaccgaccagttacgtggtgcgggttgcggccccttcttggcgggccagaggctgggcccagctgcrgccgtggccacagcctcctacctggagtggcacggcctggagctgtcctctgcccttgcctcccccggccctgctggccgtgctgcccagaatgaggctccagcatcctgcccgaggcagccctgtaccctcagggaccctcgctgcagccagggagcccagggcccacccaccagtttccagggcctctggcaaaactcccagatggtggcgttgaccgtgctcaggggctgcctggaggtgaggttcaggaagtggaaggtgtagtagaagttggagaaggcctgagtgagaggggaggtggctgtgccttcgctgtggccacgctgggccagatccaccccacccgggctcccagagcccctaagagccagcctgggcccctcctgggcctgctggagtcagacaggcacctgaggcctcacaaggaagcccggacccctggtgggggcagtgtaggtgctcacatagaactggccccgcagcgggggctggtagaccccgtcaaaggcgcagtcctcctggccctggcagctggagaagttgaaaagttcccggatggctgagacgcaggctccagggttgcctgtcccttcaactgtgaggttctgggggaggctcagcgggggcgtggcgtggacacagggtgactcatacagcgggcccagggccagtgtggtctggtagccgctgaggtagcacgggtgacggagcagggcagccgggcggctctgcagagggcagggaggcctgagcaccagccgcacacctgcggccctgtgcccctccccggggccggatgacccacgccagccccgcgcccataccctgtgcgccctccccggtgccggatgacccacgccagccccgcgcccataccctgtgccccctccccggggccggatgacccacgccagccctgtgcccatagccctgttcccacagccccatgcaccctccccagggccagctgacctgcaccagccccacgaggagcctgctcagcatctggtcccgtccaaagcacaggtagctgtgagtgtagacgctgtagtcggagccgtagaggcgaaaatcggcctgggtgctcttgtccaagatggggcccccaggcacgaacgtgatctgggtggaggcccctcccatgtccagggcacccaccagcatctcctccggaggctggatccattctccagtgaaggagtactgggcacagaaggggccactcagctgggagcagccacccggaccccgtcccggtcagccagccccagacaccagcccctcgcagaccagcccccgccctcaggcagcctgtggcaccttgaccagcgtccccaagccgtagttgacagtgatccaaccaaaggcaccttcggcctgcccggccaggagctcggcaccccaaaagtccacgggagaccggcccaggacctgggtgactgctgcaaagatgtccctggcctgagagctgttcttccggctgggcacagaggaccaggggctggagctggctggaagcctgggcccggccccaccctgcctgccacgctggctgagaccatggcttctgcagccactccccgtgggtgccaaggccatgcctgcctcacctgagcaacctcatgccagccgtggcccccaggaacgtgkgygttttccgatgctgggcctctgggatcagcaccagcgcctcctccaagcagccctgcaggctctcaccagcctgtgcagcattagaagtgtaggaggagattccaggccctggaacagcagccggggacagagctccagaccccgcaggctggctgggctgaaaggtagcccccaaagacgtgaccacctcatgccccctggtgcagccaccagccaagggctgcgtggagtgctcaggctgaaggaagcaggaaggaccctaacccagagcctctggagggggtgcggccctgtccacaccttgttttcagacttctagaatgctgagaaataagctgctactgttttaagcccccaatttgtggtaatttgttaccagagcccccaggaaacaaattcggggcctcctgttttcccctctcaggatcctggagtgcaggcacccctgtaactaccagcctcggctgccagcaccacgtggtgccagggtggggagcaccaggggccagagagggtcagggctggaggcagcagatgctgggcagacccaggccaggccatgagaatctgactgctcaccaggatcaggcagggaggtccccagagtgccaccgcgtgaacgcaggctccggcccagcacccatgcccggcgtgtgagctcagccaagtcactgaacctctccaaaccctttccgtgcagctgggaatcccagccaggcagcaacaggcaggtcccagcaccgggctgcagaacagcccactaaccttccacctggcaggccagggcctggctgaccacacccgtgccattctccttgttcgccrgccactgatacaggaagagggacrtgtgggaggagcccgcatcaaacacgatcccaaactggggagacagtgggatgagtgggaggcaacacctgtggacccggcccggcctcccctgccggcggggacgcaccttgatgtctgtgggcaggagcacgctggtggcctccaccaggaggagaatgagtgccgtgaggcctgagacccccgaggcccccagcagggccaagaagacctgctccttcygggacagccccatggtgcaggtggtactggttcctgtggggggacggccgtgggcacccaggctgcacttggtgtccccatcccgccctccagaggcagaggcttcgctccccgtctccctggagacgcacccctggacagccacttgccttagaggcatctccggggctcagacgcctcccgtggccatagaggcatccccggggctcagacggtctcccgtggccttagaggcatctccggggctcaggcggcctcccgtggccatagaggcatctccggggctcagacggcctcccgtggccatagaggcatccccggggctcagacggcctcccgtggccatagaggcatccccggggctcagacggtctcccgtggccatagaggcatccccggggctcagacgcctcccgtggccaaggaccactccccaggagccacgcctgccaggggtgccatgggcatcagagggccctgtgggaggggggcggggggcagcagaggcctcgtctggggacacagccccagcaggatccaagtagccccctcggaccccctcggatgggactcgcggagctgcccccaccatgtgatggggccaccctgtgtccccacccctcggtcctgcctctcccgtgccaccctccccaggagcagccacagctccagcctgcactgggggcccagggctctgcctcctctctgcggcccccaccccaggcactcctagggtgggggtttctctctggagccctgaggggactgttgccgaggggctgtgggtgaacccagggtgaggccagccatcctaggaagccgagtgtgaggcttcttaacaacatcggtttctctggaaatccagcccaaggcttccctaatctgactctgcaccttcttagctggtgccagatggcgcctggtcgggaggtggacccagggatgccatctgaggggcctgggcttctctagccctgtggccgaggtgtccacctcctcctctgcccaaacgcccagcaagggtctcagctctcaaactaccccaggccgaccctgtgccccatacagccccacttcacacgggtaccactgccaaaggagtggtcaaagccagaggctgcctgccaaggtcccagcacctgaaccccatgtgaccgtgtcctatcgtgttcccccgggaaacgttgcacccacactgagtggcaggcgcgggtgctgccctggtcctgacctggggctcctgggcacgtggaaagtgggacacgctgtggggtcctcacgcaattctgtatgtccgggggatataagcccattttaaggagggtagatgacagaggctcagagaggacaggaggccggtccagcccagacagggcccagcctgtgtccccaaccagcacccaggccataggccacctcatagggacaaacaggtgacaggggccaggaacacagggactccacacccagaagatgtagccacctgagacccccaggcctgagcctccaggtaggcaaagaggttggggcaacctctcccacactcaaaagacccccaagaccagaacagcctcccagatcagaacagctcctcagaccaggaaagcgccccccagaccagaacagcccccccgagaccaggacagtgcccccagaccaggagagccccccagaccaggacaccccctcagacagaacagtcccccagaccaggacagccccccagaccaggacagccccccccagaccaggagagccccccagaccaggacaccccctcagacagaacagtcccccagaccaggacagcccccccagaccaggacagccccccagaccaggacagcccccccagaccaggacagcccccccagaccaggagagtcccccaggccaggacatcccctcacacagaacagtccctgagaccaggacagcccccccagaccaggacaccccctcacacagaacagactcccagatcaggacagccccccagaccaggacagccccccagaccaggacagcccccgccagaccaggacagccccccccagaccaggagagccccccagaccaggacaccccctcacacagaacagattcccagaccaggacagcccccagaccaggacagccccccccagaccaggacagccccccagaccaggacagcccccccccagaccaggagagccccccaggccaggacaccccctcagacagaacagtcccccagaccaggacagccccccagaccaggacagccccccccagaccaggagagccccccagacctaggacaccnnnnnnnnnnnnnnnnnnnnnnnnnnnnnnnnnnnnnnnnnnnnnnnnnnnnnnnnnnnnnnnnnnnnnnnnnnnnnnnnnnnnnnnnnnnnnnnnnnnnnnnnnnnnnnnnnnnnnnnnnnnnnnnnnnnnnnnnnnnnnnnnnnnnnnnnnnnnnnnnnnnnnnnnnnnnnnnnnnnnnnnnnnnnnnnnnnnnnnnnnnnnnnnnnnnnnnnnnnnnnnnnnnnnnnnnnnnnnnnnnnnnnnnnnnnnnnnn

SEQ ID NO: 95421 - DNA, 144232 bp, Homo sapiens
gaaaccccgtctctactaaaattacaaaaattagcctggtgtggtggtgcgcacctgtgcttccagctactcgggaggctgcggtgggagaactgcttgaacccaggaggcagaggttgcagtgagctgagattgtgccgctgcgctccagcctgmgtgacaagaacgagactccgtctcaaaaaacaaaaacaaaaaaactcctgggctcaagtgaccctactcagcctctcaagtggctaggactataggtatgtgctaccatgcccagccaattttttttttttttaatttatgttttgagatggagtccaggctggaatgcagtggcatgatttcggctcactgccacctccatcccccaggttcaagcaattctttgcgtcagcctcccaagtagctgggattacagacgcccgccaccatgcccagctaatttgttgtatttttagtagagacagggtttcaccatgttggccaggccggtctggaactcctgacctcgtgatccacccacctcggcctcccaaagtgctgggattacagatgtgagccaccgcgcctggcataatttttattttttgtagagacagggtctcaccatgtggaccgggctgtgggttgcatttagatgagtgggaccagattgcagtttttgtatgagctgagattacctgccatcatgagaaggctctgtctggccagcactgaagttctggtgccagctgcccctttcctctcttcccttgcctgtatcatcagatgtttacacttgcaaaagggatggggctaggatgaatctgtaacccctgaatagagttagaattattgaatgttaaagctgaaggggaaaattgaggttatctttttcaattcctttttgtaaaatcttactcattttgtaaaatcgggaaactgatccccaagaggtgaagggacttgactgaaatagcccaatactgaatctcctgccttccagggctcctgctgtacaagcctacaggagagcattttattgtatttaatttttttgagatggagtcttgctatgtcacctaggctgaagtgcagtggcacgatcttggctcactgcaaccttagcctcccgggttcaagcgattctcctgcctcagcctcccgagtagctgggattacaggcacccaccatcatgcccggttgatttttgtatttttagtagagatgaggtttcagtatgttagctaggctggtctcgaactcctgacctcaagtgatctgcccgccttggcctcccaaagtgtgggattacaggtgtgagaaacagctgatacttttgaatttagtactgaattctattaatcaactgatggcttaagcgaagcctggtggcccaaggaaactgagctcggagaaagtgtaaatgctagatggttcttgcaaacatgggtgtaaagtagctagctggtcattgcttagatctattctatgacagctgtttagaagatggtggactttttgtttttgtttttggagatggagtttcgctcttgttgcctaggctggagtgccatggcacaatctcagctcactgcaacctccacctcccgggttcaagtgattctcctgccttagcctcccaagaagctgggattacaggcatgcgccaccatgcccggctaattttgttttagtagagatggagtttcaccatgttggtcaggctggtcttgaactcctaacctcaggtgatctgcctgctttggcctcccaaagtgatagtattaaacgttagatagtatctaaacgatagtgctgggattacacgcgtgagccagcatgcccagccttcttcttcttctttttttttttaatagagacagggtctccctatgttgcctaggctggtctggaactcccggactcaagcgatcctcccacctcggcctcccaaagtgatagtattaaacgtgtgagccacctcacctagccagatggtggactattcatttctatttcctttctgagccactgctgggaagttaattccttagtttttttaaaaaactctgctttatgtctgagctattctactctagctagagccacatataactttcacctgcattcttgggtttttggacagaagctttcttttctttttataactgagatctccatcaaggaaagatgacaccctgaaccccgtcctacccccaaggtttatgcctttatcatcctaaagcatcctatgtcctattaaatttagctttgaagataagaccacaatataaagtaataacaggataacctggtttctgaaccttcctgggtgataatgcctgtatttaagtaaagtcatgcacaggtctttccttaaaaaaccgagtcataaggggagaaagtgcttggttgcagaataaaacccttcctggactcttctcccttttttcttttctcttctcttcttctcttctctctctctttctctctctctctctctccccctccctccctcctttcttttttttttttttttgggggttggggatggagtctcagtctgtctcccaggctggagcacagtggtgcgatctcagcccactgcaagctctgcctcccgggttcaagcgactctcctgcctcagcctcctgagtagttgggattaaaggcgcatgccaccacgcccggctgattttttttttgtatttttagtagagacagggtttcaccatgttggtcagactggtctcaaactcctgaccttgtgatccgcccgcctcagcctcccaaagtgctgggattacaggcgtgagccactgtgcccggccttctccttttctttttttccattccttcagcagaaggccaaaccttctgtctctgcaaacaaagcaactgaggcctgaattttgaactcatttatgcagaagcctctgtaagttccagaatataaaagtttatctgtccactttggtctgtggccatgtgaatttatctgacgggtagggatatttttcagctgtgtagggatctaactggtgaggcgagctgagtcatcctgcccatcaacccctgctttacggatgatggaatttaggcaaatcacttcacttccccattttcaatgtcaatgtaaaatcaaggtaaatgtaaaaaagggagttgaactagactctgatgagcttagatctcttcctgccctaatagtctatacttctatgacagcctttgaccgtcacttgctttaatccttctaagccctttgaaggcaaggccgaagagttggtcttcttaaagctcttaggccatatttgttaatttctgtgtaccattaactggctgcacagttatggaaaccacagaatcctgaacttctagaacttctatcatctgtaaagcatgggttgtcaggggagtctctcaagccttttccaacttacaaaactcgacaattctgaatgggggttcccggcagccatcttcccttcaccctagtgttcttctggaggaagtacaatgacacaatccacgggcagtttggaggatttcctagtagcatgtggttaagtgtccccttaaataaatgagtattggccgggtgcggtagctcatgcctataatcccagcaattagggaggccgaagcaggcagattacttgagcccaggagtttgagaccaacccgggcaacatagtgaggctgtgtctctacaaaaaaattaaaaaatgaggtgggaggatcgcttgagcccgggaggtcgaggctgcaatgagcagagatcacgctactgcactcccatgatgggagtgagaccctgcctctaaacaaataaataagtaggtatcttgccaaaggcttggaaatccgctatccttgggagtttcactgtgatttaatttgtcgagagaagatttggcccgagggcatgaaaaaaattgtattattgtagaccatcagagtgttattccagggtcagctaagagcaagtttcaaaacgcaggctctggatggaaatggggtggctactgttgtaggcagacctcgagcaaaagcactgcggatttctcttcttcttaaaggcgtagcccggagaacagctttgacaagttgtttctggcccaagttgtcaaaaccagtctgtatttggctaaagttcatctgcattctctatttaaaaaaaatttccaaacctaacctggatagctgcctcacgatgttgaatcactggctacaaccgagtcaccattttacaagactatggtgttgaaacctgagcccctaatttaagtgtcctcctcaggagttccactgaggaaagtcctttttcggaaaccacagaaggaaaactcagggttagtggtactcattacactggaaggagcttttccacttggctgcattgtttatttacacactgtaagttcctattttggacactcttcccttaattatgagaagaggggtttctattatatcatctggccggatgtattgttgaccccaaaaatgccacataacggtgcttgggacatggggagatgcatggtttagagatttcagcataagcacttggcatcttttttacaagcaagacacctatcttaccatgatttgcaaaaacaatcagatcactgagaaatctcattcccggggtagaaaccatctcctgcgagaaggagctggcacggagtgtctaaccgtgcaaacaaaaccggcttccaggttgacaagttgtaattgctcttccccagttggctccggggagctttttctaagactgacgccccccatgtttggtgacattttatatacgccacctaacaaacttctatgacctgtcttgctagggtggggggaataaaaagaaaagacgacaacaacctagaaggaaataacccatttcctctgcaaaaccatcttcccttgctacggaactgcttggcgacaccagcgctttcctgcggttggcagcccgggaaccttgaagttgcgcgggaccggccgtcagccgctgacagttctgacagtccaggtggaggacccgcgctctgccgggaaatccccggcttcccgctggggacaaacggtggccgccgcagggagtgctgtgtttgggggtcgggggaggcagggagccccactttccctcgcgctgcctcagtgcccggcctgcgtgcgcgcgccagcctggggtaggaaggtacctctgacatttcgctcctgcgacgcgcaggcaacttcatgcggaaaatccgcggaggggctgagcctggagcccccgactcttccgacgtcccggagcccccaacccggggcagggggcactcaaaggccaggcgtgcctttaggtatcttccgggacccaactgtaccagggtcacggacattcaactctcagctacccacaccggcgcgagcgcgtcatcccggtggccctgggcattcctaactgtcagagcgaatatttttgggaataacctctccaaaatgtgaagatgttcagtggtctcctccgcctcccatcccaaaaaaaggccccaacacatattttttaaaaaacaacccacatcccacaatcaaacttttaaacatgtaaaataataaaccaactcaccaagttagaagggaagagaataaacccccaaaggctcccaataaggcggaggcttggcctccccctccttataagccgctcggtaacatgagaaaaggattaaccccttagggggcgggcccgactctagcgcaagttggctcgggctggtgaggcccgagcgcccgggccctccacccactcccgcgactcgggcacccgagccacaccctccccccgccccccaccccggccgcctgcgacccgggccgtgcgtgctgccgcccgcgccccggccccgcgtcgctgcctagctcttatcctataccggctgcagccggtctccgccggcctcgggggcgcgccgccgccgaccatgtgctgcgagcgctgagcgcagccaaggagggggcctgcctggcgcgcgcgcgccgtcccacgtggacctgagccgcgccggtcgcgcgcccgccagcctgccgcctgggctgggggtcacgaaaggtaaccgcgtcgcggtccggggccgggccgcccccgccagcgccgccggggtccttggcacaacgccccgatctcccaacccgggtgcgcctctgcgcgcgtgacccgcccagaccccggagctttgctgcaacgctagtaggagcgcgagcgtgcagggtgttgggggtgcctgcatcctgtctcggagcacctcggccaggcgcgagcgcgcgggtccccgtccccacccccgggcgccttcccggcgcgcccaccgcccagtcccgcccgcgccctgaggatttagggatttagcggcgagggggaacacgcgcgcgccggggctgatcccgcgcggcgctcgcggctgcggcggcttcgcgcccgccccgggcagaacaggttccttccagtttgggtgtgagctgcgcgcgcggcgcctgagttcctcctgcagcgcccacttcccccagtttcgtcaactcgcgcacccccacagttccccttccggcagtggggagggagtgtcgcagtgggccccagggagcgagcggccgggccgctgcgggtgccttgcttcccccactttgctgcaccggcagcagcggcagcaacagcatccgcgttgcgcgaaaggaatgtgagcagccgggctgagtcagcatccccggcccggggcgcgcgcgcaccctccaggcagtggcggcgtcggcacaggtgcatggctcccatacccgcggggagccctctgtaagggacctggaggtttagacagtccgtgcccctcatcccgtagtccccgaccccaaggtcaccgtgaactaagcggatgatgcacgcgaaatctcaggagctcctcatggggacaaagcatgtgtcagatcctagacatttcagagcctgcgggggcgcaaacttagcttcttggtctctacctcacatcccgagggcaaatttggaaactgctcggaagcaaaggccatgttatttgcattcgtatgcagactttggcgccggctgctgccttcattggggttcggagaatgtggttctgatgtcagaaactcaagagagcctagtttgggagtgcatgcacggagggtcgccaccgggaggagtcggcgatctgaattttaataaaaatccttccttgctcgctgagttctctcaccattttgggataggctctcctgagttaaatgccatcctttgccgttgacaagttctggttgtgtaagtggggagaagattcgttggtacagggtgccttgtatggccagtagtgtacagccaaggggccgctgagcagctttgcaaccttgtaggcgtaatttaacctcgtagagcgtkaatttctccagatctgtaaaatggggatggaggtggtattcccagaattggagggtttaatttatggtacttgtaaagtgcggatcgcagtgactggcatttggtaaggcctcagtacccattagctcttgctgctgttacgatttatgctttaccaaggccaattaattgctgactccaacacactccctgtgagagagagcccttttttgagttgttcttcaaaggatccatatataatgatatttagaaactgatttgaacacttcatgctaatgcagggctgcctgtaagataatctttgatatttaggatcttacactttaatacttaggacctgttactgtactctatatggaaatatcatgtgcaatatgacagcatattctgtatgtcttaggaacctaaaggtgcagccagccatttatacctgagtgactcgaagcaagtcacataaaatctctgtacttcagtctcttgatttaaaaaatgactcaaattatacctaaatcctcaggagtgaatgaatgattggaaaaatcacatctgaatgtttgagcaagtgaaacctggcttttggggagcatgattctaataataataataataataataatagatttttgttactaatgtgttactattcttatattttattaatattaatcttttttaaatgtttgctttgtcctcaacactgcattaagtgccatacatgtaatgcaatgttaaccgcatcagtaaccttctgtagttgacactcattattcccattttacagatgaggaaagtggaggcactgagcactggagggattgacctaaggttacaccatgtttatagatacacactagcactttttaccactagagctcatccaaagatgacatttgccatctgtgtttgaataatggagaggtagctggaaacccaacctacgcacagccttgctagtcacaaaaaagtcacgcaacatgacttttgcccaccctagttagaggctggcttcaccttgttccctcaatcctagtgagaccaagcgtgaaaacccctgcttttttaacttctccagagaaagcactgcattgccatgctaatcaacgcccccttgcccccaaacaaaactaactctgtttagttctaaataagaacaaaagaacctttggagtctggagtacaggaccagaaaaatcaggaaatcaagtgaagggctcagctcccctcttagcctctcctgttgtgtctgcctgatcccaagtggcaggcagagccccctctcggctttcctttacagtgggcaagaccatcatgatgcccttaagaagacccccaacatcttcttggggaaaaagttggctcttcagagctgtccccaaggctccctcttttagccctcttgcatagggtcatttgcatgagaacagattcctttgtgtaaagttggcctgcctgttctctgtccacgtttatagtccttcaagtcttcgtgttgggttgctaggcagatatgaccctggcttgcaaataagctcactgcatttaccagcctgtgagaacttcaacttgggtaagtagactgaaaggaatctggtctggacctctgggaagagggtcccgcaagcctgcttttgggggctgactcttcagggcagccatcaaagggggagaatatgtgaagggggcttccatgggaggcttcgatggcccacccacccttccattcttcctcttccagtctctgttccacccaccatgctcccacccaggggcttgtgttctgggcaagtgacttgtatgccactgaagcaatttcttgctttaaaactttaatatctgcttctccaattggccaggaacttcacacactctgccatctagcaacagtgaaccgatggtacaggtagttctgctaggtttattttgtgatttgggttcctcccccgcagcaccccgccaaatttcacagtttgtaggaaggcagggcccttcaaactgggaaacacacacttctgggagaatttaaagatttgccaaggggttctgaggcacagatagtgatgacgatgataataataatactacagagttgtgtgcatggcttagtacagttgctaagttaactgaattaacacgtgcaaggggcttagcactgggattggctcatggtcaggttccctaactcttggctgcgactctttcaacctgtgagtcctgggggattgaggaggatggcgatcagggaagccttcaactggcagagaggaccttgggagaactggcaaggggtgctgagccaagggagaggtgaacagcatgagaagaaggtaggaggtaggtgaggccattctgtatttggggacagtgaggtcaccttcccactcgtgtgtgtgggcggccgatgattgatttctgtcatacctgttaccatttggtgcagtatcgatgtatcgttggtgtctgtcattaactctgaagtaacttttacttgatcagtactgaatttcattcctaggcttctcagtcttcatagttgactgctcctgtagttttgccatttattactgcttaaaaattaaaaaaaaaaatagagaacatagcctccgggaggcttctataaattatctcaagcctgttgcaaaagtcctagaaaacaaacccaggctgagtgtgataatcctagtgcttttggcatgaaggcaggaggattgcttgaagaccaaacgtttgagaccagcctgggcaacacggcaagacaccacatctaagacaaattttttttttttttttttttttttttgagatggagtcttcctctgttgcccaggctggagtgcagtggcgcgatcttggctcactgcaacctctgcctcccgggttcaagcaattctcctgcctcagcctcccaagtagctgggactacaggtgtgtgccaccatgcctggctaatttttgtacttttagtagagacagggttttaccatgttggccaggctggtctcgaactcctggcctcaggtgatccacccacctcagcctcccacagtgctgggattataggcatgagccactgctccggcctaaaaaatatatatttttaaaaaattagctgggtgtggtggtgctgtcacaccactgcacttcagcctgggcaacagagtaagaccctgtctcaaaccaaccaaccaactccaaatctcagaacaaaattatttaaatcacattacatttaggagtgaatgcacgtcacattaaactgtgtgacacagttgtgggtcgtgggatctcattgrcaatattgggaagggctgtgtgtgggaccagtggattttgccccgatcgagtcacgctttcttcagatagttgttgaagttgttccacctgccctgttcctcaaggcccaatgaataaaaacctgctctcctgctgtgtttcttgcctaaagggagatgctgactttccctatcttgtctaaacaggtacctcctgtcctgtgtttctagattcccaggaacaataggcaatgttaagcttccattttaaccctttaggagcagtgcctccgtgagtttccagatggctaggggacgatgcgaagaaactacaaggatgctgcaggattgtgttgtgggcaaatggtgaggaggggccccgccctgctgtgatcggtgggggcctgtggagttaggtgagctttgtagggatacacagcaggactgggtccagggagcatccatccctccatccttccctcccatgcccatcgttcatccgtccatccacccaagcggcctctgctcatccatagcccactcgtgagcactgacaactgctgttgtctcccaggccacaaaaccacacctcagaggatgtggttccttctctcatagtgtgtatagtttagttcagaagacaggacacatgcgattgttacgtaaaacagcatttcaacaagtacaattttacaagtgagaattacaagtgaatgtcttctaagaaagaacttagaaaagtcatctaagttgaggggaatgatgagatgaagctggcagggcgaggcagagcaggctgggctgttgatgttcatgttacatgcactcatccagcaaatattgactgaataccttctgggccgggtgccggaattatgcagtgcataaactatacagaatgtccctgcctttacagagtttccgccctggagttgtagatctttcttgcttgagcacctagctagccaagcatcctggacaaagagttcttttgaaatgtttctgatatggaaatgtaacttccattttcaattaacatcaacaaaggggagattcccctcacacgcatcctacatcttgacctcatattgttaaattgtccgaaaccagatttgctggaaggcagcatactccaaggatgccagctattattagagtctgcttggctgaagggacctggctcaggtttagccaagatggcacagatagtcatgggattgtgtaacaaggaaccatagtttggaacgttgaaaatgtaaactgaaatcagtctttatttcctctttgccttgtttgtgactatggtggcgtgtttgtagcttctgtcttctctaggttcagaaaccagcatcagagcttgcttaacaaacaattctggcagattcagccagtagctgcagggagtctggattttgccatctatactcagaatagttatgtttttatctttttttaaaattaaaaaaattttttttctaatagagatggggtcttgctatgttgcccaggttggtctggaactcctggggtcaggtgatcctcctgtctcrgcatcccagagtgttgggattacaggcgtgagccgctgtgcccagccattatgttttattttaatgttagtaacgctttggcttgcatagcacatttttagtgtgttctcatatttattatccctttatcctcaaaacaatcaagagatggactaacagtagccaatatttcttagcacttactgagaacttgggttggattatttcattctcacattgtgtttggggttgagaaagtttactgtgactctttttttttttttttttttcccctgatatctaattccaggccaaaactccatttttcaggtaagggaggaaactgagacacaaagagattctgtaacatatccatggtcacacagctggcaaatcactgctgaatcccggatacatactcctctggaaataacacatctcaaaagtcaattccccaaaaggcaaatttgctaagtaactgcttcactaaattgtttttttcctaaatttgggtcttacccctatttctgcccctacctgagccttggcttcagagattcctaaaactttaggggaatctgtcttggggtgctcaggatgccataataaaataccatggactaggctgggcttggtgccccacatctgtaatcccagcaatttgggagggtgaggtgggtggatcactttgagatcaggagttcaagaccagtctggtgaaaccctgtctctactaaaaatataaaaattagctgggcatggtggtgtgcatctgtagtcccagctacttgtgaggctgaggcacgagaatcacttgaacccaggaggtggaggttgcagtgagctgagattgctctactgccctccagcctgggtgacagagcgggatcctgtctcaaaaaaaaaaaaaaaaaaaaaagagaagaacactactgtagactaacaacagaaatttacaaaaatacagcccaaacaacagaaatttattgtttacagttctggaggctggccagtttggttcctggtgagggctctcttcctggcctgcagacagccaccttcttgctgtgtcctcacatggcagagagagtgagcaagcaagttctctgatgtttcttcttgtaaaggcactaatcccattatctcatgacctcatctaagccttatcacccctccaaaggcctatcttcaaatatcatcacactgagagttagggcttcaacatacaaattttgggggcacacaaacttttagtttataaaaacatatttcattgagaaagtagaatggatccagggcaaggataaatctacaaaaatagaaaagatagtacaaagcactgtttttcttaagagaaagtttcctattctcatgcaaaaatgacaaagggaaaaaaattgaacttttttttttttttttttttttgagacagagtctcactctgttgcccaggctggagtgcagtggcactgtgttggctcactgcaacctccgtctcctgggttcaagcaattctcctgcctcagcctcctgagtagccaggattacaggcgcccaccaccacgcccggctaatttttatatttttagtagagatggggtttcaccatgttgaccaggctggtctcgaactcctgacgtcaggtgatctgcccacctcggcctcccaaagtgctgggattacaggcatgagccaccgcgcctagctgaaaaaatggaacgttgacacgtaaaccactgatcaggctgaacatgacaaggggaaagatatgatgcataaggtgggcctgccaaaaaaaaaatcgaacctggatcggatctcatcctagatctacaagccagtttaccaggaaaacgggtccagggaacatttcaatagaggatacaatcagctaaatccaaaatttgagaaatgttacagggcaaacaccgtaatttatttacaaatctatgcagagaaaggaagaggggagccataaatgaaaagaaaagagacacgtgaaccaagtgcagtgtgttgtgaaccttgtctggatactgattagaacaaaccaactgttaaaaaaatactgatgagataatggaggacatttgaactctgattggatttttgatgatactaaccaattgttaatttttaaaaggagggtgttatggaattgtagttatatagtaagaattaacttttagagaattgtaccaaaatacttctggataaaattatatgatatttggtattgctttttttttttttttttaagagacagggtcttgctctgttgcccaggctggagtgcagtgacatgatcacagctcacttgcagccttgaactcctgagctccagccatcttcccacttcagcctccctagcagctgggactacaggcacatgccaccatatccagttattttgttgttgttgttgttgcagagagatggggtctcgctttgttgccaaggctggcctctaacccctggccgcaggtgatcctcctgcctcagcctcccaaagcgctgggattacacgtgtggcccaccacgcctggcctggggcttatttcaaaataatccagcatatgtggagagggaggctaagggaaattgaaggagagagccagcctgaccatgtgttgataattgttgaattgaaatgttgggtaagtacatgtgagtttctcaacttttgtgtgtttgacaacttccataataaaatgtttaataagtgataagtaaatacagctttgtaaaaggttcttaaaaatgtggcaaacaggcttccagtgagcgaatttcagacattgacctggagctttcttcttgatcatacccctcaggatttttcttctcaagtggaggatagacttttagaggaaagacgttattcagaggtccatctcctctctctgatctgtgagcgaggacacagatataatttccgcagggctactgggtttttagatgcatggcgtgatgccacctaggctctctcaaactggctcctgcaacatggctttcttctgtgacagtctcaacaggtggttcgagcctaaaactaggcaggatgtcatatgccccctgtggatgggtttcctggcatcgttgggttcacagaaatgatattgcccgaaacagtgtctggtgtgaggtctccaagctttaaaaaaaaaaaaagccactttgggaggccaaggtgggtagatcacgaagtcaggagatcgagaccatcctggctaacatggtgaaaccccgtctctactaaaaatacaaaaaattagccgggcgtggtggcgggcgcctgtagtcccagctactcgggaggctgaggcaggagaatggtgtgaacctggaaggcggagcttgcagtgagccgagatcgcaccactgcactccagcctgggtgacagagtgagactccgtctcaaaaaaaaaaaaaaagcattttaattacgtaagtgaaattgctctcccaggctggatagaggcattcaaagatgtcttgtgcatcttctgttgagcttagactactacatcttggcccctacactctaagaaagcagtctttccaagttgggctagcctcaaaattacatattggggtctatgggcaaaagcctgggacacaaggatgtttattacatgtagataataaataaccctttgtcctggctatcgtggtaactgggttttccttttcacctggatggactagggtgaggcaacatgtaaggaagtgctcactgcccaggtggtgcgagtacagggtggctacccgagcagaagggccacctcctgacgttttgtgccctaggcattttgcttgtctcgctctagcactgtctctcacctggactcacctggacccatgcaagagactcctaactcagctgcttctttcatctgctgccctgcggggcatttgtgtattctcaacagggcagggattctgttacaatgtaaaccagagcctgctgctcttgctgaatccctctggcttcccatctctcgcagcaaaagcctttctttcctctctgaytaatccctgcccttcctttctccattgcttctgcagtggcttctttgccgctccttgcttgtgccagacctcagcctttcccagtttctctgcctttcctgcttggcttcctgatggctgcgtagcttcctccctgacctcacacagatccttatccaaattgtgttttctcgatgagattgtcccagaccaccccctttaactttgcagcctccatcccatgcctgagctccttctttgatgttcttcacgctatttacattttattgatttcatttctcccctcactgtcaaaaaagtaagtggtgtgagggcagggacttttgtctgtttcatttacggctgtatgcactatgcctggtttaaaatctgtcagtcagtacaaatttggtggacagatgacagaatgcgttggggagttgcttccgacaacacgtgagcagctgatgcccaaggccccttctgacagcccctgatggctcgtggccgccagccagcacacagaccatgttctgatctggggagtaaaacaacagcagtccacatcccagagacctgctcccccctgctcttttgtcttttttggcctcggctcatcagatgcttttgtctctggaaaaccaacagaaccctctgccagaaaggtctgcccgaccttcttgttatttcagctgttttcaaggttctctaggaggatgcttggccacagggaggcccatgggaaacgagggtcaggtgatgaagtgagtggctcaggaagcccaaggacttcagctctgtgttttcagacactgctcagcagatcttcaggttgctgcattccattcgcttctcagtgcttctggcccacagcctgcctgtgggtcatttggctgtttatcagtacctttacccctaagcaagcctggaaactgaagggaggtcaaacttgagcacacttagcagccctgctttaaaatgggggtcgtggagaagaataggaatcatgggtaaagctgattgtcaactaaagttcactctgctcctgcttggggagcatgagacatgggaaattgtttatgcttgtgctcaacaaggatctttcacagtcagttgtgctctgatggagcagatgggccttcgttgtgggatttgttgactgacgtggccragtaccttctgccccagtggaaggaggggtgaatgctgtatttgccaaagactctgcctttctttatagccaggagtgctccttccctgtgtctactctcctttctgagagtgatggagaaagaaaaagctggcaaaataacatcagataagatctgagggtagcaagtaaggccattttcttttcttcctttgttctaggggctagatgcaatcaaatgcttggcttatatagctgtatgtttggaggtattgttttcagagacaggatcttgctctgttgcccaggctggagtacagtggcaccatcatagctcgccacagccttgaactcctgggctccagtggtccttccacctcagtttcccaagtatctgggattgtagatgtacaccaccatgcgtggctaattttttaatttttttgtagagatcaggtctcgccatcttgcccaggctggtctccaactctcaggctcaagcagtcctcccaccttgcctcccaaagtgctgggattacaggcatgagccactgagtctggctatggaaccattttccttatatttttgtttcgttttattttttgagatggagtctcactctgtcacccaggttggagtgcagtggcgcaatctcagctcactgcaacccccgcctcccaggttcaagcgattctcctgcctcagcctcccaagcagctgggactacaggtgcacgccactatgcctggctaattttttgtatttttagtagagatggggcttcaccatgttgaccaggctggtcttgaactcctgacctcaggtgrtctgcctgccttggcttcccaaagtgctgagattacaggcatgagccaccgcacccagccccattttccttatagcacttgagctcaacgtttgagcttagatcttaatcaaagtctgtacctgggcatccattctttgagtgtctggtctgccttttccatttagttaacaaaaatggggaaaggattaaatgtttccctggaggtgtgggtgtgaagaataatgcagtggtctgctggctagattcgcttatttccattctatgaacattttaagtaatgattctctttgaaaatcctcaatggaatgtttcatcatggaacactgaagaaacacaatctgtttatttatattcccacctaaattttagcttctttcttaagtgawttttttttccctgaagtcttgtacatgggrtccattctgaaatggattattgaccaggcrtgaggccactctagtgttccaagctaagaagctttaagaggaaaagtctcctgtgtctgttgcacatggtcagaagccagtagaatgatctcggaatcaagcagcaggtccacaggtgtttgttaaccaccctccttgtgctgaggctctttctcctgaaaagggagatgcctttggagtcttaagatcaacaaataccagttgagtctaattgagtttgagataatacatctccttttgggaaacagaagaatttgcatttctgaacaattgattcattggcctccagatgacatgactgtttacttggatttccttttagtttgattaagtacatatttgcccattcttttggtttttatcccggtcttccaaaatttacatacctctaaccacccccatccatgtggattgatcaattgggttggcttgcaaggatgtacaactggaaaaagtgtctgtcataatcccaggcctatcttttttacacagtggttctcctttaatctgctccatacactggatgttcaactgaagctttgttgttgttgttgttaattttagatttaaaaaatacagataaggtctcactatgttggacaggctgatcttgaaccgctagcctcaagtaatccttccgcctcggcctcccaaagtgttgggattacaggaatgaaccacaatgcccagccaactgaaatttttgtttggtccacaatttcaactctgttcctccttattaaacttgcaaattggctggatgtggtgactcatgcatgtaatcccagcactttgagaggttgaggtgggaggatcacttgaacccaggagttccagactggcctgggcaatatagtgagatccagtctgtacaaaaagtaaaaaaattagctgggcgtggtggcatacacttgtaattctagctacccgggaggctgaggcagaaggatcgtttgaacccaggagtttgagattgcagtgagctgggatctgtctctttaaaaataaatacataaataaaataaacttgcaaatttagggcttttaagtgaactagagctaatctagttttatccttggctccatttgcaacctgcagcttaaagtataaccttcaattcccgtctttcaaaactcaagtctgatttgtcgtttttatttgtccactgaagttgagtcatcagttagattaagcagtttcctttttcttcttgcactagcctcatgatgtttttgttttccagcaactttgctgcttaaagtgtgatccaaagacgagcagtayaggcctcacatgggcttgttagaaatacagatcccaggcccagccttacctactgaatctgcggtttaatcaacataaaatccacagcagattcatatgtacctccatgtgtaagatgcaccactggttgaacatgtctttagattttcttattaaaattacatggctaggatgcaaagggacacatttccatgaaaaaaattttttgaaattttttctaacattttattatgaaaattacaaacatacagcaaaattaaaagagttctttagtaagcacccatatatctgctacctagattctattattaactttttaaaaccatttccttttcccccagattaacttctgtcaagaattttggctgggcctgggtgtggtggctcacacctgtaatcccagcacttaaggaggccaaggcgggcagatcacttgagaggtcaggagttcgagaccagcctggccaacatggtgaaaccccgtttctaccaaaaatacaaaaattagctggggtgtgttggtgggcacctgtaatcccagctactaggaggctgaggcatgagaatttcttttttctttttcttctttttttttttgagatggagttttgttcttgttgcccaggctggagtgcagtggtgcgatctcagctcgccgcaatctctgcctcctgggttcaagcgattctcttgcctcagcctcccaagtagctgggattgcaggcatacgccaccatgcccggctcattttgtatttttagtagaactggggtttctccatgttggtcaggctggtctcaaactcccaacctcaggtgatccgcccgccttgacctcccaaagtgctgggattacaggtgtgaaccaccgctccctgcgagaatttcttgaacccgggaggcggaggtttcagtgagccgagattgtgccattgcactccagcctgggtgacagagtgagactcagtctcaaaaaaaaaagaattttagctggtcatagtggcacatgcctgtaatcccagctatgtgggaggttgaggcaagaggatgacttgagccaggagttcaagactggcctaggcaacgtagcaggaccctatctccaaaaatttttttaaatgtagaaacattaggttatagcttgactgttacaaataaccatgtcttggtaataagggtctcacctctccttctggaattctcagtggcacactgggatttagcagcattgggggctggtcctggtcccacccagaacactgggcctcaatatcctcatctctacagtgagtgggttggcagagatcatctctaatgttacttccaaccctgtcgctataggtccattgcgaatattattatcatcactatttttcaggtggagaaactgatgaaccagttaaatatttgaataaaaacatctrttggcatggaaaagtgattatttcctaagctactgagtaaaacacagctgcactggcagttttaactctgttttcttgtcaatttttgttctttcaggaaaccttacagaaacatgaagccctcaaccatctgctactcagttattcggggctgacggcggcttctagaacatccaggtgttctgcagatgcgagaactcatcctgtagtcaccagatggagtcccaaacagccaagcagatgtaaggcctgtgctgtggctctgaggccctgaatacagaagggtcactttcttagtggccaaagagcagttgttgacattgatgtctaattattgaacacgaccagtcattttactgagctgcrgtgaggaaacactgaccatagaagatcaagccaaatgagggattgcaaatttcctgattcttttgaattaggattccagatgggggcctcatttctacagcccccaacattcctatagccgttatcactgccatcaccactgccaccagcatcttcttgcagattccacccctgctccccagagacttcctgctttgaaagtgagcagaaaggaagctctcagaaaaatctctagtggtggctgccgtcgctccagacaatcggaatcctgccttcaccaccatgggctggctttttctaaaggttttgttggygggagtgagtttctcaggatttctttatcctcttgtggatttttgcatcagtggraaaacaagaggacagaagccaaactttgtgattattttggccgatgacatggggtggggtgacctgggagcaaactgggcagaaacaaaggacactgccaaccttgataagatggcttcggagggaatgaggtgagtcttgagatgccaggccagcctttctttggatgtcttactcccgttcttgagaggggawggggccgtgcaaagcacttaaagagtcattgatggacccatgctgatttagttaatttattaattaatttggtttgaagccagcatagcatcgtgaagaaatccagccatctagcacccatccatctatctagtaacattcattatgtgttaggagctaggaatacagaggtgaacaagataaaacatttttgccctcaagttattcattgtctggtagagaagacaggttaaaaggaaagtaaggggctaggtacagtggctcatggctgtaatcccaatgctttgggagactcaggtgggaggttcacctgagcccatgattttgggaccagcttgggcaacctggcaagatcccacttctacaaaaaataaaagcaaattagctagcggtggtggcacgctcctgtggtctcagctactcgggaggctgaagtgggagtgtgtctggaattggtgggttcttggtctcactgacttcaagaatgaagctgcaaaccctcgcggtgagtgttacagctcttaaggtggcacgtctggagtttgttccttctgatgttcagatgtgttcggagtttcttccttctggtgggttcatggtctcactggctcaggagtgaagctgcagaccttcacggtgagtgttacagttcttaaggcggtgcgtctggagttgttcgttcctcccggtgggctcgtggtctcgctggcttcaggagtgaagctgcagaccttcatggtgagtgttacagctcataaaagcagygtggacccaaagagtgagcagtagcaagatttattgcagagagcgaaagaacaaagcttccacagtgtggaaagggacctgagcgggttgccactgctggctcgggcagcctgcttttattctcttatctggccccacccacatcctgctgattggtagagctgagtggcctgttttgacagggtgctgattggtgtgtttacaaaccttgagctagatacagagtgccgattggtgtatttacaatccctgagctagacataaaggttctccaaggccccaccagactcaggagcccagctggcttcacccrgtggatcccgcaccggygctgcaggtggagctgcctgccagtcccgcgccctgcgcctgcactcctcagcctttgggtggtcgatgggactgggcgctgtggagcagggggtggtgctcgaggaggctcgggccgcacaggagcccacggagggggtgggaggctcaggcatggcgggctgcaggtcccgagccctgccccacaggaaggcagctaaggctcggtgagaaatcgagygcagtgctggtgggctggccctgctgagggacctagtacaccctccgcagctgctggcccgggttctaagcccctcattgcccggggcccgcagggccagctggctgctccgagtgyggggcccgccaagcccacgcccacccggaactccagctggcccrcaagcgcagcacgcagccccagttcccgctcgcgcctctcsctccacacctccctgcaagccgagggagccggctctcgccttggccagcctagaaaggggatcctacagtgcagcggtgggctgaagggctcaagtgccaccaaagtgggagcccaggcagaggaggcgccgagagcgagcgagggctgtgaggactgccagcacgctgtcacctctcaggaggatcactggagcccaggagttcaaggttgcagtgagctatgattgtgccactgcactccagtgtgggtcacagagcgagactctgtctcttaaaaaataagtaaataggctgggtgcagtggctcacgcctgtagcactttgggaggctgaggcaggtggatcacctgaggtcaagagttcgagactagcctggccaacctgccgaaaccctctctctactaaaaatacaaaatgtagccgggcgcagtggcaggcacctgtgaccccagctactcgggaggctgaggcaggagaatcacttgaacctgggaggcagaggttgcagtgagctgagatcgcaccactgcactccagcctgggcaataagagtgagactctgtctaaaaaaaaataaataaaataaaaaagtaaataaataaagaaagaaagggaaataagaattataagcaaatagcttctgagcccacatccagagttttttgtttgtttgtttgttttgttgtgttttttttttgagatggagttccgctcttgttgcccaggttggcgtgcagtggcacgatctcagctcactgcaacctccatctcccgggttcaagcgattctcctgcctcagcctcccgagtagctgggattacaggtgtgtgccacctggggagaaaccccagagatcgggtttctccatgttggttagtctggtctcaaactcccaacctcaggtgatccgcccgtctcggcctcccaaaatgctgggattacaagcgtgagccaccacacccagccccaacatccagagtttttggagaacagaagcgagggtgtggaacccaacctggggtttcaagggaggagatggcctttgaagagcaaaagagagtctgtgaggcgtgggagatgtgactcacttatttatgaaaggcgtggcttacacttaaggcatactgaactctaagggaccacaaaagaggagcctatgcatctgatgagttgaagtgtttagaaaacagctattgcagatttttgttaaaacacccagctcctttcccttcttagatggagaacaagcgttagagctttcagacttcaggattttcttcttgggctaacattggtctgattgtccagctcggattctgtctgcactgggcgaaactcctccatgtggttcggggggaatcatttcagctcaccgcttaggatgacgcatagggcatctccacagagttttggccacttgcatcctagagcttgatgcttttcctgagatacgcgcccttggtgggtggtagtttctgcatctggtctcacccactccagttcttcctcacctccatcaaggtgaactttgtagaaacactcttctgcttccagtccttcaaagacattttttagccctaaggataaaacccataccccataccacagctaacaaactggagtttggctgggtgtggtggctcacgcctgtaattccagcactttaggaggccaaggtgggcacatcacttgacaggagttcaagaccagcctggccaacatggcgaaatcccatctctactgaaaatgcaaaaattagccagatgtggcggtgcacgggagaacctgggagacagaggttgcagtgatctgagattgcactgctgcactccagcccgggcaacagactgagactctgtctcaaaacaaacaaacaaaaccaacaaaaccccaaactgatttcttctccactcttctctcttgcagtggtctttggatgagccctcccttcatctgtgtgatgggttcatcctggtgcactctccacttcctctgtttaattagtttctactcactacttaggtctcagttgtacacgagggcctcaggaaagctttcgtggatgcctcgggtgttctgtgatggtccttgctgctttctgtggtggctgttcaatcatctgaccactacattgggttgaatagcatcctccctaaattcatgtccatctagaacctcagaatgtgaccatatttggaaacagggtctttgcaaatgttattaattaaggctctcgatgatctcagaatcgatttagggtgggtcctaaatccagtgacatttccttataagaagaggagaagacacagggacacacagagagagatggtgacgtgaagatggaggcagagattggagccatgcctctacaagccaggaacaccaaggaccgctggcaaccagcagaaccaggagagaggcatggaacagattctccctcagagcctccagaaggtaccagcccggccgacatcttgatttcagacttttagcctcctgtactgtactttttttttttttttttttttgacggagtcttgctctgtcgcccaggttggagtgcagtagtgcgatcttggctcactgcaacctccacctcccaggttcaagcgattctccagcctcagcctcccaagtagctgggattacaagcatctgctgccatgcctggctaatttttgtatttttgtagagatggggtttcaccatgttggctaggctagtctcgaacccctgacctcaagtgatccactcgccttggcctcccaaagtgctgcgattacaggtctgagccaccacgcctggcctgtactgttgttttaagccacacagcttgtggtaatttgttatggcagccacagaaaacttacacacctccctcctagctctggacttcaggaagaaaaatgcctcatctgttctttcccgcttatattcctagcatgtaacacagtgcttggtacgtagtgggcaattaataaatatttgttcatcaataaatgggctctaggagctcaagatgccctggaatgtcaccccaaattttgcatgtaggaatacttttctggggagagagttcatccattcatgaacatttaccagattctccraagggcgtgggttgccaaatgcttaggaacttccgctttcagtgtttagcaggttagcggggaaatattagtcccattatttaagctgagatttgcgaggcctacacgttttttttttctcatgtgctgtctctactgtcacactctcatcctgagcagaaagggcgactcaggggtcagatgccaaatgtggttcgttgggctttccttctccccacccccttatgaaagtgtttctttccatctgagccttgtgacagtggccaggtggctagccctctggcctgaggtccacggcttttcattcttctttgttgacaggaaagccgggcttcctgtgaggccatgaactgattcatcgctggtttctcccactgcctactcacggccagtggggaaccatgactttcagacacgaactcttattgcccaacagggtctggggtgactagctgggactgcacgctcaagccaccacgcccggttctgttgcctcctctttatttgtgcatgaattttctaggactgctggaacaaattactccaaactggacagcttaaaatgttactttgttctggccaggcacagtggctcacacctgtaatcccagcactttgggaggccgaggcgggcagatcacgaggtcaggagatcaagaccatcctggctaacgtggtgaaacgctgtcactactaaaaatacaaaaaattagccgggcatggtggcaggtgcctgtagtcccagctactcaggaggctgaggcaggagaatggcgtgaacccgggaggcagagattgcagtgagccgagattgcgccactgcactccagcctgggtgacagagtgagactccatctcaaaaaaaacaaaaataaaaacaaaaaaacattactttgtcctttcacagttcggagagccagaagtccaaaatcaaggttatgactgaaggctctgacagagaatccattccttgcctctctcctggattctggtgcctgctggaatccttggcattctgggcttctagactcctatctccgcctcagttgttatgaggcgttctttcatgccagtgtccagactcccctcctctaataaaaataccagtctttggattgaaggcccaccctactccagtatgacctcatcttaacttaatgacatctgcgaagacgctatctccaaataaggtcacatcacaggttctggattgatatgaaattgaggggaacgctgttcagtctggtgcaattagctgtattacgtatctctctctctctttttyttttttttttttttgagacacagtttcactctgttgcccaggctggagtgcagtggtgcaatcttggctcactgcaacctccgcctccgggttcaagcgattctcctgcctcggccttctgagtagctggaattacaggcacctgccactacgcacggctgatttttgtatttttagtagagacggagttttgccatgttggccaggctggtcttgaactcctgacctcaagtgattcacctgccttggcctcccaaagtgctgggattacaagcgtgagccaccatgcctggcctacatatctctttttactccgcttctaacgcagtctataatgtagtaggtggtcagtcagtatctgtcgcattaaagactaaatgtcatgcttaagagggcaggagccagacagtttgagctcaaatcccagctctgccacttcctatctgtggccccgggcaaactgcatcatcccctggagttttgctttcctcttctgtaagtggggacaatgatagcacctctacctcacaggatgttgtgagggttaaattaagtaatctgggccgggcacagtggctcacacctgtaatcccagcactttgggaggccgaggcagatggatcacctgaggtcaggagtttgagaccagcctgaccaacaagaagaaaccccatctctactaaaaatacaaaagtagccaggcgtggcggcacatgcttgtaatcccagctactcgggaggctgaggcgggagaatcatttgaacccgggaggcagaagttgcagtgagctgagattgcgccattgtactccagcctgggcaacagagcaagactccatctcaaaaaaaaaaaaaaaaattaagtaatctgtaaaccaggtgtggtgttgcacatctgtggtcccagctactccagaggctgaagcacacggatcccttaatgccaggagttcaaggctgcagtgagctatgatcatgccattgtactccagcctggacaacagagtgtctcataaaaaaaataaaaaataaaaaattaagtaatctgtgtaatcagttagcatagagcctagcatacaatagatagggttctatgttagctatggttatttttgttattgttactagaaatgtccaaatggaatgtcagtgtgaattggctaatctgcatgataaaaggtccagtgacaaaacttggaaggatgaggtggagttccagtgacaaattcctgttaatccctatgctggctgtgcattggggccaacacctttatttgaatcaacacaacagctgcaacaatcactaacccttaccaagctcttgcaaggtgccaggctctaggcattaccctggctaattcttggtaccaccctacttttctcttatatctcagatgaggaaattgaggttaagtaacacgcccagagttggtgagtggccaagccaatattcaaactcagatttcctcattctagagccttattctttcagggctgggcagaaytggggaatcagcaaagagaatccatcaagatttggccagctttcccatatggctgtcaaagagcaggaggccaggcgtggtggttcacatctgtaattccagtactttgggagatcgaggcggaaggattgcttgagctcaggagtttgagagcagcctgggcaacatagcaagacttcatctctacaaaaaaatcaataaattagctgggcgtggtcctacctactccggaggcggagtcaggaggattgcttgagcccaggaggttgaggccacagtgagctatgatcgtgtcactgcactccagcctgggtgatggagtgaaatcctgtctcaaaaaaaaaaggagattggaatctcatcattttttttctccctttggtgctaatgaaggatttttgtgctgtccaagcataagaggcaacctgagaaatgggattgtatttagttatttattttaagatgaagtcttgctctatcgcctaggctggagtgcagtggcgcgatcttggctcactataacctctgcctcccaggttcaagtgattctcctgccttaacctctcgagtagctgggactacaagtgtgtgccaccatacctggctaatttttgtatttttagtagagacagcatttcaccatgttggccaggctgatcttgaactcgacctcaggtgatccacctgcctcggcctcccaaagtgctgggattacaaagtgcgtgggtggcacccaggcagaaatgggatttagatgtcagtcatcaaaatsgttgatgcaaccatcgttcaggaggctcacccagccagggatgtgtgatggctgcagtttcaggtgcctgcaatcttatccygcctactccagcttcatctccaaccctctcctcatgttcctcacattgcacrtgtttctgttccttgaacatatgcttttccctgcctcagggcctttgcactggctgttgcctcttattggcgaggtctctcctcaggcttcaagcagctgatcgcttctcatccttctggcctccactcaaataccatgtcctcagagaggcctttcctgaccgtgctctccaacattgccttcctaccccatgcacatctcctacccattctcctgttctgtttccatgacctgtatcactgttgaaatgatcttctttgtttacttctttgttgcctgtctctcccactggaatattgcctccttacagcagcctccttatctgtcttatttatgtcttcagtggctaaaacaatgcctggcacatggtaggtgctcaaacaataattgttcacgtacttggattcctggatctaaacttctaggtgtgcacacatgggttgacccgagcatgagagctggaactagactgccttggtctgttacttgctagctctgggacactgtgctagttattaaaccttgctggaccttagtatgcttatctctgcaatgggaaaataatggcacctacatcacagggctatggtgaggaggaaataagttaggtcatataaggcagcaaaagggtccctggcatgtattggtgcttgatgggtgctagctcttatgattccctatgacaccggccctgctcccctgttcgtcacaattccctcctctggctggagggtgaggcctgttttctcagcgtctgttccaaaagcaccttgctctatctattcccagactctcacccttccccaggttgagctgtaggactcatctggcttcttagaatctgcttgtttcttctcattcctagaccaaatccccaagtcaacacctaaaggtctcagtaacatttcccttttagtttgtggccagcgcacacgattcgttttttgtttgtttttaacctggttgcaggagatgtgatttgcccatttttgcacagaaagggcaccatccgtaccacaattatgatgtcgttatttgttaaaggaagaaaggaatctgggggaagaaaagcagaatctttcggtgacttcatattttggtatcccttttcagacttctaaactctatttacatggagataaaatagggattatggcctaaaatcccacagccttaagcccatttacagtagcccaggtcaaagagcattcatgtcaccatatccctttgggagaaactgaggccgagagagacgaagtgtttttactgttataatcagctctctgccatgtgggggtcgattatgtggtttgtgggtttgctagctcaaagattgactacatgaaaaataatgatgaactgttttgtttttttttttttgtatgtgaaaaacccaaagctactgcaaatcagcaaacatctctttatcagagggcgttgtcgtttagggcccccagtgttgagagattgctcatgtatgcaccgcaaggccccaagtcccctcgcacatgtcagtaggttaagcagccaacctattttgccgttgaccttgtgggatgtcattttgccaatgtcctttgtagatctgagctgggctgtgctgttgaacacttatcagtttaaaaatgataagatagccagaagataattgaaatgaaatttaaatgaaaatgtcagggacttagtaatcaactaaaacttaaaaatgttaagcaattggccaggcgcagcagctcatgcctgtaatcccagcactttgggaggccaaggccggtggatcacctgaggtcaggagttcaagaccagcctggccaatgtggtgaaaccccgtctctactaaaaatacaaaaattagccgggcgtggtggcgggtgcctgtaatcccagctactcgggaggctgaggcaggagaatctcttgaacccgggaggtggaggttgcagtgagctgagattgtgcctttgcactccagactgggcgacaagagcgagactctgtcttggaaaaaaaaaaaaatcaagtaaaacaggagatgaaagcaacttgcattacaataggggacagaggatgaattgctcatgatttaaaaaagagaagaggaccaatgcattctgttggcatcatttccagctcttcatgcagtctgaaattagttaagataactctgagagctcggtgaataaccctgatgatacaacactagtttggttcttgctggcagcacatctcagacccagggaaagccagtgctggtttcacctgtgataaacaagtgacattatttcttgaaaattctcaggctgggaagtgccttgcatatgactcctggctgggtggctggattcaggcaatggcctaggatttctgaatggggatttgagctcctgggcagtaatgactcacaggtctcttgggagagagacagagaatgcccagtgatcgtgagagagaggtggccacaggcagcgaagcccagatacttcccatttgcttgaactgtctgccaggctgactcagaggtgcaggtgacagcacactgtaatcatgtttacttatgtacgttgatttgcaatatgttaactttgygccttgatctcatttcttctctgctttcccccttctctacccctggtttaattttgagtcaagtcaatgctgctgctgctaggagttacgggcagtggcttagctcggaatcaaagatcaatatttgccacaggaaggtcaggggctcccagggacttgaggctgtttctaaaacgggcctcagtgagcaatgaattgagctgtcaatttagttgaacacttggcttgatttgtgttctcagaattggctttttgcaagagttcatgcaccctgttacctctcagacctctttttctcagccaccctgctgccttggggatttggcagtaacctaatggaagatgcgaaccaggttggcagtcacactgcaggggattgtgatgaggtcttgatatctggtggacagtatggggacgagggcagaaaggacagtctaaacaagaccaatattagggagagcaggccgcttcctctttcatgtaattccttttcagctgtattcctaaccctgacagtaactcagattcagggttgggaggaccctcactggagagaaatcctcttgtcctctgaccttcaccattatcccctagaggccagctttgggaggtcccatcctgacttctctttgtaagctctcggcatggtgggacaggcgactttatgtttttgcacttgagtaaataggtcaaatagaatcaaaatcatgtcatgcccacctttcaactggggccaggtaagtgctgaacaaaagggacttcaggtttttacctcatggctctgtttgatagatggggacaggcaggaacacaatgacctagatggtagccaatcttagagaaaagaaaaggaactgaaatattaaccagtggggccttggtgccagcctgcttaaccaactgcaagctcaaagtagcctgtccaattgctattaatagttcctcttttaagcctcccaaatacagtcattcaacagtgaatctctacgaagaggaggacgtgagacaactgctgggagaccctagccagctctgcccttaagggaccgatggcctgatggcaaataaagacaagaaaaccagcctttagaatgcaggagggtagtgtgctgtgagagtggagactcctgccatatctcctactccttttgcttttataacctgaggtagatgtatctgaattgacagcttaggggatagaactagcatatcacttatagattggtctcagtcaagaaagagaaaggccccttgctgggcttctcaccttttaggtgataaagcttgcagtgaggaatcctgttaaagatagtgccgtggctgggtgcggtggctgacgcctgtaatccaaacactttgggaggccaaggtgggcagactacctgagcccaggagttcgagaccagcctgggcaacacggtgaaatcccatctctactaaaatgcaaaagaaattagtcgggcgtgatggcgtgcgcctgtagtcctagctactcaggaggctgagacaggcgaatcgcttagaacctgggagttggaggttgcagtgagccgagatcgtgccactgcactctggcctaggtgacagagcaagactccgtcttaaaaaaaaaaaaaagatagtgccgtggggctacaggaagagaaaagtcatttctctagagcaaagtcaagaggtcatgagtaaagattatctgttaagacttgaatgctgagacttaaaatgaagggagaggagagtgttgtaggcagaagggaaggcaagagaaaagacccagacctgattcctaggatctccctcggggcactgtcccaggtgctgggaacacagctgtgatccagacaaccaaaagccctcactctccggggggtgttgcattctagcagttgagtatggcagggctgggagtgtgagactggatggagggactgggcatctggtacagtgtgtcatatacatgtttacaggattggacatgatcctgcaagctgtggggatcctgaatgactgaagtcatccacctacatttgagaatttgagatgggattttccagcttaccaggatggcccacctgggtggctggaagggcgggggtcacgttgcagtgatctccaggatggcttgactcagaattgtggcaatggagagagatgtcagattcaggaggcttatagatgcctatgtgtatgtcgcattgtcgtataccttgtgtgtgtgcttccttgaatgtgaatgtgcatatatatatgagactgtgaaaaggaaaggagaaatttgccaaggaccataaccaagctcagctgccaggaatcctttctggaaaagaacaagaggctggatgtggtgacgtgcggtggctacttaggaggccacccaggaggctgagacaggaggatcgcttgagcccaggaatttgaggctgcagtgcactatccttgctcctgtaaatagtcactgcactccagcctggacaacatagcaagaccccatctcaaaaaaaggagaaagaaacaaaaagaaaaagagtataaatggattaatgaatgaatgagtagacgaaaggcaccaagttcactatttgctgccacatttgcttgtagcttacaaagggcctgcgtatccatgatctcaatgatctcacttgacaaccttctgaggaataagtcagctgtgttcccatttaacagaaggcaatgtggaggctgggctgagctggttctctgagttttatttcagctactttccagttcccatctcccaaccctgtccctttacacacaaaggccgcagcaaaagattttaaaaacctattttcacgtccatgcctttaaattatgaatggaacaaggacagtttttattccagtcagagttgccacagaacaccccatcatctattttaaattccttgtaaatgaaggctggacacgcttaactttgcaacgttatgtctctccggggcttttgtggcagcctttccagtgctagccttccctgattctaatacacataatttatgcaatggcaagttgctttggtttctgtctggctgtgtcttaatttgcgttgattttcttgttaacaggctgctgtaatgtctggctctgtatttccagctttgctttacaatgtattttcagactttaattaggacccctgatgatgaactggcctgagcctgcccagatagacttgggaggaaagaaagctttccaaataacaaggtcattttattgcttattaattagtccaactaaatggagacagtggccaggagggggaaaaaaggtgacgtgcaggccagttcataaagctgcatttttgggggtgggtacagcgtctccaaagaattgcaaataaaggaaacgagattgtttctgagagttaagctatgaactttaacacactgtggggaaggaattgagccctgaaagcatccgcttaagtgattacatgaagaatgaactgacatgttttttccaatcaaaccacctgagtttctctaagttttgtttgttcaccagatattgctggggcagccctgccccaccaaggtgctgtgcttggggctggagttgcaactctaagccccatctcatgaaacctacacccggcaaaggaactcaaaactgcatcccrctgtagaaatgtacgatagctggccgggcgcggtggctcatgcctataatcccagcactctgggaggctgaggcaggcggatcacaaggtcaagagatcgagaccatcctggccaaccccatctctactaaaaatacaaaaattagctgggcatggtgttgcgtgcctgtagtcccagctactcaggaggctgaggcaggagaattgcttgaacctgggaggcggaggttgcagtgcgccaagattgtgccactgcactccagcctggcgatagagtgagactccgtctcaaaaaaataaaataaaaaaaaattaaaaaaaaaagaaattaagatagctgttcccaagatgaggacgttaacaagcccacggggagattacatttagggccactgttaaaattgggcaagcagggataacattcaggcagtgtgtttttggcactgaccagccatattagtcagcttgggttgctgtaacaaatacaacagactgtatggcttaaacaataaatgtttatttctcacagttctggaggctaaagtccaacatcagggtactagcatggtcaggttttggtgagggctctttcctggcttgcagayggcccccttcttgctgtattctcacaaggagaatacagttcaagaccagcctggtcaacatagcaagaccccatctctacaataataataaattaataagagagggctctctctctctctctctctgatgttatcatcctaattattggaagacatggagggtctgggaggagaactggttattttttttttggagtgaacagatttcgaatkaacatctagttggtgccatatcctatcagtgtgayttataaattctctcatttgatccttgcagggattttataagattagcattattatcctcacttacatatgagtaaaatgaagttcagatagtttgagtcactgcagactctaatttataaattctaggtctgagaagtcaatgaaaactaggaaaaggactcaaattaacttgactttaccccaaagccatagacatacttaatgagagagagagaaagaaccctcttattaattaattaatcattattattgtaaagatgggctcttgctatgttgccgaggctgattttgaactcctgggctcaagcagtccttccacttcascttcccaaaatgctgggattataggtatgaggcaccactcccagccaagtcctcttttcacaaatgcacttatctcatcatggaagctgatggaaccctcatwaccttatctaaatctaattaccacctaaagggcccatgtccacatatggacacactggggattcgggtttccacatatgaatttcggagggacacaaacattcagtccatggaaccaggcaagaggaaatggtggctcaacagcctttgagtatcccagacccactgtcaaagatcaatccacaggctgggtgctgtagctcatgcctgtaatcccaacactttgggaggccgaagcgggtggatcacctgaggtcaggagttcgagaccagcctggccaacatggcgaaaccccatctctagtaaaaatacaaaaattagccaggtgtggtggcgggtgcctgtaatcccagctatttgggaggctgaggcaggagaattgcttgaaactgggaagtggaggttgcagtgagctgagatcatgccactgcactccagcctggttaacagagcaaaactccatcaaaaaaaaaaaaaaaaaaaaagttaatctacagtagagaaaaggccctcaagcttcacaaagtaaaggacttttttgatgctccatttgaattctcttagcattaacgaagtccacactcactaaggcaaacttcagattctgatttcctgtgtagcttgtgcacaggaagaaaacatgttgaccacgctgacattctggttcctgtacccatccttggaagtcagatgggtcgtgggcattcctgcctctttcttgggctcacatggtttgtgtggatgtgagtcaggctctcggggctggcaccaccaagcatgactctcaggaccttcccagccaaagactggctcctgtaacacgatgacctagttaatacgatacctcctgcggaccggcccagctccagacaaccttccctcgcgtggctgtagtggaaagggcataggaatttgggttggaaaggcctgggttcaaattctggctttgccatttcctccctgtaggggtctgcagtcttcaatatggcaccgtgatgagacaggccttggcataagatgcactgagctcataccagctatgtagtcttggaaagctatttaaactctctctgcctcagcttccttctctgtagaatgggaatttggatgcctrttttacagagtgttttaaaagttagaaatatgtgtaacatgagtagagtagtagccacttggtacgtgttagatatttttgttactataagacaacgctaatgcctatttataccttaggtctcagcttacacttaacttcttttgggaaatgctttcccaacacacaggtatacacacttggtgccctttgagaacatcctgtgcttcatgtttcccaaatcctcttacataatgaaattatccacctccctcactgaccagtgagcagcttgagggcagggatttgtcttgttcattgatatatcctggatcacctacagcaggggttctcaacccccaggccactgtaccagtccatgacttgttaggagctgggccctacagcaggaggtgagcggcatgtgagtgaagcttcatctgtatttacagccactcctcatcgcttgcattaccgcctgagctccgcctcctgtcagatcaacagcggcattagattctcacaggagtgcgagccctattgtgaactgcccatgtgagggatctaggttgcatgttccttataagaatctaatgcctgatgatctgtcagtggctcccatcacccccagatgggaccatctagttgcaggaaaacaagctcagggctcccacttgttctacattatggtgagttgtgtaattatttcattatatattacaatataataataatagaaataaagtgcacaataaatgtaatgcatttgaatcatctcgaaaccatccctcccaacccctgtctgtggaaaaactgtcttccatgaaactggtccctggtaccaggaaggtgggggatagctgacctacagtataatagccaggactctctggttgtaagtgacggaaacccaactcaatcaacctaaacacaaaagaggcacaggtggggctcttgaactaagcccctgagagcctccattttttcctctgtgcttctgagccagttggcccattctttcaagttcctccatgtgatagtcaaggaagcccttacccttctggggttgcctgcttatagcttgatattccagagggggagaaaagagctatttctcattctctggttcagaaaattccaagtttaaattcacaatagccctgcttggctcatgggtcatgggccagttcaccaaggacagaagcttgtgctagtttgattagcatgcagtggagtcccacactgcattagtatccaggtgggacattacatgggaaactatcattaggtctcaccaggtagagtgcaggacccgagctgctgttggtggagaaacagcgttcctgaggtctggaattataccctagggcagtgacaagactaggcagacatacctctgctcttgtggaactctaacctagataagggagccagcagcagcaagaagacaaatccctgaacaagataaagtcagatatgataagggttagggacaaactcgaacagtgctgctgcaggtgtagccgggtcagggagatctccccaggaggcgaaatgagagctgaagcccagctgaccaggaggggccagccctgtggagaccagagcagagtgatcaggacagagggaacacaaaaagggcctgaggccagagccagctggaagtgttctagaaaaaacaactcagcctggcgcggtggctcacacctgtaattccagcacttttggaggcccaggtggatggatcttgaggtcaggagtttgagaccagcctggccaagatggtgaaactccgtctctactctaaatacaaaaattagccaggcgtggtggcccatgcctatagtcccagctacttgggaggctgaggcagaagaatctcttgaacctgggaggcggaggttgtggtcagccgagatcgtgccattgcactccagcctgggtgacaagagcgaaactccgtctaaaaaacaaacaaacaaaaaaagcagaaagtaaaagcaactcaccttgtctggctggaggggagagagcttggggaggaggggagttgatgccaaacggggtccagatcactgaggtggcaagttcccacctttcccgtgttgtgtcacacctggaaactaatacttcttgtggtgggttggggtgggtggttgtgcatcaagcaacagtcgtcagcagccccatgagtcatgtggaaggagtggccagagaaagagtggatgctctacagcaaaacacaactgatggtagcaatagtcagtgctcagacaacaggcagatgtctacattagacatgaaaaggctgcaagacagtttcacgtgcttccgaagtcaaagtcagggcttatcctcctggagggtaaggaaagactttgtgataatagtaggttctgaaggacaagtaggagtttggaagggcaagaagagggtaatgcattatttagcagagatacaacagagttaacatgttgagctggagagttgagtggggcgtgggggagggagggattccagatgttccaggaaaaagaatactgttgagctggaccctggagacacgcagggaggtgtactcgttttgaggcctgctgtaacacagtaccacaaattgagtagcttacaaccaccaaaatatattatcttacaatgctggagtctagaagttcaagatcaaggtgttggcagagccacactccctccacagcgctaggagaagttccttcctttcctcttccagcttttggtagctccaggcattccttggcttgtgctggcatcattttcatctctgcctcttcttcacatggccatcttccctctgtgtgtctctgtgtcttcgcagcattctcttctctgtgtctctctgctcttctaaaataaggacaacagttacattgcatcaagacccactctacttcggtataatctcatcttaacttaaaattacctctgcaatcaccctttttctaattacattcacattctaaggtagagggctcaggacttcaacatatcttttggggggacgcagcccaacccacagcaagcagccatggctcagaggctgataggtaggttgagccagagcatgaygggttatggtggctgagacttggggctacaaaatggcatgaccaatcagcgtgctaccatgggttagagagagtgcttcgggtgagggacaaccatcattttgatcctgggtggcgtcattgggaatgaggaggatctgaaggatgcaggaagtggcagagagacttgaagataatgccttggtctctactgcctcagtgccactgcttgaccaggagggggtggtcacagcttttggagggagaatgctgagcttggttcagtgcatgttgagtctgagttgacatgtgacatacgtgtggcagtgtacatgataccaggatagcagcagcagcatcgaaatgccactcacccccagagttccatccactcacatcccgctcacttattgcccctccacacactgaaatgttctctttctcccatttagctggtgatggcagtcatcatgttgcctgccatgaattttaaaaacctactctgtgctggatgctttgctaattactttatgtacatcaccttatggaattcttcaaataacttgatgagataggtctgattatgcccattttgcagaagaagataactgaggcttagattgagttacctgtctagtctcacactagacagagttggggtcgtatttggacccaggcttgtctttccgtgcctttaattttcttatcactctgcctcccatagcattttctttgtatttctcagatagggctcatcttattttctcttattatccacatatgacagttctgctagagtataaactcgttgatggaaagggctgtagctccccagctagctctgtcgtggttggttgaactagaccaggagcttgtaggtgaaaggtttgagatggcaggtgataygcatgtgtctgtttggaggcagagagatgaacaaagggagggatgtccagtggtgtcttcaggtctacatgcctagatgctggagggatgaagtcatgggacctgcagagaacccagctgaggaagccagtgtcgatgcaggctatggctttcccaccagactggaagaaacaggtcttacgaggtagagtgcaggacctgagctgctgatggtggaaaaacagcattcttgaggtctggaattacaccccagggcagtgatgagactaggcagacatacctctgctcttgtggaactctaatctggataagggagccagcagcagcaaaaagacaaatccctgaacaagataaagtcagatatgataagggttagggacaaactcgaacagtgctgctgcgggtgtagccgggtcagggagacctccccaggaggtgaaatgagagctgaagtccagctgaccaagaggggccagccatgtggagaccagagcagagtgattaggacagagggaacaagaaaagggcctgaggccagaaccagctgggggtgttctagaaaaagcaactcaccttgtctggctggacgggagagagcttggggaggaggggtttgatgccacacagggtccagatcactggggtggtgagttcccacctttcccgtgtcatgtcacatctggaaattagtgatatttgtgcccctttccaaggacctccactgaggctggcagtggagggctgtctccacattgtgctgtaaggggactgctttccgtggagctgggcgggtaacagacagagcccacattggacagctctggtgcctcgagttgccccaggccccactggctgccccaggggctgagatgagcacagtctaagaaaacttttggttcatttgggcctaactgtgctccagctcccctgctgggaggctgtgatggagggcctgtagaccgtgctgacttcgaatttgctttgactgcaataagaacccatgaaagggtttccagccagggactaatcgcaggggtgtctaatcttttggcttccctgggccatgttggaagaagaattgtcttgggccacatataaaatactctaacattaacgataactgataagctaaaaaaaatcacaaaaaaatcaatgttttaagaaagtttatgaatttgtgttgggccgcattcaagctatcctgggctgtatgtactcatgctaggtgataatcattttcaaagacgctgggtgtggtggctcactcctgaaatcccagcactttgggaagccaagacgggtggatcacctgaggttgggggttcgagaccagcctggctaacatggtgaaaccctgtctctattaaaaatacaaaaattagctgggtgtggtggcatgtgcctgtaatcccagctacttgggaggctgaggcaggagaaccacttgaaccctggaagtggaggttgtagtgagctgagatcgagccactgcactccagcctgggtggcagagtgaggctccatctcaaaaaaaaaaagaaaaagaaaaagtttaaagatgactttggatgcaccatggaaaatgaggggagggggaattggagacaggaattggaagtggggagtaagtagggctgccacttatagctggggagactgtatattgctcacctctggactgtggtgtgaatggtggcccttgggttgtttgacatgatggccctaggatctgggtacaaggtggtggtagcttggaccaggacatgagcagatagatggagagaaatggatagattctggatatatttggaagttgagttgataggacatgctaataatttagctgtggagaggcaggagggaatgagagaaacctcagatgactgtgacttgagtgacagggtggggggtgctatttactgagagggaagattggtataggaatagctggtatgtagggaaaaatctaaagaaagcccagataaacttgcagaaactggcaaaggaagcaaccacatgccacatgggagcgctgtctggggccctgagaccaacaagcagttttctcctggcctgggaagcccattgggctgagagatttaagacaaggctgatggcattgtggagggctagctttaggggcactgtggcctgggcagttgcacacttagaccctgtgcttggttgcaggctttgctgtcactgtcttaaaatttttagtgattcttgaaccagggacgctgcattttctttacctttttcttttctttacttttctttatttctttttttttgcggggggggggggaggtggtgggcggggacagagtgttactctgtcacccaggctggagtgcagtggcatgatctcagctcactgcaacatctgcctcctgggttcaagcaattctcgtgtctcagcctcccgagtagctgggactataggcgcccaccaccacatccagctaattttttgtattttagcaaagacagggtttctttctttctttctttctttctttctttctttctttgctttctttctttctttctttctttctttttttgagacagagtcttgctctgtcacccagactggagtgtagtggcacaatctcggctcactgaaagctcctgggttcatgccattctcctgcctcagcctctggagtagctgggactacaggcgcccaccagcttgcctggctaatttttcgtatttttagtagagacggggtttcaccgtgttagccaggatggtcttgatctcctgacctcatgatctgcccgccttggcctcccaaagtgctgggattacaggcgtgagccactgcgcctggtgcaaaggcaaggtttcactgtgttgctcaggctggtcttgaactcctgagctcagacaatccgcctacctcggcttcccaaagtgctaggattacaggcatgagccactgtgcctggcctgactattgggggaaactcagcccctgatatttcacgtgcgtccttttctattttccctaagtgtcagccagtctgagaaataaagggaaagagtacaaaacagagaaattttaaagctgggtgtccgggggagacatcacatgttggcaggttccgtgatgcccccaagccacaaaaccagcaagcttggggagggagtgtacgaatagggtgtgggtcacagagatcacatgcttcacgaggtaatagaatattacaaggcaaatggaggcagggcgagatcacaggaccgaggcaaaattagaattgctaatgaagtttccgacatgcattgtcattgataacatcttattaggagrcagggtttgagagcagacaaccggtctgaccaaaatttattaggtgggaatttcctcgtcctaataagcctgggagcactacgggcgaccggggattatttcatcctttatgtacaaccgtgaaagacagacattcccaaagtggccattttagagacctccccttgggaacgcattctgcttctcagggatgttccttgctgagaaaaagaattcagcgatatttctcctatttgcttttgaaagaagagaaatatagctctgttccgcccagcccacaggcagccagactttaaggttatctcctttgttccctgaacatcgctgttaccctgtttttttcaagatgcccagatttcatattgtttaaacaatttgtgcagttaatgcaatcatcacagggtcctgaggcgacattcatcctcagcttacaaagatgacaggattaagagattaaaggcaggcataggaaatcacaagagtattgattggggaagtgataagtgtccatgaaatcttcacaattgatgttaagagattgcagtaaagacaggcataagaaattataaaagtataattttggggaactaataaatgtccatgaaatcatcacaatttatgttcagagattgcagtaaagacagacataagaaattataaaagtattaatttggaraacttaataaatgtccatgaaatcttcacaatttatgttcttctgccatggcttcagccagtccctccgttcggggtccctgacttcctgcaacacctgaccctgcattttcatattttactgggttccatgaattttgaagctggttatgctgtggtggataaagagacaacaccagtaagcttgggccagcttgtacagagctacaaattctgaccaaaatgaagccaggggcaacagaagcttatgacttaatgtatgtgaagtgcttggaaaagtgcctggattatagtaagtgttgcataaatgtcagctataagagtaataagagggctgggcccagtggctcacgcctgtaatcccagcattttgggaggctgaggtgggtggatcatgaggtcaggagattgagaccatcctggctaacatggtgaaaccccgtctctactaaaaatacaacaacaacaacaaaaaattagccaggcatgggggcagacacctgtagtcccagctactcgagaggctgaggtaggagaatggcgtgaacgtgggaggcagagcttgcagcgaagggagatcgcgccactgcactccagcctgggcgacagagcgagactccgtctcaaaaaaaataaaagagtaataagaggccgggcgtggtggctcacgcctgtaatcctagcactttgggaggccaaggcgggcggatcacctgaggtcaggagttcgagaccagcctggccaacagtggcaaaaccccatctctactaaaaatacaaaattagccgagcatggtggtgtacgcctgtaatcccagctacttgggaggctgaggcaggagaatcgcttgaactcgggaggtggaggttgcagtgagccgagatcgtgccattgcactccagcctgggcaacaagggcaaaactctgtctcaaaaataataataataataataataataataataataataataaaagagtaataagagttgttataaggaatgtttaggagtgtgagccaagaggatccttgtgcttcagtctcaggaggaagggaacagaaaaagctgggtagagatgaatatttggggagcaaagttgtgagcaatagctagaactcgatttggacatcaaagggtagcagttactagctaccagccacatccacatcctgggctcagaagttgggtcctggtggtcccaatacgtgtggctgccagggacgctttgaaagaaacctgtgcctagggaattttacccaaggcccccagtgatggagggaagaaagcctgcagtgtttcttctagcctccaggagactgatggttcaggaaggaagagctggccggggtggcgccaggagctccctgaggttctggagggaggacctcacccaacctgtcagtgcatatgttggcgcacacaccttcccttccctcattctggcagaaagagggatcaatggcctgcttctaagatttggtttcaaggccaggccaggcttccagatggacaggactgggatctcacagtgcaatttcactgctctctgatgatgtccattgctgtttgtcaccttgaaaaacagcatcagggaatgaacccatcttctgggactgaggcccaggtctctttagcaagccttgttatgtggtacgaaagcaaagaggacagtggcgtcacccaatcagcacacatttggtagcaccccatttattctttgctgtgctggagacttcatagtgaaccaaaccttatcttatgagagacacagacattcttctggctgtgtattgctgagtaacaagccagccctaaccttaggttcaagcaacaaccattttcttagagcccatgatctttgcggtgaggaattcaggcactccttggttgggcaattctttagtactgggcgttgactaaggtcgcctcgtggagtgtagcaagcagatggtcaggctgggaggtctgagatggccttgctcctatggcggacatctccacggggaaggtctgagctggagtcaccggccagaggacctacagacggcctctgcaacgtgatggtctctgggtggttcagcttcttatatggcggctcacagagtgtttccagacaggaggtagaagctgccagtcttgtaaggcctgagcccagaaactggcatgtagggtcactcactgccacattattctgttggtcactgcagtcacagaacccatgcagattcaaggggaggggacatagaccccacctctcaatgggaggcatgtcaaagcattagtggcctttattatttatttatttatttgttgagacagggtctcactctgtcacccaggttggagtgcagtggtgcgatcatgattcactgcagcctctaactcctgggcttaagccatcctcccgcctcagccccccaagtagctgggactacaggtatgtatcaccacacctggctaatttttaaatattttgtagagacgggagtctccctatattgcccaggctgggtctcgaactcctggactcaagcaattatcactgttgtagttgagtgttataagagatatgtcggccaggtggctcatgcctgtaatcccagcactttgggaggccgagacgggtggatcgcaaggtccggagattgagaccatcctggctaacacggagaaacctcgtctctactaaaaatacaaaaaaattagccgggcgtagtggcgggcgcctgtagtcccagctactcgggaggctgagacaggagaatggcgtgaacccaggaggcggagcttgcagtgagccgagatcatgccactgccctccagcctgggcaacagagcgagactccatctcaaaaaaaaaaaaaaaaagatatatgtcaaatggtatataattacatggagaagggagaccccgcttctgtgcgggtattggggcgtggcagataggttgcaggaggagagatcagggaggatgtcatcgaggtgctaacattggaacatttgaactaggccttgaagacagctgggatttgccaatgaatggaaggtaggatagtggggagagacattcccagtggggagaacagcgtgtgcgaaggcacagatgcatgggagtaatgtggtgtgttggaagcaaaggaggtgcaggcatcggggcagcagataagcccagagaagcaagaagagcaatatcgtgtttttcttttctgtttttgagatggagtctcactctgccacccaggctggagtgcagtggtgctatctgagctcactgcaacctctgcctcccagtttcaagcgattcttctgcctcagcctcccaagtagctgggactacagacacccaccaccacacctggctaatttttgtatttttagtagagacggggtttcactacgttggccaggatggtcttgatctcctgacctcaggtgatctgcctgcctcggcctcccaaagtgctgggattacaggtgtcagccaccgtgcctggtcttctttcttttcttttctttctttttttttagacagactctcactctgtcgcccaggctgcagtgcagtggcacgatctcagctcactgcaacctccttctcccagattcaagcggttctcctgcctcagtctcctgagtagctgggactacagacacccgccaccacacctggctcatttttgtatttttagtagggacagggtttcactatgttggccaggctggtcttgaactcctgacctaaagtgatccacccaccttggcctcccaaaatgctgggattacaggcgtgaaccaccacacctggccaagatcatgtttttcagtaagggattagtgtgatcaaattcgcattatggaaaaacatttgggttgggcacagtggctcatgcctgtaatcccagcactttgggaggccagggcgggaggatcacttgaggccaggaatttgagaccagccttgccaacatggcaaaatcccgtttctattaaaagtataaaaattagctgagcatggtggcgtgcatctataatcttaggtactcaggaggctgaggtaggataatcacttgaacccaggaggtggaggttgcagtgagctgagattgcaacatcactgcactctagcctgggcaacagaatgagactctgtctcaaataaataaataaataaacaaataaataagaaaaagaaagaaaaatatttgtactagtgtggagggtgacctgaggtgacaggaagatcaggctcctgtaataaccttgactctagctcctaaggacctctatggaggccgtgatagtgggtggaagagagggaggacagatctgggagacttgatagaacttggtgaccacctgacatggagaatgagcgggagtgaagcgtctaggcagccctgatgggttctctgctgggatgtggggtggatggtggtggcactgctccccagatggcagatgggagcaattttggaggggaaacactgagggcagccctggattattgcgtttaaggtgccaagaagagatgttcgggaggggaggggagcgaaggtggtccccacatgaagtctgaactggaaatacggatttggagatcatcagcttttaggcattagtttagagagtggggctgtctgagacttcccagagtgtgtgagtggactagaagtaaaaagagggctggggagggagcctgggcacattccaacatcttagatgtggacaaaagaagacaggcccacagtggagggagaacagcagccatcagggaggccaaaggaggatgaagacaggtctcctggaaggcgaaggaggaaggtttccagaaacaaggtgctgtctggatgatcatgaccctgaacaggcacctggagattaggaagctaagcagaaacgcttctatttatttatttatttattgttttgaggtggagtttcgctcttgttgcccaggctggagggcaatggcacggtctcagctcaccgcgacctctgtcccctggattccagtgattctcctgcctcagcctcccgagtagctgagactacaggcatgtgccaccacgcccggctaattttgtatttttagtagagacggggtttctccatgttggtcaggctggtctcgaactcccaacctcaggtgatccgcctgccttggcctcccaaagtgctgggattacaggtgtgagccactgcgcccggccagcagaaactcttctttccaaaagcatacattcctagaatcccagcaccgctcgctccaggaaacttctgtttcaggcaggtctccgaggaaaaccccccaggcattcaggtgcctggtttttctctagatggtttttagggtataaaaaccttgaaaaactggcttccctgaatagatcattccagtgttgtgtcatctgatttcaagaggccttccccaggcccagttagtactttcctccgttcacattgagctgtatttgaagatgtgtgtgtgtgtgtgcatgcatgtgtgtttttagtgtgtgtgtgcgcgtgtgggtgtcccacacctgtctttggatggttaagcctcaaggtctcttctcatgcccaaaccaaattcatttttctgtcctcccttacattaggccagggggactgggcacattttcctctccgctttaaaacttcactttatctcagtttcctccttccaagactggctgtggagtgggcgagtctcccctgccccttcccttcaactttcaagacaagcttctggagttcttagtagaggcagcatggtttaatggcacctgcataggatttggaatcagacacgcctgagtcccagggtgtgcccttggatacctgactgcatagtgccacggccaggagcatggactggatttgcctggatacaaattgtggctctaccccttccagcagtgtgaggcaaggtctttaacctccccctgcctcagtttcttcatctatatatgggaatccttatatgagcccatcctagggctctcccaggaggggcatttaatgccattaaatgacttagcacatgtaaagcgccctgttcgtagttcaagctaaaaaatggttataactattcgttgtaaaatggaaacracctccttggactttcgtttgaaaatgaaactggaaggtcattgagtatagggactgtttctttgcttccttaacatggattacagggtctgccccagtagctgttgctgctcagtaaatatttttggaatgagtgaaatgataaatgaatccctttgttataaatcagtagctttctctcctgaagacctcctgacagccagcttaaggggccaaggcccctgcctaagagattctctttgagcattctccactcagtttgtaggattttttttttttaaatgaagtgatatatacataagataaaattagccactttgtagccgggcgtggtggcgcgtgcctgtagtcccagctacagctctcagttgggaggctgaggcagaagaatcgcttgaacctgggaggtggaggttgcagtgagccgagrtcgcaccactgcactccagcctgggcgacagagcgagactgtatctcaaaaagagaaaaataaataaaaattaaaattaaaaaaataaaaaagaggaatattattcttccatatgcctataatactgttattatactcagaaaatgaacaaaaattccctgatgtcttacattgggtctgtattaaaattcccttaattatcctcaaacgtattgctagtttatgtgaactgcaggccaatcaaggatcacatgttacatttggttttgtctctttaatggctttaatgtaggttactacccaccccaatcccattttatcccatgatactgactttttgaagagactagaccagttttcttgtagaatatcaaaatactggtttgttaaattacttccttgtggtgtcatttaatttgtttttctatgagctgtatttcctgtaacctggaaattagatctagaggtttgattagattcagggtaaacgcttttggcaagaatccttgattttataaacttcatcttgcatcccatcaggagatgtacgaggtcagggtacccgttgtgcatgacactaaacttaatcattttataaggtggggatcgccagctctgtccaatttatgatgctccgcggttgacactctgaacaaccactcccaacacatccactgatcatcagctattagctgggggatgggttgatttggctgcaccaaagaaaaaagaaaatagatgagggttgggtgaggtggaggtggggttgcaaaaatggtgatttcctgagcctgccatcccttccttgcatctgactgcctggcatccttctgaaaaggagtgctttctctcatcacctagtgatgactgtggtccttctaaagtgtcaagatgaatgtttaattacgaatttttagggtgtggagttggcataacattcttttctaatggtggtaaatgaatttttctgagtgtcagtatggactaatggatttttatttattcatggcttacaatcaaatacactaattgttctttttgtgtgtgtgtgtgtgactgagtcttgctttgtctcccaagctggagtacagtggtgcgatctcggctcactgcaacctctgcctcccaggttcaagcagttctcatgcttcagcctcctgagtagctggaatcacaggcgtgtgccaccatgtccggctatttttttgtatttttagtagagacggagtttcgccatgttagccaggctggtctcgaactcctggcctcaagtgatccacctgcctcagcctcccaaagtgctgggatgacaggtgtgagccaccacgccaggcctaattgttttttgatgcccacattgtcccaagtttggccaggaggagcccctcgaagttgactcttgggtctttctttgcttcctggcacaagcagatgtcccagactcccctggtacttctccttcctcaaatctgcaattaactatttctcaaaggagagccaattccttttattgcaggatggggtttaaaacaaagatagaggtgtagtatcctcattgccacaggcgtgtcaatgattctaggccctttcagcagatagtagctgggagatctgtatttttaaaaagcatgagttcataatgacttctatattaattttaacattataggttttttattatcttcttttattttatatctttaccttttaccctggaaatctcggttcctgattaggaacattaatataattacttgtttgctttactctaccatatcacataaaatcgtttcaaaatcctgaacccaatattgccaccagtggaacagctactgagtgaagtttaagctttttttgtggttctctttgtccttagattatatcccattaatattgtacagccagaacactgggtgctgatattacttgaaatgattctttcctctgtgtggtcatattactgtttattatatgattggatttatttgtttcagcgttttttgttttttgttttttaattatagggtctgcttgttttccccttgtggtttaattctactttttggccatgtcaaacgtttacaaggtacgaaagtcaaactgtataacaacatagtccagagatacttgctttccccctccacatactgtttctccctccccttgtgggaaaccattcttttattagcttctggtgtatcctttcagtgtttccttgtgctttttgaagtgttcataacagtcccatcttttagattgattccaacctctgtgccacttcctctatggagatttctctaaaccttggaccgtcatccagttctttctccgtatctcaatcctagagcattctttatctccatgtcctgtggctctattcatctatttggggtcttaattacatgccattgtgcattgttgtgacttacatttgctcacgtcttgtcactcaatgtcttgtttctgcatgttccttgaggataggataatggctagaattcttttgtatttctcaacaatgtctaaaaaaggactgggcatacagtaataggtaatagattcagtcaattcttttttttaattttttgatacagactcttgctctgtcgtccagactggagtgcagtgacgcgatcttggctcactgcaacctccaacccctcggttcaagcgattctcctgcctcagcctcccaagtagctggggttacaggcatgcaccaccatgcctggctgatttttgtattttttgtggagatggggtttcgccatgttggccaggctggtctccaactcctgacctcagttgatccacctgcctcagcctcccaaagtgctgggattaaaggagtgaaccactacgcccgacctcagtcaattcttgttattgataatagttatgttctatcaagccaccgtgagtactgaattggggaatactgactcttttgctcccagggaaaatatggagttagcttcctatgggcatctgttcacaatattttcattcactagttaaattaatatataactgtattttatgaatgctgctgtgtaaagataccttattttatgtacatatatatatatacatatatatatgtatgtgtttttttttttttgagttggagtcttgctctgtcacccaggctggagtgcagtggtgtgatctcggctcactgcaacttccacctcctgggttgaagcgattctcctgccttggcctcccaagtagctggggttacaggcacctgccaccacacccagctaattttttaaaaaatattattggtagagacagggtttcaccatgttgaccaggctggtcttgaactcctgacctcargtgatccacctgcctcggcctcccaaagtgttgggattacaggcgtgagccaccgcacctggtcctaacacatacattttctttataaggcacatcaaagcctttgagtgcttaggaacactacacagcacttaggcactacatctgggggccattttccacagtgaaaccaccaacacaaaacacaaaaatgcaaaagccatggctctaaatacactgtgaggacatttgtttacagtgcgatatgagagctgaaaccagaagggagagggtcacctccttcagcctccactgagaatgtgtgcgccaaagctactcaaactttgcaggtctgcctatatccgcaaatgaccctaaatcacctcaagtattgattttgggattaaaaacatacaacgttagtaagtaggcacatttgaaatgtggaatcttcgaataaataagattgaatttgttggattaaatccatttgaatgagttgtggaaacttggactacttgtgttgcctctctgggtttctttttcctgaaacccagaaatcctatttcctttttttgttttgttttgttttcttttttgagatggagtctcgctcctgtcacccaggctggagtgcggtggcgtgctcttggctctccgcaacctccgcctcccaggttcaagcaattctcctgtctcagcctcctgagtagccgggactacaggcgcacgccactgcaccaagctaatttttatatttttagtagagacggggtttcaccatgttggccaggctggtcttgaactcctgacctcaggtgatcctcccacctcggcctctcaaagtgttgggattacaggggtgagccaccgcgcctggccagaaatcccatttcctgacttgttccatgactgggtgatctttgatctttgagcactgaaattgcaggaactgagtgggcactgccttttcttttactctggcttcctgtggttggtgcggtcctgaccactgtcctttccctgcaggtttgtggatttccatgcagctgcctccacctgctcaccctcccgggcttccttgctcaccggccggcttggccttcgcaatggagtcacacgcaactttgcagtcacttctgtgggaggccttccgctcaacgagaccaccttggcagaggtgctgcagcaggcgggttacgtcactgggataataggtaactctgggccccgtctgcctgttgcatttactgcagtggcagccgccttgtgtttgcaaattcccaacatactccctgtctgctttcctgttcatgtcttgctgtgtgagttagggatgctctcagctataaggaactgaaaagacctaacagtgaattaaaacatacatggagctattttcctcccattatagcaagttttgtggtaactggttgctttcattaattcagctgctcaaagatgctgccgggagccaggtgctctcactcgatctttctgctctgccatccttagcatgttggtgtttggtgtttgtcctcatgctcactgcctcatgactgccatccagcgactttaggcccctgaaccacgatttggctcaaggaaggaagaagagaagggagatggctcagctctgcctgcaccccaagaattgcacttatatcttattggccagagctgggtcttttggccacgcctcactgctgcactcccagattgagaaactggggacagcattgtagtgactgacttgaacttgggcatggtaatcttcctccctttgaacaaaaccacagttctattagcaggatacatggggacatgggcattgctgggagaccagcaacgtctgccacattgtccaatgactccctctcctttaaaacatttttttaggcatctcttactcagcatttattatgtgctaggcactgggctgtttattggcatgaagatgattattgtattggcaagagaactgagtttcaggccggtgaagagaagctgcctaacctggaggggtggaggccaggtctaggcaggtatatctgttcccagccttgccctgaggctctgcctcactgcccttctcccctccaggagccaagacagcccagtattcccagaagtatcctcagctccctgtgtttgttagtctaactctcaaagagctggaccccttgggatccctgcctcctccactatacaggaaattgcaagggagggagggtgcaaccacaagcgggtggccctgtgggcatgccttgggtgtctgaaccgtgtgaacctgtgggaggttgttctacccagacccagggctggtgcctctgctattggcccttttatcccactctgggttaaagagcctgatatccttttacggaagctcaacctggagtgcggcattctttgtcccagaaggggtaagtcccaggctgtaggagagaccaattaaggtcacacacttctctttttccaatccctttcttcccataccccaaggagtcattatgttaacaacatcaacaccaagacaccatttgtgaaactgccactgtgggctgactctccttactaggccagttacatgcgtccatgtaaacctcacagccagctgaacgaagtggctcacgcctgtaatcccagcactatggaaggccgaggtgggaggatccctcgagcccaggagatcgagaccagcctgggcaccatagtgagactctgtatctacaaataagtaaataaataataaaactcatagccaggaagagttaggtcccagggctgtcccagactcagcccctatgctgcagaagtggggctggcttcttctggagctgaatttgacctcactggcccctccgtcttcatgcctttaaactcccagtaagcaactgtttgcagcttgactgtttagctgcattcctcaccccctcaccactcacgacaccttttgcacatcctgggcaggatatttaagcatatccagctgttgcaattatgaactaaagtacacttttaggaaaaattaaagacccaccaaaggaatatcagatccttttacaacactcacactttgcttctaatcttggtccatgtttatgtgttgcctagctgtgcgaataccactgggctccacttttccccctttcacattattctatgtttccatgtcatataattttacatagtataatttttatgattaaacaatacttttcataattttaatataatgtcatgttcycatgtaatgtttaatccaaatatttcacataatgcttaatacatttctctcaatcttttttatttatttgggacaaagtcttactctgtcacccaggctggagtacagtggctcaatctctgcccactgcaacccccacctcccgggttcaagtgattctcctgcctcagcctcccgagtagttgggattacaggcgtgcaccaccacacccagctaatttttgtatttttagtagagataaggttttgccacgttgcccaggctagtctcaaactcctggcctcatgtgatccgcctgcctcggcctcccaaagtgctgggattacagacatgagccactcaattgagagaaattgagagcccatttctctcaattttttattaatcttttttttcaatcccatagagcagttgcagggagggaataatggactcctagaggcccttcatccagtttcaccgattcttaatttttgctacatgcagttgtcttgaaaaaatagatcgatagttccttattgaggccacatcaaataatgtacttagacatactcctgtggttgcccgttaatctctcgtttgagcggtttaatgctgccagcgtctcaatctttgtaccacattcttttctttgccccctcaccatgggggtggcgtccctggggtctactcctcagagcggaagagcagatcagagagttctgacactgtcagagctcttgccacacattgcccgattattcccccagactgagcgcatttgcagaccgaggagcagcagggtgtctgagtttcctcatttgctgccccgtaggtgtctcrgtgcttgaactgcgggctgctgatgttggccagagaggaagatgatgaaaccaggcaggaagcgggcatttctgagacgatgtggggyggtgcacctgcaccctgggcctcctggtgcctttgcagggccccagcrcgggagggcaaagtgaaggagcccatgtggggttgctgtgtctgtggagccctctttgagkggcagaggctcaggcttctccgggctcctggtgatgggctstcttcccctttcactgtggtttcccgtgtgagtctggggtcatcctttatgtgtccctgtggacaccgtctcggccccagagagcaaagcctggcttgtacaccacattgcagcttcttttggcttgtccacagtgcgaggcgaagctaatggagrgctgagtgtgtgatcagctcctcagggggctgtggtacccctatggggattcctctgaaaatctctcttatgtttttctacaggcaaatggcatcttggacaccacggctcttatcaccccaacttccgtggtaagaattcttttggggatttgttacctgggaaacagaaaataaaggtctctgtgtaagactccatgaacagctaagccatcctgtctctgggggcaaccctaagttaggacatctttgttcacgaggtcatttgagtgcatttggggtgccagggctctccgggaccttacatcccacttgctggcatcttccttgactgtccttccttggtgcctgtttgcccttccaactgccccatcacaggcccatcagcttttttgccatctctcggttctttacacctcagggaacattctgccccatgaggtccagacatggctaatctgggaagaagtaaaaattgactgatgggttcaccgaagcaggaaacctggccatagacccaaacaggagatgctgcctcttggcctcttcctgcagcctttgcttcctcaccctctggccttggggaagtaggccaagatcaagctaccaaagctggttctctgaaaatcactttgctgaagggcggattctccaaacgtccaattcactgaattactgatggtttttcaaagttgcagttcgtgccactgaccttttccatttcctataggaagccgtggactttctcttaaaggcatttaccatgatctcagctttggtggcttctcctgtccctggccccttcctcttctgccattttataagcaaatgtgattctctgactattttgcagacttctcccctcccctgccccagtatctctccctatctctatggaaaacggctgaattgttctgtcctagacctggcggaaggtttgcattggaagatttttgcatttggagaatgactttcagagggttggcctggagccagccttcagcagggacccactggtcagtaaccccattggctgacgtcttcttcaactcttacctcccctttgatgctcattcctctccctctcctcccttgagccccttttcccaggtgggcattcgtggcatcatccacacatgctttaaaaaaaatgacagatgggagaagtgaagacctggcttttgcactcactaaaaattactccagaacttgtttcctccttggtcttcagtttyctcacttgacagttgaggggttggaccagatcaggtgttggcaccttgagggcatattcctgtggtgaggggatactgagaccagctcctatgcagcaggaagtggtaccatgatggatctggtgtctcctgtgggtgtgggaagtgggaagaaagagtacctcctacctatttgctctttggaccagacaattccaaaaagccttctggcatggacactctgaggtttcttcatgcttatgtccaagttcactccttttccctcctgcctcttacatcctctctgyggtgcactgtcctggttccccgtctcactctgtctcccaggctagagtgcagtggcatgatctcggctcactgcaacctccgcctcccaggttcaagtgattctcatgcctcagcctcccaagtagctgggactacaggtgcccgccaccatgcctggttaatcttttgattaaaagcttgggttggagaagagatagaatgaaggaggaagtcggaaaaaaacttcacatgccctgggttatgccaagcacacttacacattccttctaagcacccacgctcctcttgctgccctgggctgttcctcaggtcagggctcctgcaaacacaacgaggtctttctaacactggggtatgaggatgcctatgatttagatcagtggttggcatagacctgtggtccaaatccagtatgctagctgtttttgtaaataaaattttattagaaaacagcaaggccaagcatggtggctcacgcctgtaatcccagcactttgggaggctgaggtgggtggatcacctgaggtcaggagtttgagatcagccaacatggtgaacccctgtctctactaaaaaaataaaarattagctcagcacagtggtgcatgcctgtaaccccagctatttgggaggctgaggcaggggaaccgcttgaacccaggaggtggaggttgcagtgagttgagattgcaccactccagcctaggcgacaaaactgaaactccatctcaagaaaaaaaaagaaaaaaagaaaacagccaatatgtacagtcatttgtgtacatattgtctgtgggtgtgtttgcgctacaatggcagagttgagtggccttaacagagatcatctgacccacaaaacctaaaatgtttactatttggctctttccggcagaagtttgctctccttggtggagagtcatcctgataccagatgcagtagcatttcagggctatgttgtgtacctagggggtagctaaatccatttgtgcaaaccaagttagcatgaagatatcaattttttaaaaatacaacaaacaggctgggcrtggtggctcatgcctatagtcccagcactttgggaggccgaggcaggtggattacttgaggtcagcagtttgcaaccagcctggccaacatgctgaaatcccatctctacaaaaatacaaagattagctgggcgtggtgacaggtgcctgtagtcccagctactcgggaggctgaagcacgagaatcgcttgaacccaggaggtggaggttgcatgagctgagatcgtgccactgcactccagcctgggagacagactgagactccgtctcaaaaagaaaaaaaaatacgacaagcatctactagttattctacatacaccacatattgggttggcaaagatctaatgtctaactcgaggagtgcatcactaatggggaagacggtattacccagatgataaaaagtctgtaggctacactaggagaatgggttgagtgcagggctgtggcaggcgggatgcagtgaagagcagggaaattctgtaggaaacttcacactcaaactgggctgggaagtgctaatgcagtttcacctgtgagagacacagagcagataattccaggcaaagccaccgaggccccaaagcatgaggctcacagggaactgaagagagcttgcttcttttaggaagggtgcttatagagagggccaaaaacgatttggaggggcaggagttgaagctgaaaacacagctctccctactcctgggcctggaatttgaggctaatgagaaatagcaattctttgtgagattcgagttctatctacctctaggaaataaagagagctgaagcagttacctgggtaattggggaaggtttcctttttctggagaatttttgcattctagctgcatatgcagctatagcctttgattaaaagcttgggctgggccgggcgcggtggctcacacctgtaatcccagcactttgggaggctgaggtgggtgtatcacgaggtcaggagattgagaccatcctggctaacacggtgaaaacccatctctactaaaaatacaaaaaattagccgggcgtggtggcacgtgcctgtagtcccagctactcaggaggctgaggcaggagaatggcatgaacctgggaggcggagcttgcattgagccgagatttccccactgcactccagcctgggtgacagagcgagactccgtctcaaaaaataaaataaaataaaataaataaatwcataaataaagcttgggctggagaagagatagaaggaaggaggaactcagaagaaaacttcaacacaaaggctttgggtttcaatgctcacacccttccatccctcaccttcactccaccactccaagcccaaattctgtcagccttttgagtcccagctgaaaggcagtatctttcaaggcgcattttgagattcctgccccatccccatcccaccatctctatcgggggtaacttcctgtgatcactcttgttggctcacctattcatctcttatttcttaatctttatatcttattttctcctcacatgaaaagtctcttgaaggcagaatttattctttctaaaaaattttttataattttttttttctctgtggttgtggcagctaagaacaactgttttttttttatcccttaaagtgtcatgtatatagtaggttttcaccaaatactgagtatgtccataatttcgttgaagatgttaggcattcaataattctctccacttcctcccaaactgggttaattctaatcacaagatgttttgcaaatctaatctaacagccagaacccagcaaagtgattttctatgcatactacaaagggatattaatcaaatcctcttataattacatactctatagcactgcagtattaaatcataggaaattacatttttgtcgtgggtgtacaaaggcaagcacatggagtcgcagccacgtgggggtgctaaccggttgcttctattccaggttttgattactactttggaatcccatatagccatgatatgggctgtactgatactccaggctacaaccaccctccttgtccagcgtgtccacagggtgatggaccatcaaggtaatgctgtctgacacatttgcgataggctccaggacaaggcaaagttccaagactgtggtccatcagcartaaattaaagatgcagacaggaaacagttaaracggcaaataagatacacggtacattctgtgcaaatttaaatgtgttatttgcagggagtgcaagaaacctttcaacgatgaggtccacaaaattcttctattgaaatttttacaggttcctcagactattgagctcagctagggagaggcttgtgctgctagggtctcacacatgtggggcctccctcctcctctgcctgctgtctttgcttctagcccagacactggacataaggagggagggagggagagagcagaggagagagacagaggagagagagagagagagagacagaggagagagagagagagagagagagagacagaggagagagagagagagagacagaggagagagagagagagagagacagagagagagagagagagagasagagacagagagagagagaacaggattccttttgagcttctccccgcatggacaactaagccagcattctgatgttggaatgccaaacaggcaccaaataggatgttttgaaaaaacatttaatgaaatgggaaaatgcttatgatataatagtaagtgaaaaaaaaaaaaagcaggaagcaagtcatcaacggtaagatcctaatgagctctgtaaccctatctttgtagtcctatcaacggagactcaaaggagatatgccataatgttatcaaggaatctctctggtcrtgggactcagggttttcattttcttttttctttctttttttttttttttgagatggagtgttgctctcttacccaggctagagcgcagtggcgcgatctcggctcactgcaacctctgcctccctggttcaagagattctcttgcctcagcctcttgagtagctaggattacaggtacccactaccacaccaggctaatttttgtatttttagaagagacggggtttcgccatgttggccaggctggtcttgaactcctgacctcaggtgatctgcccacttcggcctcccaaagtgctgggatttcaggcgtgagtcaccgcacccagcggtgactctttctccactttctctttattttcctctttgtcattgtatttcctaagtatcctgagatgcatttatgatcacaaaaaaaagatgataagcctcactcaggtaataaagcagcacaaaacacgtgttcccttgttcggacagagcactgtggttatttctaaggctacagttgtctgagccacttgggaaaggtgagtctcagctcgtctatctataaaacaatagttaatataatagtgggtatttattgagaaattgttacattctaagcactgtctatatttatctgtaatccacgtgaccactgtgtgaggtaggtatttcttaggttggtgcaaaagtaattgcggtttttgctgttgaaagtaaaaccacaattacttttgcaccaacctgatacctgattttacagataaggaagcttatgttgcccaggttacaccggagctggaaagaggtaggaatggagattccaatccaggtctctctgagtccagagcccatatgcccttcctatctttgctactcatagcrtagtcattgaaccagcatggtggatatcacttacatgcttggtagaagtgcacagattcacatcctacccccaggtctgctttttaacaagacttatgcatgcagtgagctatgattgcatcactgcacttcaccctgggtgacagagtaagatcccgtctcaaaaaacaaaaacaaaaacaaaaaccagcccagggattctgcacattatggcatgaaaagcgaggctatagagcatcctgctgcccttcttacccaccgtggcctgctgggcatacctgtaatcacacctggccatatgaaggtatgacatatgtcagccaatctctttttaaaattttaaaattttaattaatttattttttggaaggatggagtctcgttctgttgcccaggctggagtgcagtagcacaatctctgatcattacaatttccgcctcccaggttcaagtgattttcctgcctcagtcacctgagtagctgggattacaggcttgtgttaccatgcctggctgagttttgtatttttagtagagatggggtttcaccgtgttggccaagctggtcttgaactcctgacctcaagtgatctgcctacctcggcttcccgaaatgctgggattacaggcatgagccactgcacctggccttctttttcttcttcttgttctttttttttttttttttatttcaatcctgytccttctgtatttttttatttttattttttaatttttaatctatgttaaaaatctctttttaatctatgttaaaaatccagtagaaagccaggtgcagtgggtcactcctgtaatcccagcactttgggaggctgaggtgggtggaccttgtgaacccaggagtttgagatcagcttggtcaacacaacaaaaccccatctctacagaaaatacaaaaattagctgggtgtggtggcccatgcctgtagtcccagctacacaggaggctgaggtgggaggatggcttgaggaggaggttgcagtgagctgagattatgccactgcacttcagcctgggtgacagagccagatcctgtctcaaaaaaaraaaaaaagaaaaaaagaaaaaaaaatcaaacagagaaataatgggtggcttaggagagagagaaaaacaggaaagaatgtaaatgactcatggagttgcaatggtataataaaaagctgaaaaattcaacataaatatgcgattagtgttctaatgcccagcatggtgataattctttttctcttttaaaaaatttgggatgcctgtaatcccagcactttgggaggccgaggtgggtggattgcttgagctcaggagtttgagaccagcctgggcaacatggtgaaacccgttctttacaaaaaatacaaaaattagccaggtgtggtggcacacacctatagtctcagctgctcagggactaagatgggagtttgaggctgcaatgagctgagattgtgccactgcacttcagcctgggcgacagagtgagaccctgtgtcaaaaaaacaaaacaaaacaaaaattgtggtttttgacaattatccacacagtctgaccatatctcctatatttctgtaatggggtgtgtgtgcatgtaggtgtgatggcaagttttgatttcttcacaaatccttcccagcactattaggatgacgtatttgcctgagagaactccattcattaccacctctgtctgcattgctctcagcttctctcttggttctctttggtgaccaggactgagagcttgagatttttcagaattcctaatacactgaagatgtgtgcaatgcactaaccatttgttatctcccttagaccaccagcacccctgtaaggatggcacaggccctccaatgctacggataaggagataactctgggagcttaagtaacttgccagagatcatgaccagagtcagaccatgactcagccacattgatgggcagctatgggtcagattcatttcaatctgtaagaccaaaacttgagcttgtgttgttttgttttgagatggagttttgctcttgtcgcccaggctgtagtacaatggcgcaatctcagctcactgcaacctccgcctcctaggttcaagcaattctcctgcctcagcctcctgagtagctgagactacaggcgtgcagcaccacggctaatttttgtatttttagtagagatggggtttcaccatgttggccaggctggtcttgaactcctgaccttaggtgatccacccgccttggcctcccaaagttctgggattacacgcatgagccactgtgcctggcctggtcttgaacttctgacctcaggtgatctgcctgcctcagcctcccaaagtattgggattacaggcgtgagccacggcgtctggccatgagcttgttttttttttttttccaggagatgttattagtttgactcttattttttttccaactgctgaagtttctccaaattctgcaaacatggcttaaaattaaaattgtcccaacccatcttatgtattcctttttatgtatttatttatttttgagatggagtctcactctgtcacccagggtagagtgcagtgggatgatctcagttcactgcaacctccgcctcccgggttcaaatgattctcctgcctcagcctcctgagtagctgggattacagatgtgcactgccatgcccagctaatttttgtatttttagtagagacagggtttcaccctgctggccaggctggtctcgaactcctgacctcaagtgatctgctggcctcrgtctcccaaagtgctgggatcacaggcatgagccactgcaccyggcccatcttatatattctgtcctattgacagacctgstattacatgaagtcccaattgttgacttcggaaaacgctgagttgcacgccatacacagaggctgggattgaagtgagacagcagagaaagccagcaatggggctactgattggtggtgggactctgcttgacatcatttaggttctttagacctcagtttctctccccgcaaaatgcaagtaataaaaaataatgtccctagctcacgagagtctttgcaagstttacagagtggtcagctcgtccatggaacrtaaatatctattcaaagggaatggaagaaagcattatgcatagacttttacacttggaggaaatggccaaccagaaaaatcatttggggccagagtgttgtatttatgtgcatatgcattgttgcattaaagcatttagttctgctccgtgagtacgtaggaartgaatactctatggtctgtggtttccacacaggaaccttcaaagagactgttacactgacgtggccctccctctttatgaaaacctcaacattgtggagcagccggtgaacttgagcagccttgcccagaagtatgctgagaaagcaacccagttcatccagcgtgcaaggtgaggagtctccctccctccgcagggcctccccctgcctccacctacccgtgcacacacaccatgtcccttggcctcagcacgcttgaggccatggcagagttttgctgctcagcagagatggatgcatacatgtctcctataagtaaagctggaaaacagccccttctggaaatctgcggtcctggattagagattcctcaggtatgttcctagagtccctggggcttatccctctgttgctttgatcacgttccactgccatgatcattttgtcctctccttctagggtacgagctcctcaagggtagggcctgcccactgcactctgggcactcaaggcatttgttgagctcactagctggcaggatgtattacttttccattgctgctgtaacaaccaaccactaatttagtagctaaaacaacagtaacttaccctgctacagatctggaggccagatgtctgaaatgagtcttagggggctaaaatcaaggcaycagcaggactgttttcttggggagtctctagggaggattccttccttgccttttccagcttctggcatttctgagctatggccatatcattctcaactctaattctgttgttcacttgcatcttcagtcaaatctcccctctggctcccacttacgatagcacttgtgatggcgtttagggtccaccaggagaatccaaggtgatccccctacctcaagacccttaacataattccacctgaaaactctcttttgccatataccgtaacattcacagattccaggaattagaccctgcttatctttgggagctatccttcattctaccagacagaagttacaaattcccrcatctagaaggcacagataggtaaccttaaagagggaagcaggatgaacgtaaggcattagggagtggtggggtctacagtgaacctgtaagcacatgccccatctgaagggggcagctactacctagctccagctgcttggtgcttctttgtgaaaatgtgaacctggaatatcacatcttttcattttacaacagagataggatacctggcttttatgtgaaatctcctgatcttgaaatattagaaactactaattaacaaaaggctgggggtggtagctcatgcctataatcccagcactttgggaggccaagatgggcagattgtttgagtctaggagttcaagactagctgggcaacatggtgaaactctgtcgctacaagcaatacaaaaattagctgggcgtggtgatctgcacatgttgttccagctacttggtaggctgaggatggaggatcacttgagcctgggaggcataggttgcagtgagccaagattgtgtcactgcattccagcctgggtgacagagcgagaccctgtctcaaaaaaaatataaaatgaaaaataaaataaaataaaggtaaataagaaaaacaaagaagtgggctgtgtgcggtggctcctacctgtaatcccagtgctttgggattacactgggtaatcctccaggatcgctcgaggccaggaattccasactagcctggacaacctggtgagaccttgtctttacaaaaaattataaaaagtggctgggcgcggtggctcacgtctgtaatcccagcactttgggaggccaaggcaggcagatcacctgaattcaggagttcgaaaccagcctgaccaacacggtgaaaccctgtgtctactaaaaatacaaaaattagctgggagtggtggcacccatctgtagtcccaactattttggaggctgaggtaggagaatcacttgagcccgggaggtggaggttgcagtgagcccagattgtgccacygcactccagcctgggcgacagagcaagactctgtctcaaaaaaaaaaattaatacaagttattaaatagctgagcatagtkgtgtgaatctgtagtgccagctaactcgggtggctgaactgggagaatcacttgagtccaggagttcaaggctgcagtgagccataatggtgccaccgtactccagcctgacacatggagagcctgtctcttaaaaaacccccaaaaccggctgggcgtggtggctcacgcctgtaatcccagcactttgggaggctgaggcaggtggatcacgaggtcaggagatcgagaccatcctggctaacacgatgaaaccccgtctctactaaaaatacaaaaaattagccaggcgtggtggcggacgcctgtagtcccagctactcgggaggctgaggcaggagaatggcgtgaacccgggaggtggagcttgcagtgagccgagatcaggccactgcactccagcctgggcgacagtgtgagactccatctcaaaacgacaacaacaacaacaacaacaaaactaccccaaaacccaaaaaacaaaaaagcaaaaacaaaaccataccacagtctatctctaataaatcatatacgtgtgaggtgtcagggcaaagaatggacattgtgaaataatggacaactccaaaattgtgcacacttatttggaatgcacacccatagactgtggggtgcaagtgcacacacacacgtgtacctgcacacatgcacacacagtcaccctccccgcccccttcataactgccttctgctgccctctaatgaccccatatatgttcatcttatcttcctcctaggagattccactcctcaagggcaatggactccaagaaacttggtgttttctacagccttagcctaagtggtcaagaaagcacgtgctgcacggctgtccacttgggcagaattaaaaagggactctacctgtggctaagtgatcacagcagccccttgaatatgcaggaatcccccacccctcgctcagccacattggacgtttttagaagctcagcagggagggttgaggcagcaatgcaggagatccaggcatcctgttttcttggtaataaaacctatttaaggattgaatctcaaaagcagctcctaagggcttcagaaattgcatcttaagggtttatcaggactttctgagaacactgttgttttatttcagattgtcaatagtagaaagggcagagcctcttctgccatctggagggttgagcgtctcccagctccctggaactttgggatggtttcgggcccctgtgccccatggcacgtggatgcttcaaggctagtggggacagtctcttctgcttttgtggtgactcaaacgacactgtgttcttaggggaaggaatggggactcggggccgtttaatgccccctccgaagtgggcatagggcctggacatccacccgttaattaatccattaaagggcaaatcaaccgacagcctccttattatacaaaaaaggggaacagttttgttaattcattagctggttattaagtgaaaagtcccgagtcctgttggcatttaacatcacagaaggaaatccccagaaatgctgatttctttgggatttccacatgccaaatgattttctgagcatcagcagaaaaggccctcaggtccatgcccttcctcctccatgactctggcccctgcctcaagcccctcccccaccttggacctgtttttcaaaaccaccagctgtccctagagtgtggcttcccgctcttccttgacaagggggcccaccctgggacttagggagtttttacttgggtctttagttggctttagtgtttcacccaagaccctcgacgtagtacttggttatcactgctggtcattcagtttacttgactttagacccttcatctggtagcaatgctgaatgctaatgcttgattggagttttttaagcagcaggcaaatctctgaatgggaaaaggagccggtagaaggcatgactcctgggtcacagagctagctgggcctctgttccttttgaggtctgggaccgtgcattgcacctacrcgggcaatacagggcttgataagcaggagtgtatcgggcatcaggatgagcagcggcccagcatgtttgaaatcagacatttcttagttttctttttttgagactgagtctcgctcttgtcacccagactggagtgcagtgttgcaatcttggcgcactgcaacctctgcctcctgggttcaagcgattctcctgcctcagcctcccgagtagctgggattacaggcgcccgccaccacacccagctaatttttgtatttttagtagagacggcgtttcaccatgttggccaagcttgtctcgaactcccaacctcaggtgatctacctgcctcggcctcccaaagtgctgggattacgggtgtgagctaccgtgcccggcctgaaatcagacctttcaaacaaatcaatcttccatggtgtcatgtactacacattgaaatcctaacccttaatggggtggtattaggaggtggggccattaggaggaaattaggtttagataagatcatgagagtgaagcccccatgttgggattagtgtttgtattaaaagaagagaaagagactctggtgtgctctctcctggccatgtgaggatacagtgggaagacacttgtctgttaataagccaagaatcagccccttaccagacagtggacttcccagcctctagaactgggagacgtaaagtcaggcgtggtggctcatgcctgtaatcccaacactttgggaggccaagggtaggagattgcttgagctcaggcgttcaagaccagtctgcacaacatagtgagaccacccccatctctacaaaaaacacaacaaaacaaacaaacaaacaaacaaataggtccttctgcagtctagaacctggaaaaagaaaaaaaaggccaggcacggtggctcacgcctgtaatcccagcactttgggaggccgaggtgggtagatcacatgcagtcagaagaagttcgagatcagcctggccaacatggtgaaaccccatctctattaaagatacaaaaattagccggtcatggtggcacatgcctgtaatcccagctacttgagaggctgaggtaggagaatgcttgaacccaggagacggaggttgcagtgagccgagatcatgccattacactccagcctgggcaacaagagcgaaactctcagaaagaaccatgacaacaacaaacaaacaaaaacaacaacaacaacaaaacccaaaaaacagaattgggagaagtcgatggttgtatactaagccaccccagggagtggtattttgttatagcgtccctagcaggctaagacacaggacacgcatcttttggaactaggtcctcaggatgcagagatgaaagacatgttccagccttcatgagctcatgcctgggatctgcagaattctccgttttccttgactcactatccgtcttcattgctggcccccatgcttgcctaagtgcccctgctgtggtgctgccccctcctcatcttgcctctcacccggctcccacccgacaccaacctatgtcagggatccaggttcagatccaaagaccatactcacccccaacccctctttctcctttctcctgtttgaatgcagagacggatctctagtgagtgagagaataaactaatgactagcgaggcaatcatatcgaacgtctcccccagggctatgttctctgccttgtgtggtcaccacacaccgtcctccaggtcccactgtctcagggatctttccctcccctccacaccccaaaccccatttggttcccctgttacaccttccacagcaacttgtatttctcttccatctctcctacgggctgagtattccgtatctggaatgcttgggaccagaagtatttcagattttggatttttaaagagtttggactatttgcattatacttaaccgrctgagcatccctaatcctcccatgagtatttcctttgagtgtcaggtcagygctcaaacagtttcggagtttggagtattttggattttcagatttgggatgcgctgcctatactaactttttaaataatcatcttatttatattttagttgcctttttctctttcctggtctcaattagatgttaaactccaagagggtggaaatcatatctattgtgctcattcctctgtccccagtgcccagttagagcttaataaatatttaatgaatgaatgaatgaatgagtgagttacttatccagctccagtgatgtgctggtgctgtgccagggattcaaacgtgaattagacatgtccagtctctgagtgattcccaagctagtggggaaacagatatgtaaaaacatggctttaatgcaggttgtttgtatcttattaataccgcaagaagcagggaaaagggctatggcagggatgggggcagagaggaggcagccaaccatgacctgggagcaaaggaggaggactattggtggctttggaattggatcttaagaactgattaagtgttttggggcaagataacagggagaatactgctgagagaggaataacatagatgaggcacaggaagtargtgaggtgcttgggacactggcatatagaaagagtctttgacagggaaggaaggtcaggctggaagggacggagatagggaaagctgcaaagactgggtgaggagtttggattgaccctgcaggctgcaatgagccctagtacgtttcttttgtttctttcttctttcttttttgagatggagttttgctctcgttgcccaggctggagtgcaatggcgcgatctcggctcaccgcaacctctgcctcccaggttcaagcaattctcctgcctcagcctcccgagtagctgggattacaggcatgcaccaccatgcccagctaattttgtatttttagtagagatggggtttcttcatgttggtcaggctggtctcgaactcctgaccttaggtgatccaactgcctcggcctcccaaagtgctgggattacaggcgtgagccatcgtgcctggccgagccctagtacgtttctaaatagagatctgccagatcaagtctgggttagagaaggttgtctgtgatgccagggtctagtggaagatggcaaaatggtggggcgggggacaagtggttattgcagcagtccatttcagasagaccccttgcccatccatccccagggagccaccaccagagaggccagtgggctgagagctgcaggtgttcatttccccctgcatgagggaagccctgccttcacctccaggcctgcctccctccacccaggcaccatctggggacacttcttgagagatgggtgcctctcacctgccctcttccatttcggatcagatgattttccccagccttaacggtccctgcaccataatcttctccacaccctgtctccacaccctgccccatcctcttgctctcctggaatgtcccctctgtcatcttacttgtttttttccttctctactcaccattccacttgttttcccacaaaaatagcatgtgttccctttagtaatctcggaaaactgagacaagcaaacaaaaaaaaatcaccctgaattccatcccagagataacctgttttttgttgttgttgttgttgttttgttttttgtttatttgagacagagtcttgctctgttgcctaggctggagtgcagtggcacaatctgggctcactgcaacctccgcctcctgggttcaagccattctcttgctggctgggattacaggcacgcgtcaccatgccyggctaatttttgtatttttagtagagacagggtttcaccatgttggccaggctggtcttgaactcctgacctcaggtgatccacccacctcggccttccaaaagttctgggattacaagtgtgaggataacctgttttaatacctccgagtatgttcttctagcctcattctatgctggtgcataaacatatgtttccctggttttattaaggtatagttgaaatgaatgtgttttagaaaacaaaagtggagtcacactgtgatataatcagtatttttttaaagcatcaggtgtccccccactctattttccattcagcacaggtgcataatgaagaggtggcttgcgggacagatgcccccaagggactagtctgtgtgggctctgcctgatgccatgttttggaatctagcctggcatcaggatgcagggagagaggtacatccttgggcatcatttatgcttactactgctggcatgtattcaacattcttaacaaggaagcggtcgggcgcagtggctcatgcctgtaaccccagcactttgggaggctaaggcaggcagatcacttgaagtcaggagttcgagaccagcctggccaacatggcaaaacctcatctctactaaaaatacaaaaattagccaggtgtggtggcgtgcatgcctgtagtcccagctactcgggaggctgaggcaggagaattgcttgaacctgggaggcggaggttgtagtgagccaagatcgcgccactgcactccagcttgggagacagagcgagactccgtctcagaaacaaaaaacaacaacaaaataagctaccatttattagatgcttagtgtgggaagttacacaactttgttggggaggtctgattgtccccattttatagatgacagaggttaagttaattgtccagggctacacagtcatgaaataacaaatctggaggtttggatgcaggattctcaagcctgtgctcttcatcagcctgtgctctgccatctctcataactgcctgtctctgtaagcctctggctcagggtgctaatgtgactttgataatgggtgagagtttggaagatgatgatggatgatgaagggtggacagcaggaccacccctcgcccatacacatggtgagctgatttctaagaaaacagctgcagtctgtagcatttgccaattcctgaggtgtaaatactcaatctcaccatggctgatttccagctatggagatgtcaccgaatatggcattgaaaaatgatgggcagtagcaagccattgtgtgttatttccaccacacagatacaatagatgtaaataaccccatgagcctacatcatagcagaatgtagtagttgggaagtgataaatggtgagaatgtactactttcaaaaaatattattgatttatttaatttattttttttttgagacagagtctcgctctgtcgcccaggctggagtgcagtgcacaatcttggctcactgcaacctctgcctcctggtttcaagtggttctccctgcctcagcctcccgagtagctgggattacaggcacctgccaccacgcctggctaatttttgtatttgttagtagaggcagggttttgccatcttggcccagctggtctcaaactcctgacctcaaatgatccgcctgcctcggcctcccaaagtgctgggattacaggtgtgakccactacgcctggcaaaaaaataaaataraataaaatttatttaattgtggacttttataattgaatttttagcaatggccatgtttaacaactggtttgcaaaatacttgaaatttgagccagatctaggcaccactgcaatatggaatctacctgaaaattaaaaaaagccacccccactggccaggcactgccctgtgcagggtaaccagccagtagattgtaagctggaaataaggacccattcactcagcaggatgtcctgatgcaggccacaacctgcacaactgtacatgaccatccctgggagagttggcatcaggcactgcaaatcattgctgtacgaaaaaactaggcaagaatggagatgttttctatctgcactgtccaagctgctagcctctagccacctgctgctgctgagcatttgaaatgtggctaggaatttatgtatgtgtgtgtgtgtgtgtgtgtgtgtgtgtattttattgtgggtatgtatatatacagatatatataatcataaaatgttaccatcttaaccattttaaatgtaaagttctgtcgcattaaacattcactttgttttgcaacaattaccactatccatcttcagaactgtttcattttttctaactgaaactgtacccatgaaacataaactgcccagtttttcttccccgcagtgccccgccactcaccatcctaccttctctctatgaatttgactattatgggtacctcacacaagtggaatcatacaattatttgtttcttggtgactggattatttcacttagcataatattttccgggtccacccatgtgctagcgtgtgggccatggaacttttaatatgatttaattttcattaatttaaatctaaataggtacatgtgacttgtggctgctgccctgaacaacacaactctagcaatgttgcagagaaagtgtggattaaaatggggaaggcagacgcccctgtcttgggacttgtgtccagggttttatgcatagcaaagagaactgagtgcaagcacagtcccaggcggcagaccckgggagccagggtgcaggggggatttgagggcacagttggctatagagcaaggctgtaaggtggtgtaaaccagggtgagctaaggagaaccctggggccaactgaatctctgcgtgaactagtatgaaagggccatgcatctacccccaccagaatgttgttgactctgtactctcccaatacccttgtttggtgtcctctgaaagaccccccatggatggatctgtgggagaggggccccctgaaggtccctgccaccgttgtgattctgcagctgctcttggctgggagtaggactgggacctttgcttggaagccacgccagctccctccaagcctttcattctgcactttccagggaaatcaggatgagtacagaggcagccgaacaacaaggcctctgacagatccctgatctagatgttacctggtggtcatatgtgtccttgaaattcctgtgatcaacttgagacaaccatttatctcttagaaaggaacaaggctggccaggcacagtggctcacgcctgtaatcccakcactttgggaggccgaggagggcagctcacccgaggtcaggagtttgaggccaacctagccaacgtagcaaaaccccatctctactaaaaatacaaaattagacgggcatgggggtgggcacctgtaattccagctactcaggaggctgaggcgggagtatcgcttgaacccaggaggcggaagttgcagtgtgacaatatcgcgccactgcactccagcctgggcgacaagagtgcgactctgtctccaaaaaaaagaaagaaaggaatgagaggctgagaatggacaggatagtctggatgctgcaaaataaaatttaaaggtgtgtgtgtgtgccttagactttacagtgtggcagttaagagcaagattcggacatgtaactaatcgcatatcctgggcaagtcctttaatctctaagcttctgattcttcatctgaaaaacggggctatgatgaggacgaacctagacaatgtgattcccatataataagctctcagtaaatgataagggatagtaactgttattacaattctcatttttaattggctaaccagattgctttcacatttccttggaagattctggataaatgtgtccttcttgagcccgtggggcagaaggagctttggggattttcctggaggagagggaggatccctgaggcaccagatgagccaggagagccttctgcagagtcacctcttggttctcctgtttcagcascagcgggaggcccttcctgctctatgtggctctggcccacatgcacgtgcccttaccygtgactcagctaccagcagcgccacggggcagaagcctgtatggtgcagggctcygggagatggacagtctggtgggccagatcaaggacaaagttgaccacacagtgaaggaaaacacattcctctggtttacaggtaaagtagtaaaagccagccagcctaactgccatttaatagacaaccttgcacattacctgtgaagagcagagtctggccccgtgatcccctttcataggtcaggaggcttgctttgaacttgtggcccagataaggcttgctggcctgaatgctgagcacctgtccattggggcctccaaggccaagtccctggaaaggtttgcacacacagagcagccaccttgctgscccgttgtgtgtcgattcaggctatctgggtattgctcktaattgccattgaatgacattgacattgtgagcctgtgttgtccctgtgcagttctaagatttccctcttctccatcttccctggtcccaaagattctacttgctgccactccccgtgtcacgtcttttggctgagtggccttagcgagctgaactagtggcctctttaaaggcctcacacatgcattgtgtattttaggtttctgtctggagcgactgcagaggttataagcactgcttttggccaggttgactcacacctataatctaataacagcactttgggaggctgaggcaggcggatcacctgaggtcaggagttcgagaccagcctggccaacatggcaaaaccctgtctccactaaaagtacaaaaattatctgggcatattggcacaygcctgtagtcccagctactctggaggctgaggcaggagaatcgcttaaacctgggaggcggaggttgcagtgagctgagatcgtgtcactgcactccagcctgggagacagagcaagactctgtctcaaaaaaaaaaaagcactgctttcgggtcaagtagagacttatactctctaccgtgcagtgaaggtgttataaactcctacagggtttgaatctatactctactattgggggaattcccttaatctctcagtctccttttcctcatctgcaaaattaagctaataaccgaatctactccatagcatgttggaggattatgagatgatgtatgtgaaacactgggtgcataatagatgctcaataaacagttgctgggctgaagctgatgacggtggcaatgagattgctgaaaccttacaaaaaggcaagagaggaaagaggaaggaagaggaggaaaggcaaggaaggcaagaggctcacgatgggactgggttggggcaggaaaaggccacctgtctctgaaagcccagtagagacacatctcatatcaagggttgttcttcacggatgggaatcatatttgtctttatttatttatatttatttatttttttagatggagtcttgctccgtcacccaggctggagtgcagtggcaggatctcgcgtcactgcaacctccgcctcctgggttcaagcgttttttgcacctcagcctacagagtagctgggattataggtgcccaccaccatgcccggctaatttttgtatttttagtagagaaggggtttcaccatgtcggccaggctggtctggaactcctgacctcaagtgatctgcttgcctccgcctcccaaagtgctggattacaagcgtgagccactgcactaggcccatgtttgtctttataagtcctttttctatctagttcctgctctgcgcaagggatatagggccagagtgggagggtcagcgaaagtgtccaaccagcctggtgaccattaatgctttttctggtttctaggagacaatggcccgtgggctcagaagtgtgagctagcgggcagtgtgggtcccttcactggattttggcaaactcgtcaaggtaaggggctcagctggggttggtggatcccattgcaatgctgagcccaggctggggtgtgggattctgcctcygggtgggggacaacttatatctgggccttagggtcatcattgtgaaacagggacacatttgctcaccagccaccagcacccagacaagaaggaacaagtagtggtggagaaaacgactgctcagtttggaccatccctgtctctcctttcctcctagaacttcccaaaggcgaccagccctccacccaacgagccagtctacctacaaacattccaacaaatgagctttgtctttactttcatcctgttcccttgctcttcctccttcctttttaaaacttcatccctccatccatctaaccattaatttatttcatccattcaaaaaatatttagtgtacaactgtacaaggtttttaatgtacattgtctccagttcttacaagagtgagagggtggcagtcatagctccatttacagatgaagaaaaagagaggctaggccgggcgcggtggctcacgcctgtaatcccagcactttgggaagcccaggccggcggatcacgaggtcaggagatggagaccatcctggctaacacggtgaaaccccatctctactaaaaatacaaaaaattagccgggcgtggtggcgggcgcctgtagtcccagctactcgggaggctgaggcaggagaatggcgtgaacctgggaggcggagcttgcagagacagagcygagatctgcactccagcctgggcgagagtgtgagactccgtctcaaaaaaaaaaaaaaaaaaaaagaaggagagaggctcagagagggtaagtaatttgcccatgtcacacagtttgtgaggagggagccaggttttccactgaagttaaagttggtgctcgccctgttgtaccataatgcttctcacagctgcctctgtctctatttcaacatcttccaacttccaactcagctcccatctgctctgggagagctttgccacaaggacctcactttctgagactgcagccatgttggggacaatttgacatatggaccaaatgcttgaaaaatacgcatatcatttgatgcatcaattcctcctgtaagaatttgtcttaaggaaataattaggcacatgctcaatgacatacgaaaaaggatgctcattgcagtgaatttttttcatagttggacataacccaagtgtctagtaagaagatagtgcttaaagaaattattatacctccattaaaaggaataacaaagaaccactaaaataattcatatttattgacttggaaacatttacatgaaatatttttaaatgaataaagcaggttccagtatggaacaatatgtaaagtatgattttattatataaaaataatcacatgtagactcaaaaaaatcttgaaagagtcaataaagggtaacaaaacattagcartaattacctctgggcagcggagggagagttgaaggggtgaatttccccccacaataaactggtattgtttgtttcatataaattaaatgtttaggaggtatttgtgtccaagaggttcagaggtggacctggcaagtttaccctcattgagggatgtgtggggcagaattttagatctgggactgtgtattagtccacagactaatacacacaatcgcaccattcttgaattagagggaaccaaaaaggtctatctgtctgtctgtctgccagttctatctawctgtcatctatctatctatctatcaattgatcgatcgatcgatcgaaacaccaatactccaagagataaaataaactcacattgctataaagaactacctgagacagggtaatttataaagaaaagaggtttaattgactcacagttctgtaggctgtacaggaagcatggctaggraggcctcaggaaacttacaatcatggcagaaggcgaaggggaagcgtgtatgtcctacatgtttggagcaggaggaagagagtgaaggggaaggcgccacacacttttaaacagccaaggctaatgagaattcactcaccatcatgagaacagcaaagggaaaatccgctctcatgacccagtcgccttccaccaggcccctcctccaacactggggattacrattcgtcatgagatttgggtggggacacagagccaaaccgtatcaggctgttttccctgctgtcaaactcaatcctgacctatgaccctcagctgtctccaggaggtctccactakcactcccgtcatcgtattagtctggcaggataattgtagttacctagaaactgaagcattgtgcgcctcaattctggtgcagagaaggaaatgctgatttttttttttttttttttttttgagacagagtcccactctgtcacccaggctggagtgcagtggcacgatcttggctcactgcagcctccacttcctgggctcaagcgattctcctacctcagtctcccaagtagctgggattacaggtgtgtgccaccacgctcagctaattttttgtttgtttttttttgtttttgtatttttagtagagacggggtttcaccatgttggccaggttggttttgaattcctgacctcaagtgatccacctgcctcggcctcccaaagtgctgggattacaggcatgagccaccgtgcccggccatgatcatttttatttttcaattttttttttttgagatggagtttcactcttgttccctgggctggagtgcaatggcatgatctcggctcactgcaacctccgcctcctgggttcaagtgattctcctgcctcagccttcctagtagctgtgattacaggcacccaccaccacacctggctgattttgtatttttagttgagatggggtttctccatgttggccaggctggtcttgaactcctgacctcaggtgatccacccatcttggccttccaaagtgctgggattacaggcgtgagccaccatgcctggcctacttttcaattttaacctattgtcccttggatcagatatcttgagaactttaggagcaagtggctgcaggactgtggccatatcttgtgtctggaaatttgagtcggggtcaggagagctgagtaccacctcccactaaccttttcagtgaccagattattttatctcttggagtattggtgtttctcactctcactctctctctctctatatatatgtatagatctttttggtcctcttcagttcaaaaatgctgtgatttagttgtgatttctggagagttgggtcaaaagaagatgctaaggaggactggaggtggatgggggtgtgtcaagaaacaggagccagccaggcgcggtggctcacacctgtaatcccagcactttgggaggccgaggcgggcggatcatgaggtcaggagatcgagaccatcctgactaacacggtgaaaccccgtctctactaaaaatacaaaaaattagccgggcatggtggcgggcacctgtagtcccagctactcgggaggctgaggcaggagaatggtgtgaaccagggaggcggagcttgcagtgagctgagatcgcaccactggactccagcctgggtgacagagcgagactctgtctccaaaaaaaaaaaaaaaaaagaaacaagagcctagagaaatacagcataaatgggagtggtttgttgcattagctgattacaattcctcctttctgtacctgggacactcttgggccaggctgtcatcttcagtgttcagttagaaagcctggaatagcctggtgtcagaagccccaaggctaaaagtccagaaggtgcagaaggtgtggagaccatggatgcagggggaaggatctgtaagtaagtggcttctccgtggggagaagaatttacctactgatctcctatctgaggacttgccttattgatctcttctctctttatgaggcagttttgaaatagtgagtcaggcttaaggatgtggactgggaccccattcttcgagggaatgatgagaaatacatttactagctggccaggtgcagtggctcatgcctgtagtcctagcactttgggaggctgaggcaagaagatagcttgaggtcaggagttcaagaccagtctggccaacatggtgaaaccccgtctctattaaaaatacaaaaattaaccaggtatggtggcgggcacctgtaatcccagctactcgggaggctgaggcaggagaatcacttgaacctgggaggtggaggaggttgcagtgagctgagattgcaccactgcactccagcctgggcaacagagtgagactcagaaaaaaaaaaaaaagaaaagagaaagaaaacagaaaaataaaaataaatttactagctgggcaaccaccatctctcctttccttccttcctcctgtaagcattcgttgagtgcctactgttttctattcctcctatttgttgagcacctactgtgtgccaggaactatgcttagtgctggtgccacaaagatcaacaaagccccarccgcaaggaataatagtctagaatagtgtttctttgattttaatatgcagacagtcccctggggatcttgctaacmtacagttctgacccaagagggctgggttgctgatgggagttttgcatttctaaggttctcctaggtgacgctgatgtggttggtccagggaccaaactttgagaaccaccagtccagaacatctacatctagaccatgagtctagaatcatctgagtgtagaactttcaactttagaccaatggttatcaaagtgtggtccctaaccagcatcattagcaccacctgagaaattgttaacagtacaaattttagggcttcaccccgggccaaaagaatcagaagcactcrggatgggtcccaggaatctgtgtttaaacaagtcctttgggcgataatgcaggttaaaatttgagaactacctgtctagagctacacagtctggtatgtcaggcactagctacatatagctatttaaattaaaattaatacaatttaattaaaattcaattccttggtcacaccagccacacttccagggctcagtagccatatgtggctagtggctaccatattgggtagcaaataggcttccctgggggtgatttgtgttttgaagaatgagtaggagacagccaggaattggcaggagaagaggctctgggcgagggcagcagcccgggcaggggtgggaacatcggggagtaggagccgctccctagagctgcccctgtgtctgtgagtctggagtttgtggcgaccaaggagaatagcgagagatggggccagcgttcaacgatcttttcagtttggcttttattttaaggaaatgtggaaccatgggaagattttaagagtgggagggacattatttaatgttaaatatggaggtgaaatttacatcacataaaattaacattttaagttgttcagttaagtagcacttagcaccttcccaatgttgtgcaacgaccacatctgtctagttccaaaacacttttatcacctcaaaagaaaaccctatatcctttaattaattaattaattaatattttagagatacagtcttgctctgtcccccaggctggagtgcaatggcgcgatcatagctcattgcagcctcaaactcctgagctcaagggattccccccacctcattctcctgagtaccttggactacaggagtgtgccactgcgccccctgcrtttttttttttttttttctgagatagggtcttgctctgttgcccaggctggagtgcagtggcatcattacagctcactgcagcctcaacctcctggattcaagcaatcctcccacctcagcctcccaagtagctgggaccacaggcatgcaccaccatacccaactaatttttctttaccttttaaaattttttttgtagagacggggtcttgctatgttgcccaggctggtctgaaactcctgggctcaagcaatcttcccaccttagcctcccaaaatgttgggattacaggtgtgagccactgcacctgtcctatgcctagcttttaaaatatatatatttattttatttaaccccatatcctttaaacagttgctcaccatttcccactccccctccagcatactattcaatttttttttaaaagatccctcttatatcaggggagctgagaacaaggagaagggcaagtaccagcctcatttccactgatccaaaatgaccaatgagagaagccagtgacaaaatctccaggaatatccccaagttcaaagaacgccaaagttggaaaagacctcagtcatctttttttttttttttgagacaaagtcttgctctgtcgcccaggctggagtgcagaggtgcgatctcagctcactgcaaactccaccttccaggttcaagcgattctcctgcttcagcctcctgagtagctgggattacagacgtgcaccaccacacccgccaccatgtctggtatttttagtrgagacggggtttcaccatgtcggccaggctggccttgaactcctgacctccagtgatctgccctcctcagcctcccaaagtgctgggattacaggcgtgagccaccrtgcttggcygacctcagcgatctttattccaaccaccttattggacaaatgaggaaactgaggccaaggagaatggaaggcatccccgaggccagccagcaatggaggggtccacatcctctgaccatcactggctcattctccaagtcacgtgactgctctcacgcacaccttgttatacycgactcctcagccacctggaaaatcctatcttgctctttgaacctagcaattgtcaaggaaaagtctttagcccttgcaacagtctgaatctttctacatcggtgggaggcagagagggtttggaggctcaggctgggcttgaatcttgactcagctcagggctcagcatcctcttctcattaggtggggttgtggaccattctccatggactgttgggagaatcagtgggggtactgcccaggaggctcccagccttgcacctggcctctaatgataacccccattagactaaatttcttcattcctggctgaaacaacctggcggraccccacccatagaagcattagaaggggattggcaaacaccctgaaaaagattcccccacaaaaggatcaggcaacttaaatcgcatacagataactttaaaagtgttcaggaactcttgggaaactttgttctgaagctgaatttcaggcacctcaagataacattcttttttggggcaaggccttcccagtaactctgatgtgggatcggtgggtgacagcacttgaattcatgatcgggctggggctggatgccattgccctcttttcttgggagtctgaaagtgaactttgcctgaaaggctgctgcctgggggtaaatacttcttcttcctcagtctccaaagcggcttcctgtcaactaactattccacagcctccttcttcctctctgcctggaatgctgctggagctctgggaagccaggcagcgccctgctcagcaggtggccatgtcctgtgagtcaagggggctggggtccctctggtcacctgctcctcttcacccagttccccatcagtgggacatctgcacggctcactgtacaggggccagactcaagagcagatgaaagagagaaggcggtcaatgttttcgcaacggagtaggacaaacagtacccggagtcgtgcaactttctccctgaagccaggctgctgcgtcaggccacgtgctgtcttcccctgttctcagggcccccaggcccccctgcttgtcttccctttcctttcctggccgagccgcccagctcagctgatgggatgaggcagcgtctcctggagtcatcttttcaccccgtgcgtgtggactgagaatgctccacttggcttgtgccctgcaggggtgaggagaaacggaactggggcgggggcagagcaaagcagccctgccttctcccgaagaagaagggcacgagtcagacacccctgctgtctctgagtccacagcctggtccaggaggcctggctctcccagcagccgccttcccttctccatgccagatctgtttcctacccaggacagaaccaacaccttgtttttcccctaactgactgctcctctgtctggaaaatcttttctcgttttatttgaagagcagaactgttccttcctcccccttggtgatgaggaaacattctgttgaatttggcatccaggctcctaggagaccttggttgtttgtaatttgatgctatcaggttgttgcataacctttcccgctgggaagcagtctctgcatcctgggccttctgtccagtttggggtcgggggtggggcggggaaaagtcagaggtgctgtgaggtgacagagcaagggataagggactctggctgttggccctggctggggacagggcctgctgatagggacctagaggaagtcaaactgcgtctctttctgggcctttggccaccaggcttggtggaatgtcctcatcccatactcagggccaccccaggccagccggagtcctgggtctgaatagaggccaggccgccctgtgtttctagaaaacgagtacactgtaggcatccttggcaaggggacatactacacttagaaacaaagcctgcttctttattttatttttgtagagacagggtctcactctgttgccctggctgcagtgcagtggtctgatcatggctcactgcagccttgacctccggggctcaagcaatcctcctgcttcagcctccctagtagcttagtagctgggactgcaggtgtgtgccaccatgcctggaacactacaattttttttttttttttttttttttttttttacagagatggagcagaggggtcttgcttgttgcccaggctggtttcgaactcctggcttcaagtgatcttccttgcatcggcctcccagagtgctggtgttacaagtgcgagccactgcactgggctgaaagcctgcttctttagaaggttattaraatgtgcactcctcaraacaggcactctacccagtcacaaatgctaatgcctttgtgggccaggcaggtgatataaaggaacacatgtttgtttttgtcagttatgggcagtgttaggaattcaatawgctggagagaggaccctgtcgaatgacattcagcattagttaaatgaaaaacactaggcatgcccaaccaaactgtcggaggttgtgatctctgctattttctccctacaggtaatttggttggcacttctctggcaggcattatgcaaaagtaccttgcttgaagctttatgtacactgtcttatataactgttcccacagccctgtgagatacgtacaactgacctttgagcgacacggatttgaactgcatgggtccacgtaatacatgaattttcttctgccactgccacccctgagacagcaagaccaacctctcctcttcctcctcctcttcttccttagcctactcaacgtgaagacaacgaggatgaagccctttatgatgatccacttccacttaatgaatagaaaayatrttttgtctttcttccaattttctttttccttccttccttccttctaccttccttcctccttccttccttcctttctctctttctttctttctttactcttttttttttggacagtcttgctgtgttgcccaggctagagggcagtgatctaatcagagctcactgctgcctcaacctcctgggctcaagcgatcatcccacctcagcctcccaagtaacttggactaccagctaggactcccaagtagctgggactaccacacttagctaattatttatttatttatttatttagtagagacacgggtctcactatgttgcccagtctggtctcggactcctgggcacaagccatcctcctgtcttggcctcccaaagtggtgggattacaggtttgagctactgtgcctggccaggattttcttactaacattttcttttctctagctcattttattrtaagtctacagtatataatacatgtaacatactaaatgtgtcttaattaaatgtttatgttattggtacggcttcctggtcaacataaggctattagtagttaagttttgggagagtcagaggttatgcccagattttcaactgcttgggagtcagtgccctaactcttgtgttattcaagggtcaactgtacaatcgtttccctgcttcctggctgagatgattgagactgagggaggttatgaattctgcccaagaccacttggttggcaggggtggcactggagacctgcctgcccccaaaggcatcatcctaattattccttgaatacttcttcaactctagttttcaaaccactgacatcagaattacctagaatcagagccccaccccagacttattaaattagaattcctgggaataggacccagaaatccatgtcttagatgagatctcatctggtgattctcttgtatggagaaatttgcgaatttccttgtttgctgcattgcctttctgactcagtgaaacatggcccttgggtcccagccaagaaagaccactgttcctccgcgtgggcagtggtgagtcttccccggcctgcccctgtcttcatgcatcataaaatgccacttcacttccgtaaccagagaagcacaaataagcaaattcatgaatcatggttttgttgatattttggttgctgtggctaaatatttattgctttaagaggttctgctttaattagagtcacaagtaaccacaagtgcgtagaaatgcattctcatggccataagacacgcatttctcgacagaaagccgaaggcaactaacagttttaatgtgccagtgcctgatcaaagtatggaggcttatctaaatgaatagtgtttgaaattgaaaagtgattagaagtttcatttatggattgtctattgttcttactatgacttataaggtcatatttatgatgctatggcatagaggtataaagtcgtgggcaacagaaagcctgcagtgacgatgactattagctacatttaactttgaaacgtgctgtgttctcttcccgatcttgccccttgccctccttccctgggaatgagtgctctccmcactaaatccccaggagggttttagaagatattgatgtcagagcttcactgcaggtcgattaaatcacagtctctgggaaagagactttggcatgcgtattttttaaaagctctccagtgattctaatacatattcaaaatggaaccacctccctaggtttagtgagtgagggtgctggctgtgtagtcagaccggcgttcacatcttggctctrtcattttctttctttcctttttttttttttgacagagtctctgtcrtgcaggctggagtgaagtggctcaattttggctcactgcaacctccgcctcccgggttcaagtgattctcctgcctcagcctcctgagtagctgggattacaggcatgcgccaccacgcctggctaatttttgtatttttagtagagatggggtttcaccatgttaggctggtctcgaactcctgacctcrtgatctgcccacctcagcctcccaaagtgctgggattacaggcgtgagccactgcacccggccggctctatcattttctagctatgtgacttgggggcaaattacttagcctctctgagctttggtttccccatctgaaagatggggacaatagtggctaacttgagaggttgtcataaggattcaatgagataatgccaggaagcatgtatcatgctgaggagcacttaacttggtacttagtaagggctcaataaatacgagatgttattgttgttgttattactattatgtttaacttagaataactatccattagtgggagcaggtattactgaagaatattgggggatcaggagtagctatcctagaatttagcctttgctggtgcagataaaacacaacacgcctgtttgatataagcatatgcatctcataattagagtacacaatcctaggggccgatagaatgccagtcagatctttgtaagttttgtccactcctagcagtaccagtgagaagctgagatttatagcaagacagtatctgcgctgttggtgacacataaatattttacaattgcctgttcacactctagacccttttaagataaatccctttagaatacaaggtctgtggacctgtgatcatttgggtggctggcatatataatygtgtcttcctgttagagccagaacccaggatgtagcctgcactaaccaactagtctgtacaacaaaaagaggggattgctccttaagtggccacactgagaggcttctctcagccaatctttttctttctcctaattcctgaatcttttgcaaggagattgtctgctttgttgactacacctgttttataactagctggattcctccaaacccctccagctttcagtcctttgctgaaataagacaagcacattgaaacgtttttctctgaagagcgtattaggaaagtcagtcacctacaagagagcaacacaaaaggttgtggcaaacgagaagaatccctaattcttgaagggatccctaattggtgaagaccaattagcaaatttattaattagaccaatccctaattggtgaagaccaattagcaaatttattaactaaaggtcagtttacccttctggaaacatcctggaggcagagaccaaatcctgtgttcaaccctggtgccattgcccaccccagtgccttctggttgaccgatagagctaatggcttgtttcctggaaccacagccgtgatctttccttagcatctggcctcaaaggttaagcaagactatttgaatagtgtacaccatggacatgcagataaacaggctccccgttttcacccacccataccccaagcttccacaaagatgcccccacgggggtggaagtatctacaaagccctggcacatgcctttgagcggatgcttcctccctgccctttggccctaagctgacgcataagtcatacattccaaagccacgtggaaatgcgttttatgcttgctggagttctggattctttgttccaagtgcgtgaataaattggagggagctatatgtatttatgggagacgtggccctcgataggaaggatgtattagagaaatgctgggctagatcaaagagcgtctcattcagcctgcagagactccagttagatttttcaaccccacacccttaaacataaacagtccataggacataagttattttgtgttttgtttcttacttcaaaacttgagggactccaaagctgattatgaaagagtcctaagaatgctgagcatttcccgtgtggtgtgctgggccagggacatcaaaggttccgtttgcaacagtgctagtacagggcgacagaagccttcatcttcttcctccccacgcttctccccacataattgctttcattattcacaccagccaaacaaagggaaattgcatgaccacagtgtgtgtgagccacacacagcacttgccttggaaaggctgtgcacacgctaactttgtgggatccttggcccttggctcaaccaggatgagggtggggtgtgtgtgggggtggtgggatggccgtggttaatgcaacccaacatgtattcaggatgtttccatcaagcatgacctcatgtcttccagcccgctagctatcattatactggtggtcacttttgacttaatggttacaaaaataattcctttaataaccaaggtggaaattcatagattgcacgtagttgtttcttacctcccccaggaggcaagaggttggaactattactgacactgtctccataacatcagaacaactcatgaattcaaggaaaaacaaagcaaagcaaaacaaaataaagccataaaatccatgccagatcggttcttggatgttgagcagatcaaatagctgcagaagtttccttctttctctcttctttaatagttgtatttcttcatcctaaacagacagtcacattatgatcaccaggaagagaaattcacttactcaacaaagatttgctaagccccactatgtcttaggtgcatgagactgatgaagtctcatggtgttgagacacaaaacaagcaaatcaataaatgaaaaaataatttacagtggggaaggtctcatgaagaaaataaaatgaggtgattcagtagagtgaggcaactttttacatctgaagtccagtaaaataaaaagcatattttgaaagatactagctagttgagggaaatagctggttaccaaaaaagtcattcctttgttggggttattggaaactcagagaggggttctcccagagactagctcttagctgaaaagaagtctcgagttatcaccatggatgaaccagctgcctcccctcctctcacagggggaagtccagccaagcagacgacctgggaaggagggcaccgggtcccagcactggcttactggcctggcagagttccagttaatgtcaccagcactgccttgttaaggtatgagaccaaaactaccttgrgatgttggggcccagagcaagaaaagtcatggaggcatgggtggctagatggaggcatgggtggctrgatggaggcatgggtggctagaggcctcaggaaggtcattcaccacttgcctttgccgggtgttcccagacacttccaagactctgactgtagaagtgatgaaagtaatagtgaagtggggccacgtgtggaggctcgcttctgtaatcctagcactttgggaggctgaggcaggaggattgctgaggtcaggagtttgagactatcctggtcaacatagcaagaccctatctctaaaaagaagggaagggaagagaagggaggggaggggagggaagggaaggagaggggaggcgaggggaggggaggggagaggaggggaggggagggagaaacagtgaagtgggactcgagccatcttctgggaataacacctgagtgaagaagggattggttggtttcacatacatcagcattgggtcctggctgtgtctgctggagagagtgcagaaaaggcggcagcagcagcatctccctctcagcctgtgccaagctgaccgaggcaatagatcctttgagacctaattgttccatccttggggttaaggcaggtgtcttaggggtggctgtgagaagccggctagtctctagcaatccgatggccccaagaaaggagtccagatgtccactttccctggaggagggtggagaagaaaggtggcccctccaggccattagggaaataatgaatccttaggtgaagacattcctcctgcctctggccatgatgcttcttaatgagctgagtgtctgcatagctcactgcagacccatcacatcaggtaaatgtgatgtctcaccattaytcttattgccgccttaaggcagatccaggaggccatctccatggcaaagaacttggctgtgcagcgtctatgtgaaaacaacatcttcccagctatggaaccatgacttatcctggggacttttcactaattcagacaggaccttcctctctgtgttctgccctgtgttcactaacaaggggaaccctccgtagaaccctgtgctcattcatgtgctcagaaaactgctggttaaagaccgatttcctaattccaaaggttctttgccattagcctaatgagttctggcgtaaagaacacagctgagtagaggcaggcaagcttcattggcaccctctgacttccctagatccaatggggaggaggggagagactcaaagtccaggggaaaagggtaaacagctttcagggccaaagtatggggtgggtgggcatcacccctggcagcctgtggggcccccagaaattccgggtcagccctgtacagtcaggagggggcagcgtgctgtcagcgggtaccagcaggtgtgacaacaacagcagagcctggaatctgtgatgtcaggctgcctgggaaaagggccaggcaggctgcttttatagggctgacttggtgtagtcaaagtgcttatcaagaggggccaagtgttcacgggccaggctgcacatggacaagtaactcagccgtctctcaagttgcttcacagaaagccaaccagtggcttctcatcagagaatggtgtttgcacctacagtcaaccataataaaactgcctcatctcattcataatgtagggccttagaggagacaactgactgagaggatggtttggtgacccaaggcagtgtctgcctgagggccccagaattgtaccaggataataccaacacaccgtatcggtacctcctaggagatacattaggttggtgcaaaagttgttgcggtttttgccattacttttagtagcaaaaactgcaatgactttcgcaccaacctaatatatagtgtatcacacacacacacacacacacacacacacacacacataccttttattttatttattttgttaagagacagggcatcactctgttgcccagactgtagtgcagtgccaagatcatagctcactgcagccttgaactcctgggtttgtgtaatcctcccatctcagcctcccaagtagctgggactacaggcatgcaccactatgcctggctaattttttaattttttgtaggcatggggactcttaatgttgcccaggctggtgttgaactcctggtcccaagcactcttccctcctgggcctcccaaagcactgggattacaggcatgagccatcacacacagccaaggctagtttttggtgttaaattaggctggatttcagycagccagttttacctctatagatttaccttcttgctgtttcccatatgaatccatgttaagcaaatttgggcggagtttcctactgcctggacaggctgtgtgtgtgtgtttctctttcccttgacacctcagggtcagcttgacagagaatggtactatgatccaaattcaagacattgatgctaatgcttcatgttgttgggagcccagcccggcaccctccgcccagactgcatatcacctactcttgtttcattgcttgaggaatatagatcttccagatcagagataactcccttaagccactaagagctaaagccagagtcccttaaacctatatccttgaggccctgaggaattatgagcatcagagagtggtcaagttgatataaatatgaatacagaaaagtgaaagagaatgtgtgggagagggggcgggggatccattcacatggatcccattggttttagagataaycartgttaatatcggtgtgtacctgggtgatgtcataagatgaaagaagggtcttgcacgtgacctgcctccacagacacaagtacaggatggggaaaatgcatttattccacagatatttattgccatgtccaactaygggtcaatyattactccagggactggggagatggcagtcatgagcagaccaaacagaaagctctttgtttaggggctaccttaccttcaggaggccagggctttggcagcacatgggaaaaggtttcagtagttttaacttaaaactgtgctgcaggctttcccarycgtggcgtggtcggcattttgggctggatcactcttcgttttggaggactgtcctgtgcgctttataggatgtttagcagcagctctggcttctacccattagatgccaatcgtgtccccaccccaccccctaagttgtacaattaaaacgtttccagacwgtgccaaatgtccccggggagaatgaactcactctggctgagaactacggctttagcggaagctctcttagccatatacaagaaggggaagggcctgctctgcctctgagctgggagacccctacctctgctccgaatgaggatcgatccttcagagatgaactggggcaattatgaggtgaccagaatggcaaaaaggacttgaaacaatcttatttgaaaaacagctaaggccggacgcagtggctcacgcctgtaatcccagcactttgggaggccgaggcgggcggtcattgaggtcaggagttcgagaccagcctgaccaacatggtgaaaccccgtctctactaaaaatacaaaaattagccgggcgtggtggcgcgtgcctgtaatcccagctattcaggagcctgaggcaggagaattgcttgaacccaagaggcggaggttgctgtgagccgagatcgcaccactgcattccagcctgggcgacagtgagactctgtctcaaaaaaaaaaaaaaaaagaaaagaaaaacagctaaagctgctgtgtagccagaagaggtaactccctgggctacctcgtggctctgaaagacagtcaggtgtgtggaagagggattcagctggttctggcctgtcccaaggcaccggtcttggaagtaaaagctacgaggaggctgtgctcacatcagtgtcttgtggtttagctgtcacctacaggcagggcctaaccacatgtcgcctttccaagtcctctcctcctccctggatctggcagtgggtagtggtggttggtggaggtggtctcacccccacccccactcttggcagctctctttactctgtaagaagcgcttggtttgctggggggcatcccctgatgctctgggacccctgcaaccccggttctccctgaaatcaatgtggctggggctatgctggcttctaagagggactcgtgtgtggatgagggtgccagggaagctgcccatcaaatgtgagcataggcttgcccctcatgtctccacggctgagaccaggaaggcgtgggcacctcacttttctcggggataatgacagggaagaacaatgcaggaaaaaagttaaaactaaatgcagaaagaaatttacaactcagtgctaagaaagtactgctcccacggcctagggatgatccctactgttccctgtcccttcctcttcttcagaggaagttctcttcttgccttcattcgggagagatgaacacaaagcctctgtctctgtccaggtccaagcgcctccaatccatccccaagcaaacctctcctgcctctcgcttcctgtccttagatcagatccaccttttttccagataaaacgttctcagcttctctgtcccctgccttcatcctgggatgccttccaccccagggctgcccagcacagcacctcagttcccatactatgcatcctgaagtccatgtggttccttctggaacgagccccctgttggccttccactcccctttacctaccccccacctgcacaccttggggtccagcaggccaggcctttctttctttctttctttctttctttttttagatggagtttcactcttgtcacccaggctggagtgcaatgatgtgatctcggctcactgcaacctctgcttcccgggttcaagtgattctcctgcctcagtctccccagtagctgggactacaggcatgcgccaccatgcccggctaatttttgtctttttagtagagacagggttttatcatgttggccaggctggtctcgaactcctgacctcagatgatctgcctggcaggtcaggcctttctgcatcctcctcgccaccactgccccatctccactcctaggatccttcagcagccccttggataagaacacaaatatgcacccttcctacgaacaaccttcagagcctggggtgaccagagccacaggaaagaaaaagcacatattttcataagggcaatgcaacctgcaaagatgtcaccctgcccactctgaggacagccttttgtgccattgtgcagagcaatctcagccttctcctgttatcacgagtgggttcatggctgcccttgtcacaaccaaaaagcccactgaagtggggtttcatcccatcagaggctgggaaccacttctccatcagacccatgaggcatagtgccagagtccatggaattttggaattttttttttaagatggaatttccctcttgtcactcaggctggagtgcaatggcacgatctcrgatcactgcaacctccacctcctgggttcaagtgattctcctgcctcagcctcccgggtagctgggattacaggtgcctgccaccatgcctggctaatttgttttgtatttttagtagagacagggattcaccatgttggccgggctggtctggaactcctgacctcaggtgattcaccctcctcagcctcccaaagtgctgagattacaactgtgagccactgtgcccggtcctttttttttttttttaatgaaggaagagacccacgaaggcagaagtgcccaggtcccatgaaagctgcagtgtggctctgccaaaagccgggcaccgaaacgaacaggggaagctttgaagtataggtttgtatttattttgtctctttctccgaggttttaaagactcccaggcccaatttctttggtggggtttgaggtttggagtagctggggtgcccttggtagccttagtagggtggatgctttcttcaagttctcatgtaggctgggggcccaggcctgggatgactttgggctgcatgtgccagggaccgtctccctcttccagggctaagctcttgggcttggctttttctgttacttaaggaaggactatttgacagcccaagcttgccaaatcgggatggggctgcctcgagtggcctgagtcactggacatgttgaagcttttctcatgggcgagaggctttctttgtgctccaggtggactaggtacctctgaagttcttgccaaagtctgagacattaggattccgtgaacattagacttagtgctctataattgggatgctaaacctcaggagagagtagtggggggaaatcagatggaaaaagaaagtacacaatactttccaaaatcgaacgcagatcctgtttctcttgctgactgatttgacccatctgtgacgctgatctctcttaggggcacaatttagagaaaactcgagcaaacagctccaaaccaccgcggccttttcagactgctttgtggtcctctttgctttccggtatgtggcaggaaccttggactctggacaggtttctggactgttccgtgctctgcgagtgctgactctgcattcttgactttgcatcagagtggggtgccaggtcctggagcttgtttcttaagagataagccaccagctccatggactgtgggagccaaaggcaaacagaaacattctgcactgtagtcaatggagagattctgcctggggttgtaggtagagccctggagaggagaaggagatggccaacaggagacggagcctcagagcaggtcctttctgcagcccccttagagggcggatatccccccagcccctcagatatcagattggggaaagtggggatttgtggccctggaggcttcctgatgaatggtgcatgcgaaagcctgaactctgctgctgcgcccagcctcagggctaccagggcctctttcttgggaaagtccagcttcgcattagctcagccctcctggctccagtaagccccgctgacttccagttggcctggccatcatataaacggctctgttgaaggggcagcctctctgttcttgcggaagacttttttcccccaacatgagcacaacaggctggaggaagatgtgccataggtagagtaaccttgcaccatatgacttaaaaaaaagtcacatgaacaaaatccactaaaatatgaacaatggctgcctttgggtgatggactaagtgtgtgttgttctctcttttatatttccggatgctctcattttttcaaccataaacattcgctatttttatttatttatttatttttggagacagagtcttgctctttcacccaggctggagtgcagtggtgcaatctcggctcactgcaacctccacctcccaggttcaagccattcacctgcctcagcctcccaagtagctgggattacaggcgtgtgccaccacacccagctaatttttatatttttagtagagacagggtttcgccatgttggccaggctggtctcaaacttctgacctcaggtgatccacccacctcagccttccaaagtgttgggattacaggcgtgaggcaccgcacctggccgcattcactaytttgtaatggactaaaagagctaaaataaagccggtggaatgttccacatatcatggcattttgaacaaaaactaratcttttataacacagagacccgcctaatggaaaaggcagtgaatattctcttgtggacacctgtcccacactgtttcctctaagccaatggctgtcaccaagctggtgacaggtagaacgcctcagttcttaggtgggctcacagggattacccttgtraatcattaagacacaaacatccagtgaggactttctgagtgccaggtcttcttctctgtgccttacatgtgtgtttcatgcacacaaccacctgtgagctggcaccaatacagcagtcctcctttatccacggtttcactttctgcagttttagttacctgtgatcaaccatggtctataaatattaaatgaaaaattacagaaatgaatctaagttttaaattgtgcacattctgaggagtgtggtgaagtctggcaccatcccacccacccygtaacgccctggacgagtccgccctttgtccggtggatccacgctgtatacrctacctgcctggtagtcacttagtagccatctcagttatcagattgattgtcgagatatagcagtgcttgtgttccagtcacacttatttttacttactaatggccccaacgtgcaagagcagtgatgtgggyaattcgaatatgccaaagagaagccgaaatgtgcttcctttaagtgaaaggtgaagttcttgacttaataaggaaagaaggctgagtgcagtggctcctgcctgtaatctcagcactttgggaggccgaggcaggtggatcacttgaggtcaggagtttgagaccaacctggccaacacrgcgaaaccccatctctactaaaaatacaaaaattagctgggtgtgttggcatgcacctgtagacccaactacttaggaggctgatgcaggagaatcgcttgaaccctggaggcagaggctgcagtgagccaaggttgcaacactgcacctccagcctgggcaacagaacaagactccatctcaaaaaaaaaaaaaagrgaaagaaaaagaaattatatgctgaggttgttaagatctatggtgagaatgaatcttctatttttttgttttttctttttgttttttttggtagagatgggattttgccctattgcccaggctggtctcaaaccggccattgttcacatggccattgttcagcctttattcacattttggtggattttgttcatgtcagaacaaaatcaactgatccacccaccttgacctcccaaagtgctgagattacaggcataagccaccaagaatgaatttcctatccatgaaattgtaaagaaggaaaaagaaatttgtgctaattttgctgttgcacctcaaactgcaaaagttatggccacagttcatggtaagtacttagttaagatggaaaagtcattacatttgtgagtggaagacatgaacagaaacgtgttctgatcgggcgcagtggctcatgtctgcaatcccaacactttgggaggctgaggcaggagaatcacctgaagccaggagtttgaaaccagcctaggcaacatcgcaagaccttgtctctacaaaaaaataaataaataaataaataaaaatcaataaaacaacaaagaaatcttgtaggtgtggtggtacatgcttgtagtcccagctactcttggagtcagacgagtattacttcagcccaggagttcaaggttacagtgagttatgatcacacactgcactccagcctggatgacagagcaagactctgtctctaaaaaaattaagaataaacatgtttgatttatggcaatcaggtttggtacaatccaaggttccaggcattcactgaggcccttagaatgtgtctctctctgataaggggggactactatattattaaaatatcatacccatcttagagaattgaaaactgaggcattgagaagctagatatgtggcagagctgggatttgagcccaggcaacagctggctgcagagcctgggtgctgaaccrctgcaccattctgcctcttgtaggagcagaaatccaggtggaactgaaaggaaaaacaagcaggtagagaagttaagccagcccataggagaggctgtgggtgcttgctctgggctggttcaggtgggggttgacacggcagggtcagggagcgagtcagaagagctggggacaactcagtcttgttatttccgcagcgtgctggacatttttccractgtggtagccctggcccaggccagcttacctcaaggacggcrctttgatggtgtggacgtctccgaggtgctctttggcyggtcacagcctgggcacagggtaagtggaggaggtacttgcccacatgtaggctctttaggaggctggtctgctgcctctcacctctgtgcagacagaaccatcatcagaagatggtcaagaacaggctgcaggtcggatacagtggctcacgcctgtaatcccagcactttaggagaccaaggcgggctgatcacttgaggtcaggagttcgagaccagcctgaccaagatggtgaaacctcacctatactaaagatacaaaaattagctgagcatggtggcatgggcctgtagtcccagctacttgggaggctgaggcagcagaatcgcttgaacccgggaggcagaggttgccgccagcaagtggctggttcagaccccaaaaggtgaagcatttgagatgagcctctttctacccccaacccccagtccagatttatatttaacagtttggcttagggtgggtgtatataggttctcattccctataatgggcaatttcttttcctgaatgtatttaatttaataacatagctacccagtatttttgttagatgagatgactgactagtgtctgcaacttgtttattgtgagcctcaccctctagaatggaagcttcttgagggcaagaatctgagctgttgagttgagctccgagttctcactgcctgcagtcagccagcatttcagtccatgcaaactggatgaaccaatgaaggaacaaatgaacaaatgagtgaaagaccctttggacagcaggtccagcaagggccttacatccaacattctcccagctccagagggctcagcacactcttggcagcctgttttktttktttgtttttttttttgagatggagtcttgctctgtcacccaggctggagtgcagtggtgtgatctcagctcactgcaacctccgcctcctgggttcaagcgattctgctgcctcaccctcccgagtacctgggactacaccctcccgagcccatgccaccatgctcagctaatttttgtatctttagtataggtgaggtttcaccatcttgaccaggctggtcttgaactcctgacctcaagtgatcagcccgccttggtctcccaaagtgctgggattacaggtgtgagccactgtatccgacctgcagcctgttcttgaccaagcagaccttggcaatggctctgggcttccacttcccagcatcacctcctcaatgtcccctgtttgcactctgaagcactcattggcagtgacagccaggaaatgtcaggcctcatggcctttccttgtcttttccctgtgttttcctttcaccaaaaggaagaggaagcaggaggaggcaaggaggcggaaggagcacagagtcccctctgcaacgccctacaaatgcatggcttcttggtgagggacccacacatcaaagggtctatttgtgtctttgctaagggtcacatggaagtgactcaaatgtacagaagtgtcctgtggctggtagttaccaaagctgcccttcccacccagcctcccccagcaaaccagaacatgggtcttctatgggccatcggttcttctgtgcacattaatgcagtttttaggggttgttggatgaagcctgagaggtgttctgaagtcctgcttctccccagaatatctgccccctagagctgcagacccttccaggcctagcccttctccctaagcaggagcagccaggcaggaagatggtttccgccttgaggttggaagttagcagtatgtgaccctggagggttgtcacagacgtcattggagaggtgctccggagtgtttattaccatggctgctaggaataattggggtcatcaggaagtgcttcaaggactgtgstctccttgacgttgtcggtactgcctgtgggagccagctccttcatgtactaacttcctttctcagacgggagagctctgctcttgctctaactggagttttgcgcaggctcgtagagaccccatcctaactagtgcccagcagggttaggcccaggaaccagattggaaaaccagatacaagtcacagcatcgtcacggggaggtatgatggcgtggttaatgcagctggagtcaggactgatttgctccctaaccacaccccatggcccagaaagaaacagccatgcttactgcttgtgggaagcagctgatggtatcttcaaggttaagagcacacggggctggcacctgtgggtcacactcagtctcccagagcatgcctgcagtgtcagtgaagacacttgagataagattctgaagtttgaggacaacatgggtagttgctggacctgaatttgggtttggtcttctctagtcagtcctctctatcaaagcaaagtcatagacctaaggaaataagagtaaattgtctcaaatttggaatagctatgggggaggcttgaaggtaagaatatgaggaattatatatatatacacacacacacaatattctatacatacttacatgtatgcatatgtgtgcatacgtctatacatgtgtgttatacgtgtgcatgcatattctagacgtgtatgcatatgcatgttttgttttaatttaatttaattttattttattttttgagaggagtctcactctgtcgcccaggctggagtgcagcggcacaatcttggctcactgcaacctccacctcctgggttcaagcgattctcctgcctcagcctcccaagtagctggtattacaggcgytcaccaccacgcctagataatttttgtatttttagtagagacagggtttcactgtgttggccaggctggtgtcaaactcctgacctcaggagatctgcctgcctcggtctcccaaagtgctgggattacaggcgtgagccactgtgcctgggctgcatatgcatgtttatgtaccatgtatgtatattcatgtatgcatatccacatctgtatacatacatgcatacatatgtatgcatatgcatgcttataccacacatgcatacacatgttcgcatatgcatgtgtctatataaacatacatatgcatgcttatgtttatacactatacatgtgtacatatgtatgcctatgcatgtctatgcacatatatgtatacacatgcatgcacacacatacatgtatacatatgcatatgtccaggcacataaatagagatatacacacatatttatatgcaggtgtatgcacatgtatacatacgtgtatatatatgcatatatcaatatacacatacatatgtgtacacagatgcatatgtctgtaacatatgcatacatgtgtacatatgtattttaaaataagcacaatttgtgttcaccctcagatacatcctgggcttacaaggattccaatatgagttggtttagaaacactttcagttctagaagctcaaagtaactcctggatattcaactgggaacaatatgccaatgcttctcagcaatccagtccttccctattgcaaaccaagtaaccaagagttaaggagaggagcaagagagttgagaggtgtcatgtgcacaatgagctccagttccacactggatggtcttctcacaacccactccagcaacctctagggacgttgtctctgtgatgttcgaaaccacatcagctgacaccatgctgcatattcttgcatcagctcaacctcctgcttctgatcttgatgggtctgtgtctaggcagtgaggggcaccaggagagagatgagggctgggaaggggagggctgcacagcctagaaccaaaggtcccactttgtgctttcctggctcccagatggaagctgaaggtggtaacatcatcactggtcaggtcgtgtcttagccccaggttgtcatgatcaggtccagaaattgtcaacgaaggaacgtttcccctaacagctctgcatctgcccagcctcacacagtctggggctgctgtgggtcatcaaatgcttgacacgcccctggaggccatacatcgaggaaacaagctgagttttaatgtccagaaagaacgctgatcacttctcttagggaggcccctagtggcgagagatgtcatctggcgtggctggcaaactgaccacccccatccaccccctttggaggctgtagctgtgcatccccacctgaatggagaagaagcccaccttcaggggatgctatatcagcaccctgtgggacttaaggtaaaggaatgctctcgtgcttaaaaaacaaaacaagataaaatagagcaagaaaggccaccaggaaggcaaaacaagtttgcagaagataaagtcatctttgaaatttgaaccaggcatctggagagctgtgattcatgtgtacttttgacagcttccttcctatattgatataaacaagaaagccataatgggtcttctcaaacaaacmaaaaaaatgcatagacaagttctccaaagtccatctatgtttctgagaatgagccatcccacagttttgcttcctcgtggattttggaagttgcctctggtaacgccacataaatagtgggaatatagcagcccaccctcmtggaatttctgtgactgagacgcaagtactgtgactgatctgaagcagcaacttcactcccatcttctgcatgtccgcgtgcatcgtatatcagttgacaatagattttccaagtctcccacttcctgctgtctcaagaaggaaacaaaacagtctcctgtggtgaagaggcttggctttctgcagggatggaagaagtgagggttttcagttacgacttcttttcctgtttggaaggaacctgctatcatcatgcgcgccctgggtttgtgcagggattgtcacgagaacctggaagccgcaggtgtggggaggagccccaccttggcggcatcctctcagagctgtgaaactccgggggacagctgtttactgctccaacagatgtttctcatttttttcttaagtctcgtgtggaaactttgaatcatgtaagtgcctttccagccctatatacggttgtgattcataccaaggcagtctcatgcttttagcccagacccaccaacctaccaaggacactggccttttgttttctttcacatccttccctcgagaaccctgatttaggtgtttccattctgtacggtaattcttttatttgtgacctgatgaggaaagatttcctcagtccaaatatagtcggattgagtcatagctgtgggcgtctgtgaccagagtctgggctgtgcccgattctgcggaaatcaaggatgccttcttttgtaccatccttgctcaagggagagttggaacattgacttgatgctgaagaagcctttcttcaaagacagctgagggtcacctgcatcagaacccttggaaatacttgtaaaacaagtaagtccccagggcccatcctgaccctgaggggttggaactcaggcagggtggccttgtgggcctgtgaccggtgccccccacacacagagccctgcacttggagggaccctgtgcttggtttaaagctctgccgtggtcatcwtgaaattttaagtttgtgaacaaggtatccctgatttgcattttgttgtggactttgcaaattacatagcaggtttcaggcctagaaatctgacctacctagtgagaccttttgcctactcttccagagttgtaacccactcccatcaattaaccagcaaaataacaacttcacaggctccctggagttgactggtgtggactccaggcttgtatctgtcagtgtgtgtttgggcacagggatagggagaccagaccctgaaaaagacagtaatatkttccwgggagcatctagcatcatctagcatgttttattttcttttgctgtttcgagacaggatcttgctctatcacccaggctggagtgcagtggtatgatcatagctcactgcagcgttgacctccyaggctcaaacaatcctctcacctcagcttccaagtagctaggaccacaggtgtgcaccaccatgcctggttaacttttgtatttttttgtagggaggggtcttgctgtgttgcccaggctggtttcaaactcctgggctcaagtgatcctcctgcctcgacctcccaaggtattgggattacaggcatgagtcaccgagttctgccaatttttctattagtaagctctgccaccctttctcaggtgctgttccaccccaacagyggggcagctggagagtttggagccctgcagactgtccgcctggagcgttacaaggccttctacattaccggtgagtgaggggccacttagccctgcctcccacagtcacagctgcacggggaccccatggactctcacccaggcctctgggaatgagtgtgagtccctcctttgtggggggttctcagcacctcttgacaagcgtctcctccaaacccagggtccctgcacaggctctctggatccctcatatgcaaataagatctttgtgctgttcacctgaatttctagtgagctgggagctctcagcacgtttattcagctccttttcacatagagagcatttcctattgtcgtgctttaaatgccagtttggatgaacattaaatggaagcctagagatattttaaagtataatttacttgacaatagaccgtttcagaaaatagattttagaggactagttagcaaaccgacagaagtctctctgcttcttggttcactgtgactatctgtctcttagatgtatactttagaaatgtcatactgtatcaggatggtcctcagggtcttccaatggcttcttgctgccaattgaattcagactctcaatcccgagtcctactgtctttccacccttagttttccaagaacaagtctcctcttccttggtctccatattaaaatccttttaagcctttatggcccaagtcaaatgccactttcataaaactctcttatcttcccagctgggtaggaattctggagaactctgttatctctcactttctgccatgcatgcccgtcatttaggtacacgtcttatttcctgtactagttttttttgttgtttgttgttgttgttgtttgtttgtttgttttgagacagagtctcgctctgtcgcccaggatggagtgcagtggcgtcatcttggctcactgcaacctccgcctcttgggttcaagcgattctcctgcctcagccttctgagtagctgggactacaggtgtgcaccaccattcccggctaattttttaatttttagtagagactgtatttcgtcatattggtcaggctggtcttgaactcctgacctcgtgatccgcccgcctttcagcctcccaatcctgtactagttttttgtttttgtttttgttttttgagatggagtctcgctctgtcacccaggctggagtgcagtggcrtgatcttggctcactgcaagctctgcctccctggttcacgccattctcctgcctcagcctcccgagtagctgggactacaggygcccgccacctcgcccgccttatttttttgtatttttagtagagacagggtttcaccgtgttagccaggatggtcttgatctcctgacctcgtgatccacccgcctcggcctcccaaagtgctgggattacaggcatgagccaccttgcccagcctgatcctgtactagttttaagctttctaaatttggaactctttcagcactttaatctttgttgtcttgaagtgcttagcacacttagtaggaacgctacaatttttaagtaaatgaaaaacaaaaaataaaaaaaggagaacctgtgacctaatgcagattccaacttgattcagttatttaatgttggagcttttcaaattatatgataaaaaaattattttccctgagtgtaaataagtgatcctgaagaaaatgtggcataaaaacaaaacatgacttgaggggtattaaaaatgtcacaaaaatctttgattctctaaaacctaaaactcagtcagatatttgttgttttcggttgaaaagtttctagattagagtccttatattacattatctaagaggtatgggacctccaggctgagttaatttcacaagtaaaagtcctgccagaaagcccttggcaccacaatgttggaatcagacatgttactatgaagtaatagggctatttaaatgatcacaatcagataggaactataacacccaggggaggtctgctcttctaaggagtcaccaaactcccaagagagtctgggtagggagcactgaacttttaatccatcagtgaaaactgggaataggatgaaacaggggcatgttctgattccctcttcctcttgcttctaatatttgcattccagttacttacaactgcttttggataagctagatgaattgacatctactacattagattagagaaagatgtgttcgtctatgatgaggatatgatgttatggtcacgcactgggagtggtcttgaaaagacaaccagtctgttttggtatgtggcctagaattaaggtgtaccttattgtttttctttttttttattattatactttaagttctagggtacatgtgcacaacgtgcaggtttgttacctatgtatacatgtgccatgttggtgtgctgcacccattaactcgtcatttacattggttatatctcctaatgctttccctcccccctcaccccaccccacgacaggccccggtgtgtgatgttccccttcctgtgtccatgtgttctcattgttcaattcccacctatgagtgagaacatgtggtgtttgtttttttgttcttgtgatagtttgctgagaatgatggtttccaggttcatccatgtccctaccaaggacgtgaactcatccttttttatggctgcatagtattccatggtgtatatgtgccacattttcttaatccagtctatcattgatggacatttgggttgggtccaagtctttgctattgtgaatagtgccgcaataaacatacgtgtgcatgtgtctttatagcagcatgatttataatcctttgggtgtatacccagtaatgggatggctgggtcaaatggtatttctagttcgagatccttgaggaatcgccacactgtcttcctcaatggttgaactagtttacagtcccaccaacagtgtaaaagtgttcctatttgtccagttaaggcaacctgtacacaaagtgaaaggcccagatctataatgtataatttggtgaggttttataaatgtagataccgtgtatgtacccttttaatggtgtgaattccattgattctttttctttttccattgattgattttcaagtgttaagccaactttacattcctcaataaatcccatttagtaatgatgtatcatactttttatatcttgctgattttgatttgctaagattttgtctataattttcctttcttgtctatgtcaaggtttggtatcaggattttgctggccttataaaatgagttgagaaatattcccttctctattttctgaaagggtttgtggaagatcagtattatttctttcatgtttgattgaattcatctgtgaaatgatttgccaaattcattgttgtgaagattttgtcatatttttaaaaagagtgttagtattttaggtcttatatttagatctctgatccatttccagttaatttttgtatgtggcataagtaagggtccaacttcattgttttacatgttgacatccagttttcccagcaycatttattgaaaacactgtcctttccccattgaatggtcttggcacccttgttaaaaatcatttgatcatacatgtgagggataatttccactgtctattctatttcattagttatatgtctatgtttatgccagtaccacactgttttaattactgtagacttgttgcagttttgaaatcaggagtgtgagtcctacagctttgggctttttttttttttttttttttagactgttttgactatttctgggtcctctgagattccatgtgaattttaggatggctttttctatttctgcaaaaaacatcatcaggattttgataaggattgtactgaacctgtagaccacttggggtagtattgacattttaacaatattaagtcttccaatccatgaacatgggatgtaaccatttgtttatgtcttctttaatgtctttcagctatattttatggttttcattatgcaagtctttcacttttttgtgttaattcctattttactctttttgatgccattgtaaatgaagttgttttcacaatttcgttttcagattgttcactgttagtgtatagaaatataactggctttgtgttctgaatttcaatcctgccattttgctgaattcctttattagttctgtttttatgtggaatatttaggttttctacatataagattatatcatatctgaaggaggtcattttacttcctccattccaatttggatgctttttatttctttttcttgccgaattgctctggctggaatgtccagtactatgtggaacagaaatggcaaaaatggcattgaaacttttattaatatattatgtccttctctttgtctcttataaccctttttaaaatttaaagtctattttgtatgatattagtacaaccactcttgctatcttttggttactatttgcatggaaaatcttttcctaccatttcactttatttattttttatttttccatgggttattgggatacacgtggtgtttggttacatgagtaagttctttagcggtgatttgtgaaattttggtgcacccatcacccaagcagtatacactgcaccctatttgtagtctttcatcccttgccccctcccactttacccccaagtccccaaagtccactgtgtcattcttatgcttttatgtcctcctcataacttagctyccacatatcagtgagaacatacgatgtttggtttttcatttctgagttacttcacttagaataatagcctccagtctcacccaggttgctgcaaatgctgttgattcattcctttttatggctgagcagtattccattatatatatatcacagtttctttatccactcattgattgatggacatttgggctggttccacatttttgcaattgcaaattgtgctgctataaatatgtgtgtgcaagtatctttttcgtacaatgacttcttgtcctctgggtagatacccagtagtgggattgctggatcaaatggtagttcagcttttagttctttaaggaatctgttttccatagcggctatactagtttacattcccatcagcagtgtagaagtgttccctgttcaccgtatccatgccaacatctactgttttttgattttttgattatggctattcttgcaggaatgaggtggtatcatattgtggttttgatttgcatttctctgatcattagtgacattaagcattttttcatgtttgttggccatttgtatacttttgaggcttgtctattcatgtgcttagctcactttttgatggtattgtttctttcttgctgatttgtttgagttccttgtaggttctggatattagtcctttgtcagatgtatagattgtgaagattttctcccactgtgtgggctgtttactctgctgactgttccttttgctgtgcaaaagatctttagtttaattatgtcctagctatttatatttgttcttattgcatttgcttttgggttcttgttcatgaaatccttgcctaagccaatgtctagaagggcttttccaatgttatcttctagaatttttatagtttcaggtcttagatttaagttcttaatccatgttgagttgatttttgtataaggtgagagatgaggatccagtttcattctcctacatgtggctagccaattatcccagcaccgtttgttgaaaagggtgtcctttccccactttatgtttgtgttggctttgtcgaagatcagctggctgtaattatttgggtttatttctgggttctctattctgttccattggtctatgtgcctatttttataccagtactatgctgttttggtgattatggctttatagtatagtttgaaatcaggtagtgtgatgcctccagatttgttctttttgcttagtcttgctttggctatgcaagctcttttttgtttttgtatgaatttttctaattctgtgaagaatgatggtggtattttgatggggattgtgttggatttgtagattgtttttagcagtatggtcattttcacaatattgattctacccatccatgagcatgagatgtgtttccatttgtttgtgtcatctatgatttctttcagcagtgttttgtagttttccttgcagaggtctttcacctccttggttaggtatattcctaagtttttttttttttcagctattgtaaaaggggttgacttcttgatttgactctccgcttggttgctgttggtgtatagaagagctactgatttgtgtacattaatcttgtttctagaaacttagctgaattctgttatcagttctaggagctttctggaggagtctttagggttttcgaggtaaacaatcatattgtcagcaaacagtgagagtttgacttcctctttactgatttgaatgcccttttactgatttgaatgccctttacttctttctcttgtcttgctctggctaggacttccagtagtatgttgaagaggagtggtgacagtgggcatccttttcttgtttcagttctcagagggagtgatatcagcttttccccattcagtattatgttggctgtgggtttcttttttttttttttattggtgcaaattactgtttattaagcattatttattccttatgcaaaacaaatgtgcactagcctttggcattaactaaacactctctacatatttctttttttattattattatactttaagttttagggtacatgcgcacaatgtgcaggttagttacatatgtatacatgtgccatgctggtgtgctgcacccattaactcgtcatctagcattaggcatatctcccaatgctatccctcccccctccccccaccccacaacagtccccagagtgtgatgttccccttcctgtgtccatgtgttctcattgttcaattcccacctatgagtgagaagatgtggtgtttggttttttgttcttgcaatagtttactgagaatgatgatttccaatttcatccatgtccctacaaaggacatgaactcatcattttttatggctgcatagtattccatggtgtatatgggccacattttcttaatccagtctatcattgttggacatttgggttggttccaagtctttgctattgtgaataatgctgcaataaacatacgtgtgcatgtgtctttaaagcagcatgatttatagtcctttgggtatatacgcagtaatgggatggctgggtgaaatggtatttctagttctagatccctgaggaatcgccacactgacttccacaatggttgaactagtttacagtcccaccaacagtgtaaaagtgttcctatttctccacatcctctccagcacttgttgtttcctgactttttaatgattgccattctaactggtgtgagatggtatctcactgtggttttgatttgcatttctctgatggccagtgatggtgagcattttttcatgtgttttttggctgcataaatgtcttcttttgagaagtgtctgttcatgtccttcgcccactttttgatggggttgtttttttcttgtaaatttgtttgagttcattgtagattctggatattagccctttgtcagatgagtaggttgtgaaaattttctcccattttgtaggttgcctgttcactctgatggtagtttcttttgctgtgcagaagctctttagtttaattagatcccatttgtcaattttggcttttgttgccattgcttttggtgttttagacatgaagtccttgcccatgcctatgtcctgaatggtaatgcctaggttttcttctagggtttttatggttttaggtctaacgtttaagtctttaatccatcttgaattgatttttgtataaggtgtaaggaagggatccagtttcagctttctacatatggctagccagttttctcagcaccatttattaaatagggaatcctttccccattgcttgtttttctcaggtttgtcaaagatcagatagttgtagatatgcggcgttattcctgagggctctgttctgttccattgatctatatctctgttttggtaccagtaccatgctgttttggttactgtagccttgtagtatagtttgaagtcaggtagtgtgatgcctccggctttgttcttttggctgaggattgacttggcgatgcgggctcttttttggttccatatgaactttaaagtagttttttccaattctgtgaagaaagtcattggtagcttgatggggatggcattgaatctgtaaattaccttgggcagtatggccattttcacgatattgattcttcctacccatgagcatggaatattcttccatttgttcgtatcctcttttatttccttgagcagcagtttgtagttctccttgaagaggtccttcacatcccttgtaagttggattcctaggtattttattctctttgaagcaattgtgaatgggagttcactcatgatttggctctctgtttgtctgttgttggtgtataagaatgcttgtaatttttgtacattgattttgtatcctgagactttgctgaagttgcttatcagcttaaggagattttgggctgagacaatggggttttctagatatacaatgatgtcgtctgcaaacagggacaatttgacttcctcttttcctaattgaataccctttatttccttctcctgcctaattgccctggccagaacttccaacactatgttgaataggagtggtgagagagggcatccctgtcttgtgccagttttcaaagggaatgcttccagtttttgcccattcagtatgatattggctgtgggtttgtcatagatagctcttattattttgaaatatgtcccatcaatacctaatttattgagagtttttagcatgaagcgttgttgaattttgtcaaaggccttttctgcatctattgagataatcatgtggtttttgtctttggttctgtttatatgctggattacatttattgatttgcgtatattgaaccagccttgcatcccagggatgaagcccacttgatcatggtggataagctttttgatgttctgctggattcggtttgccagtattttattgaggatttttgcatcaatgttcatcaaggatattggtctaaaattctcttttttggttgtgtctctgcctggctttggtatcaggatgatgctggcctcaaaaaataagttagggaggattccctttttttctattgattggaatagtttcagaaggaatggtaccagttcctccttctacctctggtagaattcagctgcgaatccatctggtcctggactctttttggttggtaagctattgattattgccacaatttcagatcctgttattggtctattcagagattcagcttcttcctggtttagtcttgggagagtgtatgtgtcgaggaatttatccatttcttctagattttctagtttatttgcatagaggtgtttgtagtattctctgatggtagtttgtatttctgtgggatcagtggtgatattccctttatcattttttattgcatctatttgattcttctctctttttttctttatttgtcttgctagcggtctatcaattttgttgatcctttcaaaaaaccagctcctggattcactgattttttgaagggtttcttgtgtctctatttccttcagttctgctctgattttagttatttcttgccttctgctagcttttgaatgtgtttgctcttgcttttctggttcttttaattgtgatgttagggtgtcaattttagatcttttctgctttctcttgtgggcatttagtgctataaatttccctctacacactgctttgaatgcatcccagagattctggtatgttgtgtctttgttcttgttggtttcaaagaacatctttatttctgccttcatttcattatgtacccagtagtcattcaggagcaggttattcagtttccatgtagttgagcggttttgagtgagattcttaatcctgggttctagtttgattgcactgtggtctgagagatagtttgttataatttctgttcttttacatttgctgaggagagctttacttccaagtatgtggtctattttggaataggtgtggtgtggtgctgaaaaaaatgtatattctgttgatttggggtggagagttctgtagatgtctattaggtccgcttggtgcagagctgagttcaattcctgggtatccttgttgactttctgtcttgttgatctgtctaatgttgacagtggggtgttaaagtctcccattattaatgtgtgggagtctaagtctctttgtaggtcactcaggacttgctttatgaatctgggtgctcctgtattgggtgcatatatatttaggatagttagctcttcttgttgaattgatccctttaccattatgtaatggccttgtctcttttgatctttgttggtttaaagtctgttttatcagagactaggattgcaacccctgcctttttttgttttccatttgcttggtagatcttcctccatccttttattttgagcctatgtgtgtctctgcaggtgagataggtttcctgaatacagcacactgatgggtcttgactctttatccaatttgccagtctgtgtcttttaattggagcatttagtccatttacatttaaagttaatattgttacatgtgaatttgatcctgtcattatgatgttagctggttattttgctcgttagttgatgcagtttcttcctagtctcgatggcctttacattttggcatgattttgcagtggctggtaccggttgttcctttccatgtttagtgcttccttcaggagctcttttagggcaggcctggtggtgacaaaatctctcagcatttgcttgtctgtaaagtattttatttctccttcacttatgaagcttagtttggctggatatgaaattctgggttgaaaattcttttctttgagaatgttgaatattggcccccactctcttctggcttgtagagtttctgccgaaagatccactgttagtctgatgggcttccctttgagggtaacctgacctttctctctggctgcccttaacattttttccttcatttcaactttggtgaatctgacaattatgtgtcttggagttgctcttcttgaggaatatctttgtggcgttctctgtatttcctgaatctgaatgttggcctgccttgctagattggggaagttctcctggataatatcctgcagagtgttttccaacttggttccattctccccgtcactttcaggtacaccaatcagacgtagatttggttttttcacatagtcccatatttcttggaggctttgctcatttctttttattcttttttctctaaacttcccttctcgcttcatttcattcatttcatcttccatcgctgataccctttcttccagttgatcgcaccggctcctgaggcttctgcattcttcacgtagttctcaagccttggttttcagctccatcagctcctttaagcacttctctgtattggttattctagttatacattcttctaaatttttttcaaagttttcaacttctttgcctttggtttgaatgtcctcccatagctcagagtaatttgatcgtctgaagccttcttctctcagctcgtcaaagttattctctgtccagctttgttccgttgctggtgaggaactgcgttcctttggaggaggagaggcgctctgctttttagagtttccagtttttctgctctgttttttccccatctttgtggttttatctacgtttggtctttgatgatggtgatgtacagatgggtttttggtgtggatgtcctttctgtttgttagttttccttgtaacagacaggaccctcagctgcaggtctgttggagtactgggccctgtgaggtgtcagtctgcccctgctggggggtgcctcccagttaggctgctcgggggtcagggacccacttgaggaggcagtctgcccgttctcagatctccagctgcgtgctgggagaaccactgctctcttcaaagctgtcagacagggacatttaagtctgcagaggttactgctgtctttttgtttgtctgtgccctgcccccagaggtggagcctacagaggcaggcaggcctccttgagctgtggtgggctccacccagttcgagcttcccggctgctttggttacctaatcaagcctgggcaatggcaggcgcccctcccccagcctcgctgccgccttgcagtttgatctcagactgctgtgctagcaatcagcgagactccgtgggcgtaggaccctccgagccaggtaagggatgtaatctcctggtgcgccgttttttaagcctgtcggaaaagcgcagtattcgggtgggagtgacccgattttccaggtgccgtctgtcacccctttctttgactaggaaagggaactccctgaccccttgagcttcccgagtgaggcaatgcctcgtcctgcttcggctcgcgcacggtgcgcgcacccactgacctgcgcccactgtctggcactccctagtgagatgaacccggtacctcagatggaaatgcagaaatcacccgtcttctgcgtcgctcaacgctgggagctgtagaccggagctgttcctattcggctatcttggctcctccccctggctgtgggtttcttatagatggcttttattacattgaggtatgtcccttgtatgccgattttgctgagttttaatcataaagcgatgctggattttgtcaaatgcttttactgcatctattgagatgaccatgtgatttttgtttttaattctgtttatgtggtgtatcacatttattgacatatcacatttattggtatatgttaaactatccttgcatccctggtatgaaacccccttgattatggtgaattatctttttgatatgttgttggattcagttagctagtattttgttaaggattttagcatctatgttcatgagggatatcagtctgtagttttcttttttggttatgtcctttcctggttgtagtattagggtgattctggcttcatagaatgaattagggagggttccctctttgtcatgtggaatagtgtcaaaagggttggtaccaattcttctttgaatgtctggtggaattctgctgtggatccatctggtcctagacttttgttgttgttgttgttggtaatttaaaaattaccattttaatctcgctgcttgttattggtttgttcagggtatctaattcttcctgatttaagctaggagggttgtatttttccaggaatttatccatctcttctaggttttttagtttaaatgcaaaggtgttcatagtagccttgaatgatcttttgtatttttgtgatgtctgttgtaatatctcctgttttgtttcttattgagtttatttggattttctctcttcttttcttggttaatcttgctaacagcatatcaattttattcatattttcaaagaaccagctttgtgtttcatttatcttttttatttttttgtttcaatttcatttagttctgctctgatcttggttatttccttttgtctgctgggttttgtttgttcttgtttctctagttccttgaggtatgaccttagaatgtcagtttgtgctctttcagtctttttgatgtaggcatttaaggctatgaactttccccttagcccctcctttgctgtatcccagaggttttgataggttgtgtcactattattcagtttgaagaacttttaaatttccatcttgatttcatttttgactcaatgatcatttaggagcaggttatataatttccatgtatttgcatggttctgaaggttcctttggaatggatttccagttttattccactgtggtctgagagagtgcttgatataatttcaattttcttaaatttattgaggctcattttgtggcctattgtatggtctgtcttggagaaagttccatgcactactgaatagaatgtgtattctgcagttgttggttggaatgttctgtatatatctgttaagtccatttgttacaaggtatagtttaaatccattgtttctttgttgactttctttcttgatgacctgtctagtgctgtcagtggagtattgaagtcccccactattattgtgttgccgtctatctcatttcttacgttattagtaattattttataaatttgggagctccagtgttaggagcatatatgtttaggattgtgatgttttcctgttggacacggccttttaccattgtataatgtctctgtcttttttaactgccgttgctttaaagttggttttgtctgatataagatagctacccctgcttacttttggtgttcatttgcatgaaatatctttttctacccctttactttaaatgtatgcgagtccttatatgttagatgagtctcccgaaggcagcagatggttggttggtgatcttatccattctgctgttttgtatttttttaagtggagcatttagaccatttacattcagtgttaatattgagatgtgaagtaccattccattcctcatgctatttgttgcccatgtgccttggtttttttgtttttgcttttcaaattgtatttttgttttataggtcctgtgagctttatgctttaaagaggttccattttgatgtgtttccaggatttgattcaagatttagagctccttttagcagttcttgtagtggtgacttggtagtggtgaattttctcagcatttgtttgtatccttctttcatatatgaygcttatttttgctggatacagaattcttggctgataattgttttgatggaggaggctgaagatatggccccagtcctttctagcttgtagggtatctgctgttaatcctgataggttttcctttataggatacctggtatttttgtctcatgtttttctttataggttacctggtgatgtttttgcaatgaatttcccaggtgttctttgagcttcttgtatttggatgtctaggtttctagcaaggccagggaagttttccttgattattcccccaaatatgttttccaaacttttagatttctcttcttcctcaggaacaccaattattcttagatttggtcgtttaacataatcccagccttcttggaggctttgttcatattttcttattctttttcctttgtctttgttggattgggttaagtcaaagaccttgtcttcgagctctgaatttctttcttctacttgttcaattctattgctgagactttccagagcattttgcattactrgaagtatgtccaatgtttcctgatgttttaactgttttttctttattctatctatttccttgaatatttctcccttcacttcttgtattgatttttggatttccttgcattgggcttcacctttctctggtgcctccctaattagcttaataactaacctcctgaattctttttcaggttaatcagggatttttttcttggtttggatccattgctggtgagctagtgtgattttttggggagtgtcaaagagccttgttttgtcatattaattaccagagttggttttctggttccttctcatttgggtaggttattattaagtcttagtagttttggtgagcctgggcccttggactgtgaacttcacaagtgcttcttagtctatcccttccctccccttaggtggaacagctagagtggctagagctgggtatccccctacccttaggtcagttaggctgtgagaaaaacctaagtaatttaagctctggtaaattagtttctcctgagggcaggccttgttaagaaaactagaatgttttggtatatttaaaaattacttttctcctaccccttttggaaggatgaagagatttttctccaatatttactgtaagaacttggttgagctcctggaggtaaaactcacaaaagtgtgttgtgttttgggtgccgcggtggggggtggcgcttgataactgggccccactggagtttttcatctctcagacttgtccacactgagcctccagcaatttgtcaattacagttcagggcttccctactcctggcactggttcttgcagaggtttctgcttgtgggtttctgctctgttaagttgtgattgtttctatttgcttgtctgtctctctaattttgggggcagtagtttgccctgtgacttcacttctccaaaagacctaataagagttgctgaatttttttttttttttttttttttttttgagatggagtctcacattgttgcctgggctggagtgcagtggcacgatctcggctcccgggttcacgtggttctcctgcctcagcctcccaggtagccgggattacaggtgcccaccaccatgcccagataattttttatatttttagtagagacggggttttaccatgttggccagactggtctcaaactcctgacctcatgatccgcctgcctcaacctcccaaactgctgggattacaggcgtgagccaccacacccggctgagttgttgattttttagtttgttcagctttttacttgttagaatgaagtgatgactgccgacctccttatgtgccagactagaaactgggagtctcctatttagtcgtccttaaaaattgtaagctggacattgttggtgatgcattgtagcaattctgatttctgttacctgagagtgttgatttttgttttcactggcagctaatcagtagtcagttcccttgaacttataaagccttagttttacactttgttaggacgagtctttcagatttttcccttgatcttaggcagatccctcagtcctgggacacagtctctactcctagcatgaactgtttgtcaaagctcatgtcactgccctgtactggcaatgaagaataatcaaattctattccaaactgtaggcaaagacaacaactattaatctctactgatcaacttgactctcagccacaggtggaaaaccagtaataaaaaagggttgtctaaaggctttgagatctacccattctcctaaatatttcaaattttatttctggccagattggaccagaaggctgaatccttaggtggtatggctttgcccctatagacttccttgtattgagttgcatgttggcatctgccctcatcatatagtaaaggatgtgataagaagtcgtcagtggaaccatcctaatctcagttttatttttcataagaatgccagtgagcattccatcctacagggtcccctgtaggagaaggagccactggaagaatttctctcagattttagtgccagaaaaagctctgcttctcctgagcaactgataagtttctatctcattaatgtttggctgctgctaagctcagaagcaaagtcagtgtttaggaactcttgtaattttgagggctatcttttgctttaattccctttgtttatttaattatgtcatatttatttccatcagacccttaactgctttttctatagcaaagccaaaaaaaaaaaaaaaaaaagtcatcggaatcataaagagccaaggaagctgctatcattccaaacatttttgtccttcctcttctggatggctttcacagccagattcgaatccacgtaagactgtcatcttcaacccaaagtgaaatgactcacctgcctttctacttgattcaccaattggtagtcaagaaatcgattttcaaaaaaatcaaatttactcctaaagggcagaggttaaagatactttaaaaaattatatcctggctggtgtggtggctcacgcctgtaatcccagcactttgggaggccgaagtgggcagatcatgaggttaggagttcgagaccagcctggccaacagaccagcctggccaatatggtgaaacgccatctctactaaaaatacaaaaattagccgagcgtggtggcaggtgcctgtgatcccagctactcaggaggctgaggcaggagaattgcttgaacctgggaggcagaggttgcagtgagctgaagattgtgccattgcactccagcctgggtgacagagcgagactccaacttgaaaaaataattatatcctgattttgtgtcaataaagatacttgaatgaatgttctactggccctgaaggcgagttcaaggagaacttccaaatcattttagtgtggctgcagtggttcctgctgataatcccagcattttgggaggctgggacaggaggattgcttgaggccaggagtttgagaccagcttgaggaacatagcgggaccctgtctctggaaaaaaaaaaaaaaagttgggcgtggtggtgcatgcctgtagccccatctacttgggaggctgaagtgggaggatcacttgagcccaaaaaggctgaagctgcagtgagctaggatcacgctactgcattccagcctgggcaacgaagccagaccctgcctcaaaaaacaaaaacagaaatgaaaaaagcaaaacattttggaccacaggatcatcactggaaggagcaaatagattctcaaggtaatatttctttgacagagagagccatcattggaacatttggttatctggtatgtttgaattaatgtagaatcactcgcagctctcgtctttacaacacagggcaactgtcagggttagcgaggcatttgttgtcattccctctctaggtggagccagggcgtgtgatgggagcayggggcctgagctgcagcataagtttcctctgattttcaacctggaagacgataccgcagaagctgtgcccctagaaagaggtggtgcggagtaccaggctgtgctgcccgaggtcagaaaggttcttgcagacgtcctccaagacaytgccaaygacaacatctccagcgcagattacactcaggacccttcagtaactccctgctgtaatccctaccaaattgcctgccgctgtcaagccgcataacagaccaatttttattccacraggaggagtacctggaaattaggcaagtttgcttccaaatttcatttttaccctctttacaaacacacgctttagtttagtcttggagtttagttttggagttagccttgcatatcccttctgtatcctgtccctcctccacgccgacccgagagcagctgagctgcgctggctctgggcagggagtgtgccttaatgggaagcacacgggctttggagtcaggcacaggtgccagctccagcttttgaacttgggcaattgtttaacctaacctgcaagttgattttgagggttaaataaaggcatacatgaaaatgcctggcaaattacctgacacagagcagacattcaatacattttagtttccttgtttctctggttcccagtttctctggtcattttggtgtaaatccattctaattagtatttagggcagagcttctctctcttttctctttttttccttccacaaaccagtgtactcactggtctccatctttaatatgcaaacaaatcacctgggatcttgtgagaatccggattccgtctcagtagggctcgagtagatcctgaaatcctacatttctatcaaacaatgccttgaggagcacagatttagaccaaagttaggtcgttttccagatctcagagcagacgagtccatggataagtctgtggcccaatccccttcctctccttttaagggtgaaatgactgcatttaaaagaagttaaagagttcctcctgtcccctataaccacaaggaaacaaaaaaatatataaaaacctcaaaaatgcattgccatgattttattattagtgtccaaaatgggactcccaagtaataaatgatttattccagccacagccaaaaaagactttgcctggctaaaagagtctctctctaagtatgtaatatacaagaaatacaattcaaagagatgttcctataagtacattttttacacggcatatatttaaaaaggakgccccttttaatataaaattccggttatataccaatatggttaattagcatttacactatagtttgaacgtattttaaatagcatgatgtgtatacaatgtctcccgcgcccattggcaaccagggtcgtgggaagcttggtgaggagttaaccaggtcctgtggtttaagcagtggagcacccgggattcctgcccccctttctgctcacacaattgcactccattcttccgccttccttgttttctccaaaaccacctgataggggggatgtcctgatttctgaggtgtgcttctcatcatgactgcttcgttttgcccttctgatttccacggcacaagattatctaccaaaatcaaaacagaatggccttactcttctcaggaagaggctggtaggcaggtgcattatcaacaggtctgtgcccatgcagagtgagcagggagaggctgggcactgtggaatttttctgtctgaactcgctcatggccacagaatggtcacccagcttatttaggtgtagacaagtatgacacagttctagaaaatactgactataaaaatgtctctgtgtgtgtgtgtatgtatttatatgtatatgtatatatttttaaaaggctcatcttacttgtaaacatggactgctcaatcactattaaaaagtcagtttaggctgggcgcggtggctcacgcctgtaatcccagaactttgggaggctgaggtgggtggatcactaggtcaggagtttgagaccagcctggccaacatggtgaaaccccatcgctactaaaaaatacaaaaattagccgggcatgstggcgctcacctgtaatcccagctactcgggaggctgaggcaggagagaatcgcttgaaccggggaggtggaggctgcagtgagccgagatcgcaccactgcactccagcctgggygatggagcaagactccatctcaaaaaaaaaaaagtcagtttaggctgggcgcagtggctcacacctgtaatcccagcactttaggaggctgaggggggtgatcacctgaggtcaggagtttgagaccagcctggccaacatggtgaaatcctgtctctactaaaaatacaaaatttagctgggcatggtagcatgcctgaaaccccagctacttgggaggctgaggcactagaatcacttgaacctaggaggtggaggttgcagtgagtggagatcacgccaacacattctagcctgagggacagagtgagactctatcatctcaaaaaaaaaaaaaaaaaaaaaaagggaaggtcagtttatacccttgggcctgatttcctgactcttgctcacaagattgggactagtctcacaaaatacagagacttgtacaggttggcttgttcctgaaacaaaagcttctcatcctcccgaatgtagcagctttctaaggcaccagaaatgatcaagtctcttttctttcactgctctcagagcaaaagtaaatcccaaggaggcaagcgtgatcctacgcagggaagtgtcagtatgtgttctgaaaagatcactagtgatgacccgcgttcttaaggcagcggctcacagagctcctgtagcagactactcaggcaagcctatgtttgttcgtcactacaagagaggcgattttaaccaagctgagactccaagagccttttgtggtcctagaagattttaaggaatgtgagtaaagatgtgaattctgcacagagatttgcaataggcatgacaattcagaataaggagacagagaggaagttccctagcatccctcgctgaacatttctgccaattcaggcatgactgagatgggccatattgatagagcatcccaggagcatgcatgcctctggtccttacatggtgagatggagaagcctgcctgctactgagacagtgccttagtgggagcactgcccctcatcaccatctacctgcaggctggagggcagactgagaggttggtggctgccacgacacagccctgcacacaggggctgcytgacactcacaagggtctaacacctgttctagggaccttgttcagtgaccactctcactggcaggaagtatttcttgcgtataaataagaattcctgatgcaatttcaaccaactttcactcatttggtccttaggagggagaagaaacaactggctcatgcccagcttcctggcactgaatgggcacacaggcctcaggacaaactttcttactggttcttcaattaagcacctccccttttcctttttaccccaaataaatgatctgcacaaggtacctattattttatacaggttctttggcaaggaactacctcctagatactaatatccacattaccccaattctgtaactataagaggttgcaaggcttactgcgattacaattaagaatctaataatattttatagtagttacagacttttaccaaaattagtgaaacggaacctagtgagtgtctggatgtggtaaaccctgacagagtagaatggtcacatttgtccccacggtgtctgacctagagtgctctggatcctggaagcctcgacttcaggtaaataaccaccgcctcttgagggtgcagaagaacgccctttaaggccagttggggccatgagaacccaaaggtaaaacaactggtttatagttaggcagcatgccaacagaggttttgaagtttataattagtatttttaagaacaactgctctccgccactgagatataaacttcacttgccagccacgtctctgacaacctgcctattgaaagccagaaatgtaaaagctcacgctgcgaccgacccgcagagccgatgtgggaaatcacaaaacaacagccccagccctgcatgcagggccccaccgcagctttgttttctaagccaaatgtgctcactagagggttccacggatctgcgggagaaagaagccagacctgcactccatccttttacaattggaagctcaatggacacaaaacaatgatcaggagaagtttccataacaaagcctaatggacattgtttcagtgcccaagtggcagctcctctctggctctaggagctgatgctccaagtcttggcccaaacactacttccggccgggtgcggcggttcacgcctgtaatcccagcactttgggaggccgagacgagtggatcacttgaggtcaggagtttgagaccagcgtgaccaacatggtgaaaccccgtctctactaaaaatacaaaatattagttgggcatggtggcgcacatctgtaattgcagctactcgggaggctgaggcaggagaattgcttgaacccaggaggcagaggctgcagcgagccgagatcacaccactgcactccagcctgggtgacagagcaagactccgtctcaaaaacaaaacaaaacaaatcagtacttccatctcgaaatgatttcaggttgactatctgggatgttttgactgaagctcacaagagcggtctatatgttactccagatgggagcctgaagaatcagcagttaaggaagccccagcaggctctcaggagggaatcttgtcttcagttccaggtgatggaagaagccacgcccagcactcagccagccccgagggccctagctgtgggaacagcctgagcaggttgctgggaaacccagctaaaggtgctcgggcaagctcctgccctgcacctgctgccctccacagagcacacaattgcttttcttttctttttgagatagagtctcactctttcacctaggctggagtgcagtggcacaatcatagctcactgcagcctcgacctcccaggctcaggtgatcctcccatctcagcgtcccgaatagctgggactacaggcacgtgacaccacacccggctaattttttcttttctttttttttttttttggtggagatggggttttgctgtgttgcccaggctggtctctaactcctgggctcaagcaatcctccagcctcggcctcccaaagtgctgggattacaggtgtgagccaccgcacccggccacttgtttcttaatgagtgtctgcaactgctggggaggtgcgggtctgccggccagagctgcaggtaagtgagggtcaagctggttcacagagtgcagcaactcagctcagagtcctgaacacacagcccagccctctgaaaccatcccctccagcacaaggaaggcagcattctgcaaacgcatccatgggagcctcaggaaaataagttttagacaagtcacgtgttcctaccttccaggcagcaaagtcagtgctacagaagcaaagtaagggatcgcaggcctctggctggagggaggccaccaagactccctggattagtattcggtgactctaatgccatcagggtttagctcgacacctaaagcctactctgtaggattcgaagcacacagtacaacaaatatcctatggctttccaaatactagagcagagaattagttgttatagattagaaaacagggaaagggactctgcctctcgtatgaggcgaaggtttccttctaagcacacagactgagccgcccagttacgggttcctaatgctcacaggaggaaactcattctcatcatcaagacacactggtcccgtcgcaaactcatgttcaggaataacttctcctcgcagcgccccgccgtcctcagaataacctggaaaccaagaaagagacatgaaacaagcactggggatctgcttttatgccatgacctggcgggtggggagcgggggctcaaataaagggcaaaggaagcaaaggggctgtctgtcttccccctggaggtactgtgcctaggacaagtcataatcctcaccatctgccatctttaagcctgacctgcctttccacttcagatgcctgaggcatcctacctctttgaatttttctttgttgaggtagggtctcagtatgttgcccaggctggtctcgaactcctgagcctaagggatccttctgcctcaatttaacttcctgagtggctaggactacaggctctttggaaattttagtttagtttttattttttgaaacagagtctcactctttcacccaggctggagtgcagtggtatgatctcagctcactgcaatctccgcctctctggttcaagcaattctcctgcctcagcctccggagtagctgggattgcaagtgtgtgccaacatgcccagctaatttttctattttttaagtagagatggggtttcaccatgttggctaggctggtctcaaacccctggcctccagtgatccgctggcctcagcctcccaaagtgctgggattacaggcgtgagccaatgtgcctggcctcattggaatttttgaagaggcaaagggttaacaccacttgttaggaaaaagaccgtatcgtgtgatgccttgccaggttgagggtcccaggtttaaaggctattaccatggcctcacctgtgagaaaataaaaaattcaaggagagcactccacccccaggtaacagtgaagggggaaggggagggagggcactccacccccaggtaacagtgaagggggaaggggagggagcgtgcagggagaaggggagggaggtcactgttggagatgctcccctgttggccccgtgtccacccacctggcaccgtggaggctgaagatgcacttggtctggctacggtcgctgcataagactgaggtaaggaaggtctgaggtcattttctttattctcttctgttgttcctgagccaagcaagctacttgtgacaatcaagaggaggtgaaagaaaaaagaaatcatcatatatctaggacaccttccaaaggaaaagcatgaagaagcctgtgctcagctctgtgggttatttatttatttttgaggcagggtcttgctctattgcccaggctggagtgcagtggcgcaatctcggctcactgcaacctccgcctcctgggttcaagcgattctcctgcctcagcctcccgagtagctgcgactacaggcacccaccacagcgcctggctaatttttgtatttttagtagagactgggtttcaccatgttggccaggctggtctcgaactcctgacctcaggtgatccgcccgccaactctgtgggtttaaattgtagacctacccacacgctgctgggccaggatgagctgaagtgacctgcaactgccaggggcagtcacacaccgtcaaaatggcctctttctcttacattggctagacaaagattagtcctctgctcttcccagtacacacaggtgaggacatgctagcaaggagagcagccatcggtggggggcggtggcagctctggtgccctggccacagcaggagagctcagtctgtgcctgttcacagaaggcatgagtgcttttcttttgttttcttttcttttttgagacagggtctcactctgttgcccaggctgcagtgcagtggtgtgaccacagcttactgcagtcttgaccttcctgggctcaggtgatccccccacctctgcctcccaagtagctgggactacaaggcatgtgccaccatgcctggctaatttttatattttttctttttgtaaggatggggtttcaccatgtttctcaggctggtctcaaactcctgagctcaagccatccgccctccttggcctcccaaagtattgggattacaggcgtgagtcaacatgactggtagagcacttttcaattccatgcagggaataggtttttttttttttttattttgagacagggtctcactctgttgtccaggctggagtgcaatggtgtgatcatggctcactgcctcaacctctccaggctcaggtgattctcccacctcagcctcctgagtagctgggactacaggtgtgtgccaccacaaccggctaatttttgtatttgtttttggtatagatggggtttcaccatgttgcccaggctggtcttgaacacctggactcaagccatccacccgcttcggcctcccaaagtgccgggattacaggtgtgagccgccacacctggtggcagggaatatttttgaacacccactgtgagctcagggctgtgttaggagcataggctgagggggagaccatcttgtgtgttattaatcctggcacttttccagatgattaccacatgctgagggcacctgacacagagcccggtgcagagcacttgcccactagaggtttgccactgagactgccagtgaagaacaaatcaatgcaagggcactgaagcttgtcgttcttggcgaagggacaactctacacgaccagctctcgaaaggctgtcttttgaaaagcagtctcttcacctgtgggttttgattaagacacactctcctccatcctgaggatccaaattgtacatataaaggtgtccactggatgacgcaactagcagccgtggcaacttctggatcctaagggccaaggaaaacataaaccgtgatgacaacgaagatgggcgatggattcgcttccaatgacaaagcccccctcaccctagctgtcaccagattctgcctttgacaaacccttagcccactgatctggtctgggcttctggctattcctttgcattctggccttgggatctactttcaggattatttcttgtctttgaacgtgacagtgtggatgaggcaagtgagtgtagatgctgcgaccctgcgagaagcaatagctagtgaacacattagctccctacatgggacgcagtctccctctgacatgtgtctctgcccttaaccaagacagaaagggggtaaatggaggattggcttactgtctttgctggttagttttgtgaaattttaaaaatgttcaacttttgaataaactcctttaaacttcttaaaacatctgtcagccccataggagtccgaacctagaaaacagatctggaggctttttacataattacataaaaataagaattgtttttaagacagtgtcattataaccagaaggctaaaattcccatgccaacttctggctgccccctgagaatccgtattgaagtcagataggaaaagcaggggtttgattccgctcacccttcctttggggcaagttttctttttcttttttgagatggagtcttgctctgtcgcccaggctggagtgcagtggcatgatctcggctcactgcaacctccgcctcctgggttcaagcgattctcctgccccaacctcccaagtagctgggactacaggcacacaccaccatacccggctaatttttgtatttttagta

SEQ ID NO: 95422 - DNA, 48820 bp, Homo sapiens
ggtgggcaggggtttttatttattttggacagcgtcatatccctagaacctggagccatgaccggcacacaacaggcacatgataaaaattggtcaaatgaatgaatggatgaatgaatgaatatacaaactccttccaaacttctcctccttcagaggaagtggtgagggaggcttctgtgttttccatttatagacagtaaagaggttttggaaaaatacacaagggagcctcagagactttcttttggggctttaggactggctacccatatcttatcactcaagccagtttttcctgaggtgtccccccaaccatcctagaactaaatcatacagaccactagatggcactgttcaccaagaatctcgggattcttagccacgcccctctcaccctaagcccaaagcctttgaatccaccttcttcccaggggtgactgattctagagaatgattaccactccctgcaccaccgctagactagaaagaaacctaaagtcgtacagcacgttccaacaagccatgcccagccaggagcacaggctaactctctgcttgggagcaaaggacgtttttgaatatttctagatgtacccttggtaaatgtaggcaaagtgctggtgccctttgaagagctgcaggactccacactctcccccttgtacttggcccgtggccctcttggcacaattctgcctctatctcttcaccccttgctcctctgtcccttcataggatgaagcacaggttaagatgccaattctatttccagccttgagccaaagcagtccaagagacagcgtgacaggcaacctgggcacccagtggaagggacagaatacaaactacacctgcatcaaaaactgtcctagggcctttggcaacttactcgacagtctccactttggcatatgcagctgcctgatggggataaacattcctagaccagatagatgtggttagcgtcacatgagaagatctatgacgctccaaaccaagctttctataaagcttggtcttctattttcaagtatcgcctataattatattctaaaatttaaggcagggtgattggctgacctgctgaacccgtctctgtgttcttgaccagtgcgaagatgcctcggtgaacaaaaacaccttgattgaacctctctgcactggcatgggtaacagactctcagctccaaggacattagcaaaagcacttgtagaaagcaactgtcttcgtgatcatcagccaatcagcaagcatttattgagaacctgtaattcaccttggtgttttaggaaggctattctggaggcaaaaataagacaggtgaggggagagaatgaagattaagacatcaattcactctttcatgaaataacatttttcctgactcttgggaaggaatatataagtcaaggaatattagaagtgttgttagtttttgctccctgtctctccccttttaatcaataaatccagaaataatggttccatttgggggacaagggcacatgatagggcctcttcattcactgcagccatgctatctcacacacactgtctataattagaaacagaaaacccagttgcacctgctgctcggccagacttctggctggggcttcctgcttgccaatcagttcgatcatcycctttcccagaaatcaccccacagcccaacccctcctcttctaccctggcaccatagggctgactccttgagcttcctccacgtactgacacatcgcccttccctccctctccctcttggctccattgtcccagggcccttcctcctttaccctttctcaaagggctaccatacactggtccattagagttcaactcgttctcagttcatgttctgagtgttgccccatagcagaaaagagaaaggagattatttcctgtaacttgattttataaaaatagaatggactttataaaaagaagaataggacaggagtggtgtttgttcacctagtagttactttaattrtagatggttgggtgccatgaatgaccatatggggtgacaggagtgttgcatcagacaggatgtctcatttccaccttcccctgtgaatgccctgtgcatgccctaatcagcattttaaaattacaacctgattgttatacaaataagaagtctctccattagatgaactgtggcctgcaattttgtattaccaaacatgtttttaattcccagagcccagctttattttcccagattttgctgactggtaagtaacttactagttacttacgagtaagttttcctagaaataatggagttttttgtttgtttgtttgttttgtttttcagggaaaagatagacatttaggaatttcagttgaaagaaagagaaaaggccaaaatcttattcccactggaacaaagcattgtcccctgccccacctaccccattatcttttgctgatgttatttagtagtgaaattgctgttgcaagaacttgtaagacttaggttgcccataagcccaacattcaaatcaagagtgtcctctcccacagaacccagaactagaatgttaaaaaagaaaaaccagcctgacattaaatggattcagcacctcttaagttatttataaccttgcccttggctttttatatgaatggacttctgggaaattttttgagggtggagctcttcaaagtggctgcttacacctctaacagaaatcacaaaccagccctccacaaaccacatccagctagctgatgtatttagtttagcttatgaggtactttttgaaaataagaattagttttcatcattttttaaatttacctacaaatacaggtttttaataaaataggcacagatttatataaaaatacagacttacatattgtcttgggaaaaatgaaatcagatgaggcagccctgagatgttatttccacatggctggtgccataatggaccattagcctggaaagaaacatataagggggaccattcacaggaaaggctgaggctgggaaggtgaccatttttctcccgtggccatagctctagatccaaaccttgattccagtaagcatgcagttctgctgctgatttaaagtgtctgaaatgaaatacaacttcctgaatacctgactgaagatctagtttctaaaagcaacccaatgggcttccccttcccaaccatgaaatcagctttgactcttccctcttcttccctgcccctcccccttccccatcagttgccatgcctgtcatttagtccctcaagactctactgagaataaagtagccaccagctacatgaacacttaaaatgtggctcatgtgaactgagatatggtgtaagtgaaaaatacacaccggatattcaatatttagttctaaaaaaaaattaaaatctgaggccaggcgtggtggctcacgcctgtaatcccagcactttgggaggctgaggcaggtggatcatgaggtcaggagtgtgagaccagcctgaccaacatggtgaaatcccgtctgtattaaaaatacaaaaattagctgggcatggtggcgggggcctgaagtcccagctgcttgggaggctgaggcaggagaatcgcttgaacccgggatggagaggttgcagtgagcctggtgacagagcaagactctgtctcaaaaaaaaaaaaaattaaaacctgaattaactgattagtaactttatattgattatctttatattgaaatgatatttttgacacattggattaaataaatgatattattccaattaatttgcctatttctacctttttaaatgtatcttctagaaaactgaaatttacaatgtggagttcacatttggggctcattttatctactggacagcaatgcctgaaaacaactctatgatttggtctaattttctggccttgttttcatcactttagcctagtctctcctgtccctttacttccagaatttcacattagtcccctaaagacttctagatcttttcccacttctaatttgttctgcacaccctggccaagtttatctgacaaagacactgcttttttatcatgaaacactcctgctcaaaaactaacaccagctcccaggtctatcccataaagtccaaactcttaataacaaactgataataacagcttacactttaaaaactttatggtacacttcatgtaattctccaaacaacgtagcacctagcatgccagattctaggttttctaaccaggacagaaatgactgcagcatttgacagagctggaaggtggggggaagcacctttgatctgaaaggttacaaaaatggcacaaagtatctaaacagcagttccattcacttctgatagtttatacaacacctcacaatcagccaaagagcaataacatctgtgaatctatgagctgaactattttttacatcagtggagagaaaaaaataataaagttgagaaaagaaactgttacatttgcatctcagaaaacacaaaccggaaatccaaccagaaaggtttaggtgaaatagtgccctttgttcatctattgtaggtccaaggttaaatatatatatatatacacatacataaaagtagctttgtcataaactgggtattaaaagtgggaaatggggaaaaccgcaattacttttgcaccaacctaataaatttgaattatgctgatttgagagactgtcatataacaataactaaaatatcatctcaaaatttgaaaaaatgaattaaaaatccatcagcagttatacaatccaaagctggcagagctcctgcttcataaaccgtattgacagtaattccgcatgggaacatgtacagtactcagcttttaaaaagagattctttgttaaggtttatctcgaattacgtgagttttgaattgtgctatatcttcaagacgttacccctttcataaactacactgccctacacacactttcatttttttcagctgcggatcggataggtcttgtttagatactttgtgccatttttgtaacttttcagatcaaaggtgcttccccccaccttccagctccgtcaaatgctgcagtcatttctgtcctggttagaaaacctagaatctcgcatgctaggtgctacgttgtttttgcaaattactgtttagcagttatttagtgcacaggtcttgaaagcagacatgcagacattctaccatttactgttactttagacaaattgtttagctttggagcttcagttgcctcttctgtatattgagcacaatcgtattttccacacaagttttataagaattcaagatgacatacatagtacggcgcgcttggcaagtagtgagggttctcaaccgctcggcaatggataagataacttgctatctctctggctgaggcagccccatttcaggagcttctctcaatgcggcttgaggactcgacaaaagggtggggctttggagtctaacgctctctgctaaactctgtaagtttaataggcagagttacacatggcaaggggtctgggcggggtgggaactagcgcgtcctcctgtcacccttgcggcggccccgacgcagttgccggactgaaaccagcagatctggccccagccgcattccttcttccctctccctcccagctgggmggctccggcaatgaaaacaccgccacgtgggcctgctgcctttgcgtcacgcgcctttgtccaatggagagccgcgttacgaagccaggggcgggtcgccagccgggcgggtccgcccacagctgccacggattggccaaggggggcggtgcccgccagccgtggcttgggctcgtggccaatggtggccggaggcaggggccccgccctatcaggtgctctggtcctcgggaccagctggaggggcgagaaggggcggggcgaagccggggacgcggcggggacggggcggggtaggggcggggtggggacggggcggggtaggggcggggtggggacggggcggggtaggggcggggcaggaccggcgacccggcccgtggagccggcgcgggcgggctgctgaggtggctgtcgccggctccgagctgcggcttcccgggccgagcccccgatggaggccgaggccgcggacgctcccccgggcggggttgagtcggcgctcagctgcttctctttcaaccaggactgcacgtaagctgcgactcggcccctgccagggaggtgggggacagagtgtcaggacccaggggtgtcgtcctgagagcagcttgtggcttccgcctcgaggcggcctcggcgggagggccggtgtctgcttcggacgcattgggatcttgttatccccgtaccccttcagtggggtttgccgcaccccccaccccaccccactcccagtgtcctcccagagcgacaaggttgggccaagggtgaaagcagggagttcgcaaagggagtggtggggctgcgggggccacggaatatggggggagcagggcggtgggaaagccagtgaccaaagtgggtgtctggggaagagagacagtggccaaaagaaagagatgagaaaggagaggaagttgcaagttgacccaggactctgtagttggggcccaggaagatgagagtacaggaaaaactttcccatttgtccttgagcatctcaacgtggcatctgggcagggcctcggacaaagaggcagcctatccctgcggccaggccagcccctgtcccatccccgacgcagggcatcgtgcctgcccgctctggatggaagaaacctttggatttctttggctgttttcacatcgcccacccagccaggcaggatctccttctcggagtccaagactcttttcccgggcgcagactgctttctctccaggaaacaggagctccaccctgttgtttttgagtggatttttaatgttttacttcgatgttcacatttgggctttgagagggagctgggctgaagtgtgtttcaggcatctgcaggattctgtgacttacaggcaaacgcctgttyccctattttcatggaagcgagccctggggaccatatggaatcatctttttggaatgtgcaccctgagcatcaggcggggatgaccgattcccagtttcccacttcctgctgtaccagtttctgtgccttggctgctggtgactgagctacgctaatattgatccttcagtggtgtaattaaggccattatgtaccattagccaccctggcttccattccctttatgtttctgtttaaaaacacccggtgctgaacaatatgcctttgtttgaaaaacccatatgtgtaatcatgtaatcgagtagctctacagcttggttatttgagtgactttcaagtttttcttgaccacaatccacaatacgaaatatgtattgcaacatcacccaatacccataacacatacactattcacaaaatatcatgtgcaattttctgtgtcctttttttctaagctgcttgtgactcactgaattgcgttttaggatccactcatgagttgagacctgcagtttataaaaatgctggtatagataaaatcctgatgttctgtaagaaacattttgcaagagggcatggctgttgaaatgcctgggtgatgttttccttcccaattgaacacaagttaagaaagggggttagtttgcttgtaagtagtaaatgttctaaattctgctttgtaacatcattagatttgacaaaaaagggtgttaatttatactctagccattaaataacgcaaagtcccagctttctacagaaattgaataagaatgttattttcaaaacggtagggtgctttgaaagttaatttccttactccctactgttagttttattttcttggatggaagctctgctgggcagctttgccttgcctataaataaaagttcttgtcacagtcagttgctttgagccacagagggtatgacaytggattttaaaataagtcaagccccttactgaatacatttaggtgtattgccatgtctttttctataaatgtaggctgaatttgggatccagtatttccaaagaaggtaggtgaaaacagcaaacccttaccagtcccctacgctcatacttcgtgattggtacttgtgctatacactttgggtacttttttttttttttttttttgagacagtcttgctctgtcacccaggctggagtgcagtggtgtggtcttggctcagtgcagcctctgcctcccagggttcaagcgattctcctgtctcagcctctcaagtagctaggattacaaacgtgtaccaccacactcagctaattttttgtatttttagtagagacggggttttgccacattgcccagcttggtcttgaactcctgacctcaagtgatccacccacctcagcctcccaaaatgctgggattacagatgtgacacactatgcccagcctactttgggtacattttaaatttgattaatgataaatatttgtcccaagctctgtttccatgagtggtgattagaattttgtttctacagaaagactttatggatgaaataaggtctaagtctaaattccttgattcagagtcttttgtggccattgatcaatcacgtaaaacatcacataaaacatcactctgygattttctcatatgtagaattcttctggtccaggagcagggcttatgtttgaaaattactttaaattgctgtcactttgcattaatgttataagactctagttacagtatttctttccttacttgcaaactttacaaacctcatttcgcagccaaacacatctatatttatgtgaaaaagtttatgtgaagaaagtttaaaaacaataacactacaaaatacattttgaagttttaagatgctctgggcttacttttccagttgctgtttgtcatcatgaatacctcagtctaggtactaaatgccagttctaagtgcacagctgcaaatgtctaacccaccagtttagctacttagcaggttggagggctgcgagacgtcaccagctaccttgtggattaaaagtttactgtagttgccctatccctgtgtcccagggaagaacaaatgtctgggtagggaaaaaaaattccagggaaaatcatgtgaccttctcttttttaggctagtgaaacaagagccttggccatccaggcttgtaatagtaagttgcttattttagtatatgcttccctgtaaagagtgaatttcaccttgccttccagagaagcacacttctgtgagtgtgctccgggtcagattctgttcatcacttaggtgcggagggcacagctggaaagagctgggtgaggattcccagctgctgaacaaagttgactttgatgtttactttcaacacaaggccaagaaaatctggattcacgtcctgtctttatctcctcattgaaaaatgaaaaattaagagaaccagattttttttaagaggcactttgattgtcctagataaatgtttagtttgtattttgtttgttggttgtgatgattgctttgtaggatatagtagaaagcagagttctccaacttgggctgctcattagaatacttgaacttcaaatccaattaaacttcccagctgagtttaatatacatccaggtgtgagagctactagtatgaagtatcaggacatttttctggaaactgatgaaaggaagcatctattaaattttacctactaatgacctactatgcctactttgaaagtgtatttcttagaccaggcatggtggctgatgcctaagcactttgggaggccgaggcaggtggattacttgaggccaggagttcaagaccagcctagtcaacatggtgaaaccctgtctctactaaaaatacaaaaattagcctggcgtggtggtgcatgcctgtaatcctcactgctcgggaggctgaggcaggagaattgcttgaacccaggaggcggaggttggagtgagctgtgatggcaccactgcactccagcccgggtgacagagcgagactccctctcaaaaaaaaaaaaaaaaaggaaaagaaaagcaaagcatgtttcttcttataagcaacaaacaaataaagttatgaaggaaagaaaaactgatttatctggtaaagtgcctctcagacaacaagaaggccccctcgttgtgttggaggtagagctttcagctattatgaatattcttaaacattcaatttttcctgttatctgcccagtgggaaaaacatgtctgctagatttgacattttgttggatgacagagctcatgcagtttcatkccccttgatcatttcacttttttttttaagttgcctttgactttttcttcttttcttttgctcttcctgcctgtcaagacatgcgtcaccatttaggaagttaccaaggatctaagctcctgcagatgcttgtttactgtacccctgaggctagggggcaaaaggcatctatttgcagacagatctgttgttagaatacctgtcgttattcccatgctgtcattatcctccacagatccctagcaaytggaactaaagccgggtataagctgttttctctgagttctgtggagcagctggatcaagtccacggaagcagtaagtgtgtgtgagagagacctcagggatctgcaggagaaccagagcctccttctaggctttaatctgcggtgctaccaagctgcctatttttcccttccttagccatcaaacttagggagtcaagatttttagatttaaatataaatcgttgccactacttgctttaaaccacaagcacttagatctggcaacagtttaagtaacattttctttttatagaagaaattatttgtgtgaaatcatattattgagactttttcacatgcttatatgcacagtcattaatttttataactgtcaaacctaaaggacacttgtgacattttctttctttctttttttgagatggagtcttgctctatcacccaggctggagtgcagtggcacgatcttggctcactgcaacctccacctcctgggttcaagtgattctcctgcctcagcctcccaagtagatgagattacaggcacatgccaccaaacccagctaatttttgtatttttagtagagacggggtttcaccacgttggccaggctggtctccaactcctgacttygagttatctgcccattttggcctcccaaagtcctgagattacaggcgtgagccacctcacccagccacctgtgacttatttttgccattatattggcaccataagatactgataacattgattcagttttggaagtatttgtttgaagaaggcaacggtatcctatttacatagcccatgtcaatgatgttgaagcatgtctagtgaacactgtaaataattcactagaaatgtgacttccttattttgtcagggtgatggtttatgccatcataatagcgaacaatatacaacctttcagtttcctggaaaaaaagtggttcagtaaataatattttgggctcctactttatttgtaagatgttattgttattacaccatttttgtgaattttttgctctatgtctgtcccacattgttccctgtgggccttttccaagtggaagaaaggcacacatatgaaaagaatgtgctcagaaagataccaaagccgtaacctttgtgctcaggagggtcattaactaacttcttcctgagtacagaagtactttcctcgtcataatactgatgtccagatggttttcagcaggaaagagatccagggagcacagcaagatagggggtggggggagtacagatttaactgtgttactgtcccctcccatattggcacccctctagcaggacaagaagaattctgaagcagaagttcccaactgagaagtcacgcctttgaaatctctcagggaaagggtagatgaaaattgttcaaatattccaaacatgtttgacagagcaaacagtggagccctagggtctggaggggagattctgccactcagacagcatcagaggcagctgtctgcctttgctctgacttgcagtctagtcactagtgttttctttttcttttcttgagacggagtcttgcttgtcgcccaggctggagtgcagtgttgtgatctcggctcactgcaatctcttcctcctgggttcaggtgattctcatgcctcagcctcccgagtagctgagattacaggtgtgcaccaccatacctggctaattttwaaaatatttttagtagagatggggtttcgccatgttggccaggctggtcttgaactcctggcctcaagtgattctcctgcctcagcctcccaaagtgctgggattactaggcgtgagccgccatgccaggccactagtgttttctttactttagatatttggaaaggactctgaaagtgctccctgggagagggtaaaaagccacctggcagggtggggggcatggtggatcactgtcaatgcaagctcagagagggcgcctggccggcaagacccggagaacctttggaacctggcctgcgccgggcccagtgtcatggaggctggaatccttcttggaagtgatcratccatgtaacctcccggctgcttttcctcccagatgaaatcccggacgtctacatcgtggagcgcctcttctccagcagcctggtggtggtagtcagtcacacaaaaccacggcagatgaacgtgtatcacttcaagaaaggcacagagatctgtaattacagctactccagcaacatcttgtccataaggctgaaccggcaagtaagtggggaaatccctcagggtttcaaagcttctgctaaygggagccaaacaaaaagatggacrtctttcaagatcaatgtctgtaaaacaagcttccaattctaatragaatgttaacactcaggccccgtgtcccgggggtattgtaaacagagtctactccaggtgctggttgtaacgttgttttccctagacctctggctcatgtttccagaacrttggtccctgactggtaggctgcaccctctccctagggtacagattgggcaccgcagggatgggtcagagctctggcttggacagtcccatgagccaccgcaagagcaccttaaatcagaggagcgactcttctggttttgccctagatagtgtcattcattgcagatgttggggcaataccactgagcaggagatgcctgagagtgaagtgggggctccctgggtcaggaaagctgcccttctcccaccacgtcctcagctctcctggaaggtctgctattcagccttgggttctcatttttctttttcccagctaacccttgaagactttttgtttttttttgtagcattttctttgttgaaggattattctgatctcaaataggcaatatgttctcttttaaaatataaattcttattcagtaagtattgggggtgttagcagatttccttttgaattgctgggttttcattttgggttgttgtttctgtttttgagacagggtcttgcyctattgcccaggctggaatgcagtggcacaatcttggctcactgcagcctccatctcccaggctcaaacaatcctcccacctcaacctcctgagtagctgggactacaggtgggcaccaccacgcccagctaatttttctgtatttttttatattgccagagtgtattcgtctattctcacattactctaaagaactaccggagattgggtaatttataaagaaaataggtttcactgggtcaaggttctgcaggctgtacaggaagcacggcagcatctgcttctggggagggctcagggagctttgattcatggcggaaggcaaagcgggagcaggcgtcttacgtggcaggagcaggaccaagagacgggtggggggtactacccactattaaacaaccaggtctcgtgagaactcactcactctatggtgggggatggtactaaaccattcataagaactctgccaccttcctccaacaytgaagattacaattcgacatgagatttggggagggacactgatctgaatcatattacagtgtttccccatgttgcccagtctggtctcaaactcctgggctcaaggatcctccttggcctcgcagagtgctggaattacaggcatgagccaccacgcttggccaaattactgtgaaggcaggsactgtgctggtgtgttcaccattatacgacctggtagaaaaggcagtgcttggtagatacgtgctcataaatatctgtttcctgactgactgttaaataagtaaataaacaaagagattctttatgtgaccatgcagatttatctattcaattaagtattcccagagcggttgctgcattcattgaggacaatgttttcttctgtctttgtctaaactcttaagtactaattaattttttttaacaaatgagacaaataaatgctttttaaatttatgagaaggaagggattgtttctttgaattgatcaactctttcaaatgaaaatccacttaagtccacctaaagcagtgcggtgaaaaatagctggagaaagagaagtgggaccttttaagtagggagtagcaggagtaagaaagaaaagaaacctgcattcttggcaagggagggaaaggcagtttgagagttttctgattgaaggcttttagatgaaattcttgactcaggtgttttcactgaaatctgttggtagcagattaagtttcgctgctaaactttttatccttgcatatagtagtaatccgtatacaaggttaaatgtctgtttttggcacctgatgatctttttaagattgtttaggcaaatgatctgtaaagaccggaaccctcaaatagcgtctattgtatttgcttgtatgatttctctctttctgtctggtatattcattagcaaatgggacaaggaaggcctatttgagtgtccgagtctgttaacctttaggtgccagcctccccttaatataatactcattaactgtgaggttctcctcccccaccttctaaagaacactgatgcaccaggaactgtcagcaattcatggcaaagccacgaaccaagatctaacagttctcggaaccaagatctaacgtcggaaccaagatgagcatcggttcattggaaccaatatctaagagttctcccttcctttacatttcttctccgacaagaatgatttgaaacaggtctgggaagtattgggggtttgcttttcttaaaactttcaggtttgggacttaaattttggtttaagcaactcagctgctgcagcctctcttgccaggtagggattctgyggtgtccgggaggactgcccactctggggaaatgataaaggcccaaggggagtgtgtcctgttctattctgtagcactcagtctgctacttcctcaggccttcagacagcacagtttcttttttgaaaaacaggaaaaagttaaagatttggataaggtgttataaggatccaaaatcccttttatctttttttttttttttttttttgagatagagtctcactctgttgcccaggctggagtgcagtctcagctcaccacaacctctacctcccgtgttcaagcaattctyctgcctcaccctcccaagtagctgggactacaagcacctgccaccaygcccggctaatgtttttgtatttttagtagagatggggtttcaccatgttagccaggatgttctcratctcctgacctcgtgatccacccacctcggcctcccaaagtgcagggattacaggtgtgagccaccgcacctggccccaaatcccttttttctaagtatataggaaggaaagggccaagtgtggtcccagcacttcaggaggccgaggcaggaggatcgcttgagcccaggagtttgagtccagcttgggcaatgtaacgagacctagtctttactaggtctttactataaaaataaattagctgggcatggtggcacttgcccgtaggcctagctacttgggaggctgaggcaggaggatcgtttaagcccaagagttgaaggctgcagtgagctatgatcacgctgctgcattccagcctaggtgacacagcaagaccctgtctctataaaaaataaaaatttaaaaatttaaaaaagaagaacacttaggaattgtcatatgtttcatttttagttaatgttatttctcttgtattgaactgaggaaatatattttatggaatcaagacagctgtatgatgtatttagatttgcatacttttacagttcttttgcagtctcctcccaggggcccttgctatccagatggaggctgattggctcgaagcctctgaggccaaatctgtggtgttctagggcagatgctataaatattttgtaattgataaaaggagttattgcttataaaacctagaaaagtagatgaaattcaaagcaacagacaaggagctgagttgaaggcaagaccatggttctgcgggggctgaaaactgatagttaaaaaagcaatcagcagcatcgtgcccaccccagaagcatgctctcacacgaactaagagtgcatcctcgttccctcccagtgttttctctctgtttccctctgcgtttagtcttatctgcagccagcatgagggtgacctgaaattcagctgagtgagccgcagagcagatggtgccatcagagctcttgggaaaaaaatgcagatcagatcagatgggctagatgtagatgctgtttctaggagaggcatatgtcaaggccccgctatcccagggattgggtgtggggctgggaggggacacaagaggatatcagaaacctctgaacagaaggaagcatagaaccacgtagttctaaccacggcatgtgctggcaaaaggcacagtgattggataagtcagagaatatttcacagaggaacactcatatttatcatcaattttgagaacctgttagaatttttttaaccctcagtccccagtctcagacctacgacagagccttaggtaaaactgagaaagggctgggcacagtagctcaygcttgtaatcccagcactttgggaggccgaggcaggaggagctcttgagctcaggaggtagactaacctggacaacatagtgaaacccgggtctctacaaaaaataccaaaaaattagccaggcatggtggcgcacacctgtagtccctgccacccgagaggctggggtgggaaaatggactgagccccagaggttgaggctacagtgatctgtaatcctgccactgcactgcagcctgggtgacagaacgagaccctgtctgaaaaaaaaaaaattgagaaatgtgtttaaattttatttttctgcttggttaacactgatgaccttcatcattmtgagccatggatagtcttccttggggaatagcagggcaggcttttcccaggagcagagcctgcctcttttgtgtggtattttttggtaccttcccttctagctgatgttccctggaataaaaggagctggctgagascagtggttcttgagcctcagtgtgcatcgcaatcacctggtattcgtctaaaaacttcccaaaccagaatctccggggagagcccagggcttgctccttgggcagctccttgggcatccaggtctaagaaacactggcctgaggggagccaagtcaggcatgtgcaggggtggtcggcagctgctcagatgtgcgaggagctgcccaaccagaaatgccttcctgacacctcctcaccagcaccgatgtctgcccttgtactgggctatgcgttatattcctttaaacacccgatacatcaaccctgtggcctgttttcacttagctgagagcacagccattgggaagaggctctgaacctgacaagctttcatgtggagaggaagagaagggtctggcagcagtggggagagcaagcaccagagagaggagcccaggaaggaacagtggggacgtggggcactggggtgttcaaatggggccgaagcccttctccttttccctttgccagggctcagacagcggcccaaaagcaggcctggaggagagtctgagtagaaataagttagagctggtaattattcagagaggggtaaaacctaagatttggtgatggagagaaagcaaagaaacccatttttatataggagggagacctgtgctataaacactgaaaggcagcctgttagatggcagtggaaactacagaaggcacatgaaattgtcttacatggcacagggggtctgatcagaaagtgttcagaagtcctgttgaacgcggtggctcaggcctatcatcccagcactttgggaggccgaggcgggcagatcacctgaggtcgggagttcgagaccagcctgatcaacatggtgaaaccccgtctctactaaaaatacaaaattagccaggtgtggtggtgcatgcatgtaatcccagctactcaggaggctgatgcaggagaattgtttgaaccctggaggcagaggttgcagtgagctgagattgcgccactgcactcsagtctgggtgacagagtgagactccttctcaaaaaaaaaaaaaaaaaaaagtgttcaggatccctgttctaaggaaagaaggagaaggaagagagggagggaggaatggagggagggaagaaggaaggagagaagtaaaaacaatcttaatttctaataaaatttcttaagatcttgcattttatgcttgtgttcaggtggatgattacatgtgtatgtgtgtacatccataaacacaatcttcaaaatgcatcatcaaaattctgctttaggcttagaatcaagttaggactcatatgaaagatgaatgatttgkatttggtcagggtctttgtaaggaacggttcggtagactgataagtctgtgtgattacagaggctgctggtttgcctagaagagtccatttatattcacaacattaaagacatgaagctgttgaagaccctcctggatattcctgcaaacccaacaggtgagctccaaaaatggaacaaatgtccctgaaatttcatgtcctggtgcttctttcccaagctttattttcctccaaattgcgaacgtgaagcagygtttgctttttgagtcttagtgrggtttatctcgaagctttgtcttaatggcggcagattcaaattatgtcaggctgtgtgtcctgcaggggggctgtgtgcccttcattgcagtccaagaataacaacaccctttgtctgggacccatatcagcaaatgtgtcaaggcacgtaaggtagacatgtaaaagatttcaagcatctgctgttgaaaagtgtttacccctaattgttttttgtggttcgttcagtacagagtaggcgtgataattagaagcaggtttcaacttggcgtgtctgcatggccagcaaaaagacaatctgaaccataaagaatatgttttattacatgacaaagaaatctctctacttcgacgatatgctaggatattaaaccttactgaattctcgggatttaacactatttaatacattcctggtgtataagaagaggaatggtttggatttgttatattgaaatagcagatgacattatatgaattcatcaagctaggagtaaacaagaaagaattccttcattgtgtggtggggtgaggagtcagcacactggaacaacttgtacatttaatgactccagattaatatttgcagattatatttcagtttggtatcattgaacaactgcttctattatatttcagtttagtatcattgaacaactgcttctatttgctgtttctgagttatttggctttcactgaatttcaagatctatctgggtgccatccaagtcacctagactttttgaaccttggttcccttatgaataatacccatctcccagggttggctgagaattaaacaaggtaatgtttgtgaaagtgaccagcacaggaactgccatgcatgaaatacttctgatgccttctcttcattccaattctataaatggcccttggctgttgatttcrgtgctttcacatttcagctatggcaaaaggatattttaaaagaacaaagctagccgggtgcrgtggctcacacctataatcgcagcacattgggaggccgaggcgggtrgatcacctgaggttaggagttcaagaccagcctgaccaacatgaagaaaccctgtctctaccaaaaaaatacaaaaattagctgagcatggtggygagtgcctgtaatcccagctacttgggaggttgagacaggaaaattacttgaacccaggaggcggaggcttcagtgagctgagatcgcaccactgcactccagcctgggcaacagatcgagactctgtctcaaaaaacaatgaataaattaaaaataaataaataaataaaagaacaaagccattgaggctgttagggagttctgtgagataatgactttgaagcacattttctgaaatggaagacggtacgtgaagaagctgtgggtggtaagtttttcccttagaaatgagaggctgaaatcatctggacaagtatctattgcagacattctttgtgcttggcaccatagtaggcaccattaggcaacctcataccaggagcccaaaatctagttgtcacgagttcccttcaacagtctgtctgaggtggtctgagacaggtgcgccagcagcctttggcaggggtggaaccatgtttaactctggggtgcggacacagttgaagggagcatgtgctcttctgatcaggaatgagaggcccctgaatctgcatagagcttgaggctggcagggcctgagctgggccttcagggatttggggagggacatcgggcatgcagaaagctagaagctgcctgtggctctcagtttctctgaagagaggggagtggacagtaaatgccacttactcctcacacctgttgcacacttgacccccagaggacagggttgcttcaggactgagcaccctcccttgcaaacagatgtttctcctttttttttttttttttttgagacacagtctcactctgttgcccaggctggagtgaggtggtgcaatctcagctcactgcaaccttcgcctcccggattcaagtgattctcattcctcagcctcctgagtagctgggactacaggtgcctaccaccacacccagctaattttttgtatttttagtagagataggatttcaccatgttggccaggctggtcttgaactcctgtcctcaagtgatccgcccgccttggcctcccaaagtgctggaattataggcatgagtcagcatacttagccaccatttactcttattttttagcaaatatagttgtttttctgtagttcagaaaactcactggttgccttactttctgcagcttaaacagagagaaaataaggtttaaaagtgcagggctatttgtgttccctgttagagacagtgtatattgtttgtaaagggaatcgattttatctcaagaaaaatgagaaacaatagcagagacttcctctgtctcagataaaagaatgcctccttatgaaaggatccagggataggttgagtatttcttctgaaagaccaggagcaaactgtgtctttttagacctctgatgttctttggagatatagcccaaggtgttttaaatgctcacgtttataattatcacctcaacttctcctgagctccctttctactgcagtaaaatggagatgatcatttttagcccccagagttgccacggagagcgttacctgaggttgtggcctgggtgggcaaaggtgggtccgccctgtccatgcgggcagtcagactcactccgcagccctctctgtcccataggacagccttgcacaggtcagagctgcgcttcagtgacatgaccaggtcctcactcgggaaccttcagaggactccgccctgccaattatacattccccagaggccaggagtcgccttatctgttctcatcctctagtttattttctgaacaaagaaataagatggaaactgtgactgttgattttataaatccttgctgggtacagaaggaagacacaatcactcgtctaattgtcttcagcacacaaatcctgaatgcattttgacttcataaactacaagtaaattagctatacagagttcgcctgttgcctcacacttggtatctaacgcagctgtaaatttccttctttctgtctgtttgtgtcatgcccgttcctgttgtgtcagagattgcaggctgtttcctttaaagagcttggccagacaggggctcgaagttaatttcctgctagcacagcagtctgctctgagcagtcaagggtggaaatctccatgaaagtcctgccaactgcagacctcccagtatggaggaggtggtcacagagctgaccaccttttatgggatattgagggagcgttccataccacacagcaatgcagatcattgaacagttcatggtttcttccccagcaagacctctttcttgtttgaaaatgctaataaaagtggtataaatgcttcccttttgtaggagcatagggcatttgctgtacaaagaagatgtctttctatttttgaaaatcggaaagcgtaacctgagacattaatcaactcagagggaactgcattttataaatcactgttaacttacctaaagtttgacatgcaatactttaaataccaagatgagaatcatttagaatcatgggacttcctttgaattccactgatgatgccattggttcttgagttgagagcaggcacttcttttccagctgtagaagaattacagccaaacaattacagtggaattatagctgccagtgacttatgaaaatatgtgtcaagctataacacatccaaaagccccatcagaacctcattcctaggtagaaaaaagactggaagaaaatatgctcagatgttcagaacagtgaaaagcctctgggttttagaattgtgggtgattttttttctccttatattttctaggctttgcaaatgttctacaccatcacttttatattatacaataatatttttaaagcccatatccttccttaaaaaggctttgtgtaacacctgtaacagaaagaggagactggcagaatggcaatagccaagctaaggaaaactcttcttgcttgccttgggtggttcccaagatacgaagatacattcgtgtggctcgttggatttttctgacacttgggccatagggaagtcacagtaggcttttctggggaccttcattaagtctgtaagggtaggaaggcaggattccttgtctaaattcagatggattggtagaggtgcgagcctggaggcaaaactgtcaaataagtggtatgtgtcagagtatgcctgccctcactcttatcctttgtccctttcttgttagcatctagtgtcaaccagttctataataggtattgcagaaagttcaatattagcttagaaagtttaaacgtttcttcccttctgggaatatttatgttttaacataagactctgaagcacagctggaggtatgcgtccaaggcttctgctmcaagactgcttagctctctctgccacaaagacacgcccagtattttcagagggaagaagtaagaaacgaaggcttggcatcttgaagtgttaaatctggaaagacctctatatcacggtagccttcatttcacagacaggaaacaggcctgaaagagcagcaaataactcggccagagtttcacagtacatagcagacctcagtcttgaactcatgtcctcagcctatctctaaccagataaatattcctgaaacatgccttaaaataaaatttgaaaatcttttttgagataaaattcacatcctatacaattcacccgtttaaaatgcatggttcaatagcttttggtatattcacggaattgtgtaaccatcaccacaattaattttagagcattttcatcgccccaaaccttgtacctctaagccatcactccctatgcccccagccataggcaacccctaatctactttctgtctctattagattatggatttctctattctggacattttatatcaggagactcatacaatatcggttcctttgtgactgacttctttcacatagcctaatgtttccaaggttcttctgtgttgtagcatgtatcaatactttatttttcttgctggataatattctattataaaaatatatcacattttctttatccatttatcagttgataacatttgggttatttccactttttgacttatgaatamtgctgccatgaacattcatatacaagtttttgtgtggacatatgttaaatttctcttgggtgtatatgtaggagtggaatttctaggtcatatgagaactttatgtttagcttttgaagaactgctaaacgttccagagcactgccccattttacattcccaccagcggtgcataagatcccagtttctccatatcctcaccaacatttatctgtctttttcactatagtcatcctagtggttgtacagtggtatctcatcgtgtttttaacacagcctttttaaaaacatatgtgctaggccaggcacgatggctcacgcctgtaatcccagcactttgggaggccgaggcagatggatcacctgaggtcacgagttcgagacagcctggccaacatggtgaaaccctgtctctactgaaaatacaaaaattagctgggcgtggtggcacacgcctgtaatcccagctactyggcaggctgagacaggagaatcgcttgaaccaaagaggcggaggttgcagtgagccaagatcgcaccactgcactgcagcttgggcaacagagtaagactccatctcaaaaaacaaagcaaaacatatgtgctgagaaaccttcagcagttacacactgcatttgtaaggtcttaactctttagtttggtacgctagtccttgtaagatttccacagtcttcacatcttttctgccagccgcctctttgggaacccagcacacaagacaaccagatctcctgactgccttccctccccagtttcacaagactagaatcccttctgcctgcctagctgttcttgaaatttcatttggatagcaaagaattcagaaggggtgaggaattggggtttccagagcaaaactggaaatggacgagtggcctcttctaaggctggggccaggaatgaccttgtatcgccaaaggggtggcagggctgcagggctgccagaacgtgcagttaaaggttccggggctcagccacttcctcccgtagctatgcatggcaagtgataagaggacagccctgctgtggactcagcaaagccagagcaggaaatgagacctaggttccaactctaaatgtttactttctttttcctttgctctccttcctcagcagattagttgaggtatgtttcagcctgacctaaagttttttcttatacttttagaagaaacccacttaatatactaacttgtaatagacgccagtcacttttttttttttttttttttttttttttttttttttagagagatgtctctcttgcgtgatctcaaagtttctggtaacactttggtttctatggaattgctggaattcactgctatcatgtgcacctctattcatctaaaccattgttttgaaaatcctttacttaaatgctcccttcttgaatccccttataaataaaaacagcttatgttggttcagtggtttgatgggctgtttactcttccggaatattattgaagcatcttaaatccaaaatgtcctctttatttagtttgtctcaatgtctaggcacaccatcttgactgcagacgcagacctcaaataaacttcctcctcgggaggtacccatttcccttatcaaggcagggcatttggctcagaaattgctcggtttctttttttttttttcttaagacagaacctcactctcacccaggctggagtgcagtggcactatcttcactcactgcagcctccacctccaggtttaagcaattctcctgcctcagcctcccgagtagctgggactacaggcacatgcaaccacacctgactaatttttgtatttttaatagagacagggtttcactatgttggccagcccgatctcraactcctgacctcaggtgacccacctgcctcggcctsccaaagtgctgggatcacaggtgtgggccaccttgcctggcctgaaatttctcagtttctaaataggttcttggcagctcctcttctccaacttgaagttactggccaacagtatataatcatctgcagaaagaccaatatgtactgacttttcacaataggaagatttatttcagttttgaggaaatctcttgtaaccctagaggataatggaattggaagaaaagtagatgctgtttcagagtcctggggtaaaatgtaaaaatgagcaatacacacacacacacacacacacacacacacacacmtatatatatatttttgagacggggtctcactctgtagcccaggctggagtgcagtggcacgatctccactcactgcaacctttgcctcctgggttcaagcgattctcctgcctcagcctcccaagtagctgggactataggcacgcaccaccatgcccagctatttgtatttttagtagagatggggtttcaccatgttggccaggcttgtctggaactcctgacctcaagtgatccgcccgcctcaaagtgctggaattacaggcatgagccactgtgcccggcaagtctcattgtttcactgtagcaaggacgcagccagtgttaaatcaggaggtcttcccctgtgaagttgctttattggaagccttaatcagaagaatcatcagcggaaagcagttgtctgcaaagccattcctccccttgccagtaggtggcactgtagctgtactgttttcagatgccctctccagccgtgcaatctctcccttggccccaggcttctcatgttctgtttcttctttgccaggtctatgtgctctctctatcaaccattccaattcttacctggcctatcctggaagcctgacttcaggggagattgtgctttatgatggaaactccctggtaagttgacggtgacctggctgagccaacccacctgccttggctgtgtggtcatggaaggagatagataaggacgccctgccgtcgggrgctggaggcggtgggagtaagcaatactggggagttgttcaagagaaggtgatactatttcccctcgggcttgytgtsagtcaacctcaccrtaagccagctggccaggccaagttagacatctgcagcataatgaaaaccacttgccagcagggggccagttgtctscctgaatgtgtcaccctgtcccatgccacagcctgagacagtgtgcaggtgtttcatattccctgccctctggtctctgaggcatccctgagcgggacaagattgctgtgggaagttgcctaaagatgcgtgcagggcgcgcctgcgacggcatcacactgcatcaggtgctccgttcgtggccaccttcccaagggcaggaaaagggatggaaatggagtggcccttgaagccaaatcttgattcaccagaaaatgacacacagcttacatgcagatggcctgggggacagaggaagagacagggagctggacaaaggagggagaaaggagaaaagaggaaggggagggaggtgaaatccatcttccctcctccgcagcatctgtatccatttttccttttcaccaacagaaaacagtctgcactattgctgcccatgagggaacactagctgccatcaccttcaatgcctcaggctccaaactagcaagtgcgtctgaaaaagtgagtccactcccaccaacacctctgtctgggtttcgctggatggctcctgccgtgcgcagggatgggattgaacaaacctggtgacatgaagactgactggtctctgggcccactcagaatttgtttcagagggagaatttctggcctctgcatgtgtggtatattcatgcatttgttaattcaataggccaggggcctgcaatatgcaagatacaagacactttgcatgaaaactcgtggtcttatgaagaaatgtacgtgtacatcagccgtagagacggacaaatgctacaccttataaacacagtacagtgcaaaccaaatgctttactttgctatttagagaaattgatgtcttctgcctggaataatcagagaaagtgatccaattgaatttttttttttttttttgaggtggagtctagctctgtcgcccaggctggagtgcaatggcgcaatctcggctcactgcaacctccgcctcccaggtttaagtgattctcctgcctcagcctcccgagtagctgagattacaggcacatgctgccacgcctggctaattttttgtattttagtggagacggggtttcacttcactgtgttgcccaggctggtcttgaattcctgagctcaggcaatccacccgccttggcctcccaaagtgctaggattacaggcgtgagccaccacacccggcctcaaattgaaattctaagaaaccagagcagttgggtgaacacacacatgcacacacacatacacgcagagccttgggcacaggtggaagggaaaaggtagacagagggtgtttataacattttccaagaattgttgayatggcacataaataaacatgcctctatgctcaacgtggtgttcttcctcctcagagacagatgttcaaaaccaataaaacaaactcctctctaaagggacatctctgtgtaaagccactaatggttatgaaatgtccacctgctttcttttccagggcacagtcatccgggtgttctctgtccctgatgggcaaaagctctatgagttccggagagggatgaaaaggtctgtgttcaatgtcaaacccattttaaagtccccgcagaagtcccgcagggaccrctggcagctgtctagggagaggacagagagtggctctgtgccctccactcacctggaggaagtgtaactactctcccaggtaattgactcccaggctttacttagggctcagcaaaactgaaagcygagatgctgttttaacacagttcagccgtgagagtccctttttgaygtgtgtgtgggcggccggcacaggagaaatgagagagccagggagtcacaatccaaaaataatttctgatttccttccatggaaataaaggacgatgtaaagtgtgactgtttgggatcttatcggatgtaggtttgcagccagatcagtgcacagagcaactggaagattccaagatgccaggaaggcacagttcctcccttctgctgacagaggcagggctataccttgtttcttctcacataaataagactatgggccgggcgcggtggctcacgtctgtaatcccagcactctgggaggccaaggcaggcagatcacctgaggaccagcctggccaacatggtgaaacaccgtctctactaaaaatacaaaaattagctgggtgtggtggtgtgtgcctgtaatcccagctacttgggaggctgaggcaggagaatcgcttgaacccaggaggtagaggttgcagtgagttgagatcaagccaccgtactccagcctgggcaacagagcgagagactctgtctcaaaaaaaaaaaaaaaaaaaactatgaccctttgtgaatctttctgacattaatttctaaatatgagcaccacagtgtttaagggatctgggtctacctaggctcttcaggatacatctgattttcttataaagctgatctctgagttataaggccataactcccatttctcttgctcactgacccatgtgttgctgtgcttgtaggtatgtgacaatcagctctctagtgttcagtatggattcacaattcctctgcgcctccagtaacaccgagacggtacacatcttcaagctggaacaggtcaccaacaggcaagtactccgcggggcaccaaatgctcattaaacgaaaggagtcaggcctaggctcttctactggcatgaatgatctcttttctttctgaacaccmaatcttggcttcacttgggacttcacctaagtgatggagtgtgtgttagcaaaactttggaggcatgatgcacaaaagcaaaaaactgggagccacccacgtgagttcacgtcctggctctgcctcttaggagcccagagatcccgggaagataatttagatctgtgtccttcagtttcctcatctgcaaaatgaacataacagtagtattaaatgagtctgcagatctaaagtgttcagcatcgtgcctggcacataggaagcactaagaagtgttagctgatatagctgtaaatataacaatatatttatttatcattgttgccagcagcaccactgagcgcttgggaagcacctgcaatttctcagggcttaagaagctgtctgaaaagtgaaagaaaagcctaaaaaatggataaaatctctagggaaagagtaaaaagaacttcagggcagacaatgagctttgagttacacctgtgcagaatgggggttggaaaattctggaaagatggaggagtgagaaaggagcagcccccagtgtttcataccccacggtggggggcaaggattctagagaaagagcgctttgaaaacgttaccccaacctgcagagaaaggcaggatcaggacagaaagcctactgtatctggggagttggttgctggtacccttggatggagtttcagaagaggaaggtgtagaggctgggcaccatatcacgctgatacatgctaacacatacgtaacagaggccggrcaccttatcacgctgatacatgctaacacatacatgacagaggccgggcaccttatcaatgctgacacatgcggacctcatgatccacccgcctcaacctcccaaagtgctgggactataggcaaacagccacatttatgatytcacagttctgcagcccagaatggcaggactgggtcttcttctcagcatgacacaaggctgaaagagaggtgccaagatttctctgacttgcccttctgccatctttttctgccaccagttggagaaagctatttttaaaggcatgtgtgattaaagcaagcccacgctgcctgaggtcacctgagccatgtcacatatcacagccatgggactgacgtcccctcatctctagaatccttgtctccccccacccccagtggtgtatgaaacactgggggcggctcccttctcgctccttcatctttccagaactttccaacccccaatctgcacaggtgtaacccaaagctcattgtttgtcctgaggttctttttactctttccctggagattatatccactttttaggattttctttcacttttcagacagcttcttaagccctgatcttttttggagccttaattcatcatctgttgtcatgggtttgagcactagagggcggctgagctgttaagatgccgttcaaccccaaggttccacgagtgagtgatcgcaattgctgctgcagccccgcctccactggggattattatcagagattcattttccactccaggctctcccgtttctgtctgtgagcacaggtgaccaggagcagaacctccaagctgttctgggttctccgctcaacctgtccacaggtgttcatatgtccctggcggttacggctcacatgtgcctcccccctcagcctgtccacagggtgttcatgtgtccccagcagttatggttcacatgggcctcccctcagcctgtccacggggygttcatatgtccccagcagttatggctctcttgggcctcccctcagcctgcccacgggtgttcatatgtccccggcggttacggctcacacgtgcctcttcagccctgcttcgctggccagggcccttgaacgtgtctttagcacctcgtgctggtccagccgttactcttacatttggtctgactttccagtctctttcaaccaataccagtccatcctatatcatcttgctgattaatcttctgaaaatgtccctttgaacrtgacacctcctcctcagacacctttattcccctttgaccttgggaatgaagtcccagctcctcccgtccccctgagtcagacctgctgcagagcccagcagccaccacccccagaacctcctcatttcctccagccacagagacaccatcccataaaacagtatgcgccacgtgccrggctccatgctcagtccccagcatccttagttctcccagcaaccctgtcagggaggttgtgatgatgattcctgtttcccaaatgaggaaatctggacacggaaacgttaaggaacctcatccgcctctcccttcctctgtggtcctggactagctcctgcctggaccatctgtgcagcaccgcatattaactgctcacgtggtttttctttgtatacacccgtgctctctcaatctggaatgcagggtctggatcgtacacctctttgtaaaccccagcccggagcacagggctgtgggacagacagtacaaggatgtctcaggatgcttcggatcacagaaccctagcagtgcacctagcatagtcactttcagatgagaacatgaaggcccagagaggtttgtccaaagaccccctagcccattggtagcatagtaaagaatacctcccagagctctgagctgcagggcgagcttcccaccaggacctaatcctgcagacaagcagcctctcagcagttgcctgctcctgggaactcatatggcaaccttggttctcaatgtgccaccctctgtgtggggcagagctgggggttgtctctcaccaacagaacagtcaccccctttgtctggcagaggccttgggatgaagttccatgactgtaggcgacatcccaggtccctttgcatgatctccatcattacacatgctgggtacctgggtgactccagggttatctacaatcaaacaccacccaaagtgtcttgcccggaggtttgctacccactcagtctggctcaggaggccttcacgttgagatctgtctgttcttccatgagcccggcacagtcccaagcttatttaatggtacctggatatcaagtccatctcactctctaccctaactctcttctggaaatctaggaatcagactagtcatcagataagccttctttaataggggaaagcagtagcattgggaaccttttaacagctttacaatggctcttcygaagaacaaacaagcccttgatgctctttagttattgccagaataatacgtcctggattgttctcagtgggcagaacattatgctaaggcacagtctctccctgctgcggggagtgtggctaatgacgcttgggtgtggagattcctgggtgcgtgtggggcctgcagcccagtcccatcgttgcctgtgcattactccctagtcgaccagaagagccttcgacctggagtggctacatgggaaagatgtttatggctgctaccaactacctccctacccaggtgtcagacatgatgcatcaggacagggcttttgccactgcacrcttgaacttctccggacagaggaacatctgtaccctctcaacgtaygtacaatgacacccactctgaacaagaccacactttcgtcaatgtatttttccaaagcacaaaaatccccaaacctgaaaagaaaaaaagaaaacttgccccaggctgggcacggtggcttacatctgtaatcccrgmaccttgggaggccaaggcaggcagatcatctgaggtcaggagtttgagaccagcctggccaacgtggtgaaatcccgtctctactaaaaatacaaaaattagcygggtatggtggtgygtgcctgtagtcccagctacttgggaggttggggcaggagaatcgcttgaacccaggaggcggaggttgcagtgagccgagatcatgccactgcactccagcctgggcgacagagcaagactccatctcaaaaaagaaaaagaaaacttgccccaaaggaagggtgagcggaatcaaacccctgcttttcctatctgacttcaatacggattctcagggggcagccagaagttggcatgggaattttagccttctggttataatgacrctgtcttaaaaacaattcttatttttatgtaattatgtaaaaagcctccagatctgttttctaggttcggactcctatggggctgacagatgttttaagaagtttaaaggagtttattcaaaagttgaacatttttaaaatttcacawaactaaccagcaaagacagtaagccaatcctccatttaccccctttctgtcttggttaagggcagagacacatgtcagarggagactgcgtcccatgtagggagctaatgtgttcactagctattgcttctcrcagggtcgcarcatctacactcacttgcctcatccacactgtcacgttcaaagacawgaaataatcctgaaagtagatcccaaggccagaatgcaaaggaatagccagaagcccagaccagatcagygggctaagggtttgtcaaaggcagaatctggtgacagctagggtgaggggggctttgtcaytggaagcgaatccatcgcccatcttcgttgtcatcacggtttatgttttccttggcccttaggatccagaagttgccacggctgctagttgcgtcatccagtggacacctttatatgtacaatttggatcctcaggatggaggagagtgtgtcttaatcaaaacccacaggtgaagagactgcttttcaaaagacagcctttcgagagctggtcgtrtagagttgtcccttcgccaagaacgacaagcttcagtgcccttgcattgatttgttcttcactggcagtctcagtggcaaacctctagtgggcaagtgctctgcaccgggctctgtgtcaggtgccctcagcatgtggtaatcatctggaaaagtgccaggattaataacacacaagatggtctccccctcagcctatgctcctaacacagccctgagctcacagtgggtgttcaaaaatattccctgccaccaggtgtggcggctcacacctgtaatcccggcactttgggaggccgaagcgggtggatggcttgagtccaggtgttcaagaccagcctgggcaacatggtgaaaccccatctataccaaaaacaaatacaaaaattagccggttgtggtggcacacacctgtagtcccagctactcaggaggctgaggtgggagaatcacctgagcctggagaggttgaggcagtgagccatgatcacaccattgcactccagcctggacaacagagtgagaccctgtctcaaaataaaaaaaaaaaaaaacctattccctgcatggaattgaaaagtgstctaccagtcatgttgactcacgcctgtaatcccaatactttgggaggccaaggagggcggatggcttgagctcaggagtttgagaccagcctgagaaacatggtgaaaccccatccttacaaaaagaaaaaatataaaaattagccaggcatggtggcacatgccttgtagtcccagctacttgggaggcagaggtggggggatcacctgagcccaggaaggtcaagactgcagtaagctgtggtcacaccactgcactgcagcctgggcaacagagtgagaccctgtctcaaaaaagaaaagaaaacaaaagaaaagcactcatgccttctgtgaacaggcacagactgagctctcctgctgtggccagggcaccagagctgccaccgccccccaccgatggctgctctccttgctagcatgtcctcacctgtgtgtactgggaagagcagaggactaatctttgtctagccaatgtaasagaaagaggccattttgacggtgtgtgactgcccctggcagttgcaggtcacttcagctcatcctggcccagcagcgtgtgggtaggtctacaatttaaacccacagagttggcgggcggatcacctgaggtcaggagttcgagaccagcctggccaacatggtgaaacccagtctctactaaaaatacaaaaattagccaggcgctgtggtgggtgcctgtagtcgcagctactcgggaggctgrggcaggagaatcgcttgaacccaggaggcggaggttgcagtgagccgagattgcgccactgcactccagcctgggcaatagagcaagaccctgcctcaaaaataaataaataacccacagagctgagcacaggcttcttcatgcttttcctttggaaggtgtcctagatatatgatgatttcttttttctttcacctcctcttgattgtcacaagtagcttgcttggctcaggaacaacagaagagaataaagaaaatgacctcagaccttccttacctcagtcttatgcagcgaccgtagccagaccaagtgcatcttcagcctccacggtgccaggtgggtggacacggggccaacaggggagcatctccaacagtgacctccctccccttctccctgcacgctccctccccttcccccttcactgttacctgggggtggagtgccctccctccccttcccccttcactgttacctgggggtggagtgctctccttgaattttttattttctcacaggtgaggccatggtaatagcctttaaacctgggaccctcaacctggcaaggcatcacacgatacggtctttttcctaacaagtggtgttaaccctttgcctcttcaaaaattccaatgaggccaggcacattggctcacrcctgtaatcccagcactttgggaggctgaggccagcggatcactggaggccaggggtttgagaccagcctagccaacatggtgaaaccccatctctacttaaaaaatagaaaaattagctgggcatgttggcacacacttgcaatcccagctactccggaggctgaggcaggagaattgcttgaaccagagaggcggagattgcagtgagctgagatcataccactgcactccagcctgggtgaaagagtgagactctgtttcaaaaaataaaaactaaactaaaatttccaaagagcctgtagtcctagccactcaggaagttaaattgaggcagaaggatcccttaggctcaggagttcgagaccagcctgggcaacatactgagaccctacctcaacaaagaaaaattcaaagaggtaggatgcctcaggcatctgaagtggaaaggcaggtcaggcttaaagatggcagatggtgaggattatgacttgtcctaggcacagtacctccagggggaagacagacagcccctttgcttcctttgccctttatttgagcccccscyccccacccgccaggtcatggcataaaagcagatccccagtgcttgtttcatgtctctttcttggtttccaggttattctgaggacggcggggcgctgcgaggagaagttattcctgaacatgagtttgcgacgggaccagtgtgtcttgatgatgagaatgagtttcctcctgtgagcattaggaacccgtaactgggcggctcagtctgtgtgcttagaaggaaacctycgcctcatacgagaggcagagtccctttccctgttttctaatctataacaactaattctctgctctagtatttggaaagccataggatatttgttgtactgtgtgcttcgaatcctacagagtaggctttaggtgtcgagctaaaccctgatggcattagagtcaccgaatactaatccagggagtcttggtggcctccctccagccagaggcctgcgatcccttactttgcttctgtagcactgactttgctgcctggaaggtaggaacacgtgacttgtctaaaacttattttcctgaggctcccatggatgcgtttgcagaatgctgccttccttgtgctggaggggatggtttcagagggctgggctgtgtgttcaggactctgagctgagttgctgcactctgtgaaccagcttgaccctcacttacctgcagctctggccggcagacccgcacctccccagcagttgcagacactcattaagaaacaagtggccgggtgcggtggctcacacctgtaatcccagcactttgggaggccgaggctggaggattgcttgagcccaggagttagagaccagcctgggcaacacagcaaaaccccatctccaccaaaaaaaaaaaaaaagaaaagaaaaaattagccgggtgtggtgtcacgtgcctgtagtcccagctattcgggacgctgagatgggaggatcacctgagcctgggaggtcgaggctgcagtgagctatgattgtgccactgcactccagcctaggtgaaagagtgagactctatctcaaaaagaaaagaaaagcaattgtgtgctctgtggagggcagcaggtgcagggcaggagcttgcccgagcacctttagctgggtttcccagcaacctgctcaggctgttcccacagctagggccctcggggctggctgagtgctgggcgtggcttcttccatcacctggaactgaagacaagattccctcctgagagcctgctggggcttccttaactgctgattcttcaggctcccatctggagtaacatatagaccgctcttgtgagcttcagtcaaaacatcccagatagtcaacctgaaatcatttcgagatggaagtactgatttgttttgttttgtttttgagacggagtcttgctctgtcacccaggctggagtgcagtggtgtgatctcggctcgctgcagcctctgcctcctgggttcaagcaattctcctgcctcagcctcccgagtagctgcaattacagatgtgcgccaccatgcccaactaatattttgtatttttagtagagacggggtttcaccatgttggtcacgctggtctcaaactcctgacctcaagtgatccactcgtctcggcctcccaaagtgctrggattacaggcgtgaaccgccgcacccggccggaagtagtgtttgggccaagacttggagcatcagctcctagagccagagaggagctgccacttgggcactgaaacaatgtccattaggctttgttatggaaacttctcctgatcattgttttgtgtccattgagcttccaattgtaaaaggatggagtgcaggtctggcttctttctcccgcagatccgtggaaccctctagtgagcacatttggcttagaaaacaaagctgcggtggggccctgcatgcagggctggggctgttgttttgtgatttcccacatcggctctgcgggtcggtcgcagcgtgagcttttacatttctggctttcaataggcaggttgtcagagacgtggctggcaagtgaagtttatatctcagtggcggagagcagttgttcttaaaaatactaattataaacttcaaaacctctgttggcatgctgcctaactataaaccagttgttttacctttgggttctcatggccccaactggccttaaagggcgttcttctgcaccctcaagaggcggtggttatttacctgaagtcgaggcttccaggatccagagcactctaggtcagacaccgtggggacaaatgtgaccattctactctgtcagggtttaccacatccagacactcactaggttccgtttcactaattttggtaaaagtctgtaactactataaaatattattagattcttaattgtaatcgcagtaagccttgcaacctcttatagttacagaattggggtaatgtggatattagtatctaggaggtagttccttgccaaagaacctgtataaaataataggtaccttgtgcagatcatttatttggggtaaaaaggaaaaggggaggtgcttaattgaagaaccagtaagaaagtttgtcctgaggcctgtgtgcccattcagtgccaggaagctgggcatgagccagttgtttcttctccctcctaaggaccaaatgagtgaaagttggttgaaattgcatcaggaattcttatttatacgcaagaaatacttcctgccagtgagagtggtcactgaacaaggtccctagaacaggtgttagacccttgtgagtgtcargcagcccctgtgtgcagggctgtgtcgtggcagccaccaacctctcagtctgccctccagcctgcaggtagatggtgatgaggggcagtgctcccactaaggcactgtctcagtagcaggcaggcttctccatctcaccatgtaaggaccagaggcatgcatgctcctgggatgctctatcaatatggcccatctcagtcatgcctgaattggcagaaatgttcagcgagggatgctagggaacttcctctctgtctccttattctgaattgtcatgcctattgcaaatctctgtgcagaattcacatctttactcacattccttaaaatcttctaggaccacaaaaggctcttggagtctcagcttggttaaaatcgcctctcttgtagtgacgaacaaacataggcttgcctgagtagtctgctacaggagctctgtgagccgctgccttaagaacgcgggtcatcactagtgatcttttcagaacacatactgacacttccctgcgtaggatcacgcttgcctccttgggatttacttttgctctgagagcagtgaaagaaaagagacttgatcatttctggtgccttagaaagctgctacattcgggaggatgagaagcttttgtttcaggaacaagccaacctgtacaagtctctgtattttgtgagactagtcccaatcttgtgagcaagagtcaggaaatcaggcccaagggtataaactgaccttccctttttttttttttttttttttttgagatgatagagtctcactctgtccctcaggctagaatgtgttggcgtgatctccactcactgcaacctccacctcctaggttcaagtgattctagtgcctcagcctcccaagtagctggggtttcaggcatgctaccatgcccagctaaattttgtatttttagtagagacaggatttcaccatgttggccaggctggtctcaaactcctgacctcaggtgatcacccccctcagcctcctaaagtgctgggattacaggtgtgagccactgcgcccagcctaaactgacttttttttttttgagatggagtcttgctccatcrcccaggctggagtgcagtggtgcgatctcggctcactgcagcctccacctccccggttcaagcgattctctcctgcctcagcctcccgagtagctgggattacaggtgagcgccascatgcccggctaatttttgtattttttagtagcgatggggtttcaccatgttggccaggctggtctcaaactcctgacctagtgatccacccacctcagcctcccaaagttctgggattacaggcgtgagccaccgcgcccagcctaaactgactttttaatagtgattgagcagtccatgtttacaagtaagatgagccttttaaaaatatatacatatacatataaatacatacacacacacacagagacatttttatagtcagtattttctagaactgtgtcatacttgtctacacctaaataagctgggtgaccattctgtggccatgagcgagttcagacagaaaaattccacagtgcccagcctctccctgctcactctgcatgggcacagacctgttgataatgcacctgcctaccagcctcttcctgagaagagtaaggccattctgttttgattttggtagataatcttgtgccgtggaaatcagaagggcaaaacgaagcagtcatgatgagaagcacacctcagaaatcaggacatcccccctatcaggtggttttggagaaaacaaggaaggcggaagaatggagtgcaattgtgtgagcagaaaggggggcaggaatcccgggtgctccactgcttaaaccacaggacctggttaactcctcaccaagcttcccacgaccctggttgccaatgggcgcgggagacattgtatacacatcatgctatttaaaatacgttcaaactatagtgtaaatgctaattaaccatattggtatataaccggaattttatattaaaaggggcmtcctttttaaatatatgccgtgtaaaaaatgtacttataggaacatctctttgaattgtatttcttgtatattacatacttagagagagactcttttagccaggcaaagtcttttttggctgtggctggaataaatcatttattacttgggagtcccattttggacactaataataaaatcatggcaatgcatttttgaggtttttatatatttttttgtttccttgtggttataggggacaggaggaactctttaacttcttttaaatgcagtcatttcacccttaaaaggagaggaaggggattgggccacagacttatccatggactcgtctgctctgagatctggaaaacgacctaactttggtctaaatctgtgctcctcaaggcattgtttgatagaaatgtaggatttcaggatctactcgagccctactgagacggaatccggattctcacaagatcccaggtgatttgtttgcatattaaagatggagaccagtgagtacactggtttgtggaaggaaaaaaagagaaaagagagagaagctctgccctaaatactaattagaatggatttacaccaaaatgaccagagaaactgggaaccagagaaacaaggaaactaaaatgtattgaatgtctgctctgtgtcaggtaatttgccaggcattttcatgtatgcctttatttaaccctcaaaatcaacttgcaggttaggttaaacaattgcccaagttcaaaagctggagctggcacctgtgcctgactccaaagcccgtgtgcttcccattaaggcacactccctgcccagagccagcgcagctcagctgctctcgggtcggcgtggaggagggacaggatacagaagggatatgcaaggctaactccaaaactaaactccaagactaaactaaagcgtgtgtttgtaaagagggtaaaaatgaaatttggaagcaaacttgcctaatttccaggtactcctcctygtggaataaaaattggtctgttatgcggcttgacagcggcaggcaatttggtagggattacagcagggagttactgaagggtcctgagtgtaatctgcgctggagatgttgtcrttggcartgtcttggaggacgtctgcaagaacctttctgacctcgggcagcacagcctggtactccgcaccacctctttctaggggcacagcttctgcggtatcgtcttccaggttgaaaatcagaggaaacttatgctgcagctcaggccccrtgctcccatcacacgccctggctccacctagagagggaatgacaacaaatgcctcgctaaccctgacagttgccctgtgttgtaaagacgagagctgcgagtgattctacattaattcaaacataccagataaccaaatgttccaatgatggctctctctgtcaaagaaatattaccttgagaatctatttgctccttccagtgatgatcctgtggtccaaaatgttttgcttttttcatttctgtttttgttttttgaggcagggtctggcttcgttgcccaggctggaatgcagtagcgtgatcctagctcactgcagcttcagcctttttgggctcaagtgatcctcccacttcagcctcccaagtagatggggctacaggcatgcaccaccacgcccaactttttttttttttttccagagacagggtcccgctatgttcctcaagctggtctcaaactcctggcctcaagcaatcctcctgtcccagcctcccaaaatgctgggattatcagcaggaaccactgcagccacactaaaatgatttggaagttctccttgaactcgccttcagggccagtagaacattcattcaagtatctttattgacacaaaatcaggatataattattttttcaagttggagtctcgctctgtcacccaggctggagtgcaatggcacaatcttcagctcactgcaacctctgcctcccaggttcaagcaattctcctgcctcagcctcctgagtagctgggatcacaggcacctgccaccacgctcggctaatttttgtatttttagtagagatggcgtttcaccatattggccaggctggtctgttggccaggctggtctcgaactcctaacctcatgatctgcccacttcggcctcccaaagtgctgggattacaggcgtgagccaccacaccagccaggatataattttttaaagtatctttaacctctgccctttaggagtaaatttgatttttttgaaaatcgatttcttgactaccaattggtgaatcaagtagaaaggcaggtgagtcatttcactttgggttgaagatgacagtcttacgtggattcgaatctggctgtgaaagccatccagaagaggaaggacaaaaatgtttggaatgatagcagcttccttggctctttatgattccgatgactttttttttttttttttttggctttgctatagaaaaagcagttaagggtctgatggaaataaatatgacataattaaataaacaaagggaattaaagcaaaagatagccctcaaaattacaagagttcctaaacactgactttgcttctgagcttagcagcagccaaacattaatgagatagaaacttatcagttgctcaggagaagcagagctttttctggcactaaaatctgagagaaattcttccagtggctccttctcctacaggggaccctgtaggatggaatgctcactggcattcttatgaaaaataaaactgagattaggatggttccactgacgacttcttatcacatcctttactatatgatgagggcagatgccaacatgcaactcaatacaaggaagtctataggggcaaagccataccacctaaggattcagccttctggtccaatctggccagaaataaaatttgaaatatttaggagaatgggtagatctcaaagcctttagacaacccttttttattactggttttccacctgtggctgagagtcaagttgatcagtagagattaatagttgttgtctttgcctacagtttggaatagaatttgattattcttcattgccagtacagggcagtgacatgagctttgacaaacagttcatgctaggagtagagactgtgtcccaggactgagggatctgcctaagatcaagggaaaaatctgaaagactcgtcctaacaaagtgtaaaactaaggctttataagttcaagggaactgactactgattagctgccagtgaaaacaaaaatcaacactctcaggtaacagaaatcagaattgctacaatgcatcaccaacaatgtccagcttacaatttttaaggacgactaaataggagactcccagtttctagtctggcacataaggaggtcggcagtcatcacttcattctaacaagtaaaaagctgaacaaactaaaaaatcaacaactcagccgggtgtggtggctcacgcctgtaatcccagcagtttgggaggttgaggcaggcggatcatgaggtcaggagtttgagaccagtctggccaacatggtaaaaccccgtctctactaaaaatataaaaaattatctgggcatggtggtgggcacctgtaatcccggctacctgggaggctgaggcaggagaaccacgtgaacccgggagccgagatcgtgccactgcactccagcccaggcaacaatgtgagactccatctcaaaaaaaaaaaaaaaaaaaaaaaaaaattcagcaactcttattaggtcttttggagaagtgaagtcacagggcaaactactgcccccaaaattagagagacagacaagcaaatagaaacaatcacaacttaacagagcagaaacccacaagcagaaacctctgcaagaaccagtgccaggagtagggaagccctgaactgtaattgacaaattgctggaggctcagtgtggacaagtctgagagatgaaaaactccagtggggcccagttatcaagcgccaccccccaccgcggcacccaaaacacaacacacttttgtgagttttacctccaggagctcaaccaagttcttacagtaaatattggagaaaaatctcttcatccttccaaaaggggtaggagaaaagtaatttttaaatataccaaaacattctagttttcttaacaaggcctgccctcaggagaaactaatttaccagagcttaaattacttaggtttttctcacagcctaactgacctaagggtagggggatacccagctctagccactctagctgttccacctaaggggagggaagggatagactaagaagcacttgtgaagttcacagtccaagggcccaggctcaccaaaactactaagacttaataataacctacccaaatgagaaggaaccagaaaaccaactctggtaattaatatgacaaaacaaggctctttgacactccccaaaaaatcacactagctcaccagcaatggatccaaaccaagaaaaaaatccctgattaacctgaaaaagaattcaggaggttagttattaagctaattagggaggcaccagagaaaggtgaagcccaatgcaaggaaatccaaaaatcaatacaagaagtgaagggagaaatattcaaggaaatagatagaataaagaaaaaacagttaaaacatcaggaaacattggacatacttctagtaatgcaaaatgctctggaaagtctcagcaatagaattgaacaagtagaagaaagaaattcagagctcgaagacaaggtctttgacttaacccaatccaacaaagacaaaggaaaaagaataagaaaatatgaacaaagcctccaagaaggctgggattatgttaaacgaccaaatctaagaataattggtgttcctgaggaagaagagaaatctaaaagtttggaaaacatatttgggggaataatcaaggaaaacttccctggccttgctagaaacctagacatccaaatacaagaagctcaaagaacacctgggaaattcattgcaaaaacatcaccaggtaacctataaagaaaaacatgagacaaaaataccaggtatcctataaaggaaaacctatcaggattaacagcagataccctacaagctagaaaggactggggccatatcttcagcctcctccatcaaaacaattatcagccaagaattctgtatccagcaaaaataagcgtcatatatgaaagaaggatacaaacaaatgctgagaaaattcaccactaccaagtcaccactacaagaactgctaaaaggagctctaaatcttgaatcaaatcctggaaacacatcaaaatggaacctctttaaagcataaagctcacaggacctataaaacaaaaatacaatttgaaaagcaaaaacaaaaaaaccaaggcacatgggcaacaaatagcatgaggaatggaatggtacttcacatctcaatattaacactgaatgtaaatggtctaaatgctccacttaaaaaaatacaaaacagcagaatggataagatcaccaaccaaccatctgctgccttcgggagactcatctaacatataaggactcgcatacatttaaagtaaaggggtagaaaaagatatttcatgcaaatgaacaccaaaagtaagcaggggtagctatcttatatcagacaaaaccaactttaaagcaacggcagttaaaaaagacagagacattatacaatggtaaaaggccgtgtccaacaggaaaacatcacaatcctaaacatatatgctcctaacactggagctcccaaatttataaaataattactaataacgtaagaaatgagatagacggcaacacaataatagtgggggacttcaatactccactgacagcactagacaggtcatcaagaaagaaagtcaacaaagaaacaatggatttaaactataccttgtaacaaatggacttaacagatatatacagaacattccaaccaacaactgcagaatacacattctattcagtagtgcatggaactttctccaagacagaccatacaataggccacaaaatgagcctcaataaatttaagaaaattgaaattatatcaagcactctctcagaccacagtggaataaaactggaaatccattccaaaggaaccttcagaaccatgcaaatacatggaaattatataacctgctcctaaatgatcattgagtcaaaaatgaaatcaagatggaaatttaaaagttcttcaaactgaataatagtgacacaacctatcaaaacctctgggatacagcaaaggaggggctaaggggaaagttcatagccttaaatgcctacatcaaaaagactgaaagagcacaaactgacattctaaggtcatacctcaaggaactagagaaacaagaacaaacaaaacccagcagacaaaaggaaataaccaagatcagagcagaactaaatgaaattgaaacaaaaaaataaaaaagataaatgaaacacaaagctggttctttgaaaatatgaataaaattgatatgctgttagcaagattaaccaagaaaagaagagagaaaatccaaataaactcaataagaaacaaaacaggagatattacaacaga

SEQ ID NO: 95423 - DNA, 26357 bp, Homo sapiens
gtgccaccactccctgctagtttttgtatttttagtagagatgaggttccaccatgtatgccaggctagtctcaaactcctggcctcaagtgatcctcccgcctcggcctcccaaagtgctgggattatagccgtgagccactgtgcctggcctagaaggaacagaaacttttttttttttttttgagatggagttttgctcttgttgcccaggctggagtgcagtggtacaatcttggctcactgcagcctctacctcccaggtttaagcgattttcctgtctcagccttccaagtagctgggattacaggtgcccaccaccacacccagctaactttttgtatttttagtagagacagggtttcatcgtgttggccaggctggtctcaaactcctgacgtcaagtgagccacctgcttcgtcctctcaaagtgctgggattacaggtgtgagccactgcacccagccagaaattcttttgtaaagttttggttctctccaaataaaaatggcctggtccaaaatgggcttccttagccctgggctgagacctcaggccacctgacccggctgtgaatggatgagaggggtggggacggaagtcagagtcaggattccttaacacctttccttcagatgaaatccacgatgggatgaacctggagctttattatcaatagatgagaatcctcatcttcctgccccgctttcctctcccatcctcatcccccacactgggatagatgcttgtttgtaaaaactcaccttaataaagacttagatgttgctttgttgttgtctctgtatgacagctgtctagtgatgggtggatcagtcgctgtttggtcatcactgcaccatcagcatgcagctgctaaaataagagctctgatcaactggatccatgagggcagagtagaccagcaggctgggagtctgtgtgggagcccagagagagctctggggtttgctgtgggtgtctgaaggtcaagagactctgggattattgtcaccctaataaaccaaagaacctccggctaatgacagtagatgtaattgttaggaattcagattctgaaatcacacagaccatgtgtggaatgtcagctctgccaccaagcagctgagtgacactaggcaaaattttttaacctctgtaagcctttacttccttatccactggaaataattgcgtttacttcatgtctgctttcaatcggcatattgtgaggaggtataaatgagtttaaagcatgtttaaacatccacagttcctggcattttttttttttctttttttgagacaggatcttgctctgtcacccaggctggaatgcagtggtatgttcatagcccactgcagccctgaactggactcaacacagtcctcctgcatcagcctcccaagtagctgggcagtgtgtaccaccacgccagctaattttaaaattattattattatttattttatttgagacagagtctcgctctgtcacccaggctggagtgcagtggcacgatctcagctcactgcaacctctgcctcctgggttcaagcaattctcctgcctcacctgaggcaggagactgggactacaggcgtgccccatgacaccagttaatttttgtatttttagtagagatggggtttcaccatgttggccaggctggtctcaaactgctgacctcaagtggtccaccctcctcggcctcccaaagtgctgggattacaggcgtgagccaccgcgtctggcattttgaaattttttgtacagacagggtctcccctatgttgcccaaaatagtcttgaactcctgacctcaggtgatcctccagccttggcctcccaaagtactgagattataggcacaagccatcatgcctggccctagcacttcttttcaagacaaaacgtgatagtagacagtgaggcagtgtggcactataagtgtggctacatgatcccagcctcaagagtcagaccgactagatttgaattttgattgatccttagcagtgggatttcagcctctgcgaccctcagtttcatcctctaaaaatgagcactacagtggcacccacatctcaatgagaccacgcaattagaatagcaggatgcctggcacataatgttatttgctgtattcttcctctaggtgtgagtagacaggagaccaactgtccctctgttcccctggccacagttctttgtgtcaaccttgctcctgtcctgttttattttttaaattaaaaaaattttttttttgagatggagtttcacacttgttgcccaggctggagtgcaatggcatgatctcagctcactgtaaaccccgcctcctgggttcatgtgatttttttgcctcagcctcctgagtagctggaattacaggtgcatgccaccacacccagctaattttttttagtagagacagggtttcaccatgttacccatgatggtcttgatttcctgacttcatgatccgttcacctcagcttcccaaattgctgggattacaggtgtcagccactgcgcccggccctgaatttcttatttcttataccactcctcccaccagtggtgggcattaatacatttgagtgactctagaaactttctggaataacctagagtttttatcatacggggataattatatgtcccgtaatatttatatgacattccatagtttgcttttctgtgcttttttttaattattattttttattattattttttgagatggagttttgctctttttgcccaggctagagtgcaatggtgcaatctcggctcactgcaatctctgcctcccgggttcaagcgattctcctgcctcagcctcccaagtagctgggactacaggcacgagccaccacacctggctaattttttgtatttccagcagagacaaggtttcaccatgttggccaggctggtctcaaacacctgagctcaagtgatccgcccgcctcagcctcccaaggtgctgggattataggtgtgagccgttgggccagccatgatttagcaattttgaaactacttttgtgtgtgtgggtgtgggcacatgggcccatgtaatacacacaaacagggttgaacaaataagtaaacttgtagataatgagagctgggtgtctcactgtggagaaggaagttacaaataaaacaggagatgggaatgcttaaaatgaaccttgtaggactggatttggaggcatcagtctgaattcatggttttcgtttaacagatatattgatacatatagatgtgtgtatacatatgtatatttccttgctctatccacttagagggaccagaaacagtgacactccaggaacagtgagcacccatcctggaacataaaaacactagtgggaaaacaggattggggggaatttgtggtttagttaatagtattatattgatattggtttcttagtgttgataattatattatagcagggtttctaagctttggcattgttgacttttttgggttggatttttttttttttttttttttgagacaggctggagtgcagtggcacgatcttggctcactgaaagctccactccaggggttcaagcaattctccgcctcagcctcccgagtagctgggattacatgcgcccgccaccacacctaattttcgtatttttagtagagatgggttttcaccatcttggccaggctggtcttgaactcctgacctcttgatccacccaccttggcctcccaaagtggtgggattacaggcgtgagccaccgcaaccagccttttatttttatttatttatttattttttgagacagagtctccctctgtcacccaggctagagtgctgtggcaagattatggctaattgcagcctcttaactcctagactcaagagatcctcccacctcagcctcccaagtagctgggattacaggcacgtgccaccacacccagtgaattatttttgtagagatagggtcttgccatgttgcccaggctggtccccaactctgggctcaagcgatcctcctgccttgggctcccaaagccctggattacaggtgtgagccaccacactcagcccttggattggataattcttttggtgggggctgtgccttgaaggatgttagcagcatccttggcatctaatactaaatgccagtagccagtagtatctcctgttccaaaatgtctgaaggtgttgtaacaaccaaaaatgtatcaagatgttgccaaatgtcccttgggaaacaaaatcgctactggttgagaattctgttctattgtttatttaagacgctaatattagggaagtttgggtgaagggtacatgaaaaccctactgtttttgtaactgcccatgtctaaaattatctttataaaaagtatctttttaatattatgctaatacttgtaaaaaatgttctattaaaacttaaactttttttgttttttgagatggagtctcgctctgtcacctacgctggagtgcagtggtgcgatctcggctcactgcaacctccgccttccaggttcaagtaattctcctgtctcaaccacccgagtagctggaattaaaggtgcccactatcacgcctggctaatttttgtatttttagtaaagacagggtttcaccatgttggccaggctggtctcgaactcctgacttcaggttatccacccacctcggccttccaaagtgctgggattacaggtgtgagccaccgagcctggcttgagtgctttatgtggattaatttatttaatcttcacatcaaacagaaggatgtaattgcttatccccgctttgcagattgggaaaccgaagtacagagtaacgttaagtaatcagttcaaggtcgcatagcaagtgtcagtcccaggctttaaacccaagtctggctccagacttctcttagccttctactgcatcctgcgtctaatttgttgtgggcaggtttccctatgagttcacttcactgagcctcattctttttaacggtcacatagggttctatgctaggtgaactgtagttgcaccctttgctgtcagtgtcttcaactcccatatctacccacagttccccaactctgggtccccaaatacctcccctgtgtcccacgggctctgcagactctattttaagttggctaaaactgagcccatctcctcccacctgcacctcctccgtgttcttatatgaatgtcaatgtcggcacccactggtcacccaggatggaggaaggagccagactgcgagggaataaaggaagtaagcaggttccaaaggacgtggaaggcctttgggtccagagcctagggaaaagttgagccctgcaaaaaataaaagaggctgggttagctttggacatctgtgggaaacaggtgggaagagggaggatggaggagccaaatttaagcatcgggtacttaggtgctcatctccaaggcaactgcattgctatggcaacagcagaggcagcaccgccccgcccaagtacctcctggaccgccgttacctctgcaccagccagactcttccgcatgggagggctgggggcttgcggacctccgggaacagctcaggcaggcgggagttgctgcggcattagccaatccataagctctatcccgcctgggtgggctctgcggcgacgcgcgccaagaaggggtcgggagttttttggcgctcgctaaagggcgttgagaagggcgggcccgcgtcgcttcggaccactcaggagccgaggagagcgagtgggcggggccaggctgaggctggccgggggcggggcgcagggataacgtgggagggtccgcccagcctttcttctacccaatagaaggccagaaagccaatccggaccgttagggagcccaatgggcgtcgccgccaggccccgttgcagagcgcgtctagccaataggcagcggcggcgggcgggcgcgggcgacaggcggcgcagctgaggcggagcaggcgctgcggcaggagggaagatggcggacgaggagaagctgccgcccggctgggagaagcgcatgagccgcagctcaggtgccgcgggggtcggggctggggcgggactgcgcgggcccgcgtaagcagggctcgagctcgccccttgggcgcggcggcagcgctgcctccctcccatggggtcctggctcttccgcgtcgtccccggggtaacggccccggcccgccctgttgtggggactgcgagcctcaggagccgccgggaagcctgaggaagctgaggcagggggctgggcgggtgagggtccggggagtccggggcgatggccctggccctgccggcccggctgatacctctcggcctaatgcacctgacaccccgggggacgtctctgcaccttgctgggcccgggggcacccctgggagggagacaccccagtaccctgcaaagggcgtagggtgttgcccggcctcgggtccacaacctacccctgctaacacccctactgtgtacacctaatgctgagtctgcgacatcgcccgtgacattctgccagacgatggcccctgtgcttaggcccgatttaagggttagccacaatgataatattgccagtaacagggcatgtttttctctgtgtcaagcgctttaarttctctctgaattgccgcaactctgggagccaggtagttattacttccaccttaccagcaaggaaactgaggtcagaaaactgaaggaactcgtccaagatcattcatttcaggggccgggggttggattaggacctaggcagtttgcctacaaatccccctccccgtgtcactgcaaactcctgaggagcaggcccagcatctgtgggcaggtcccgagtcactctgctgcctctagagcccatagcaatcgcatttgcartaataattctccttggttgagtgccaggttctggtgaactgtttggatacatggactctcctcattaaccccatgaggtttgatctccttattctctattccccatttttcagatgagaaaactgaggtgcagggagattagagcccattgccaaggttttagagtgagtcagtagctcagctgcatttgcacctggaacccgcgctctcgcccaccctgctctagccctggcctgtggctgggacctccagcataaaccggatgctctgcccagctctgggcccatttctgctgtttctgctcagttcaaccctgatggcttcctttatgggtgacactccatgtcacccaggcgaactgtcagcctttggagtggcacccagtagggtctttacttccagtttcttgttcacagtcttcactccttcataccyctcactccctgggtaacatcgggccaccagtaatgctggttcctagctctgcaacaccatgcacggtgtagtagctaagagcagagctttcgggtgtgaagtacctgagtacagttcctgccttcccctgtgtgtgcctggaacagagtaaacactcaggaagcgttacccactgctgccattcccagagatgcaaaaggtgaggtctccgttttgccatctatacaatagagataataaaggctatcccactcttaatgtgtgccagtttctgtcctaggcattttgtagatgtgtgagcttatttagtgctttcttattattatttttggagatggtctcactgtgtggctcaggctgcagtgcagcctctgcctcccaggcttaagcaatcctcccacctcagcctttcaagtagctgagaccacaggcgtgtaccacccacccatggctaattttttattttttattttttattgtttgtttgtttgttttgagacagaatctcactctgtcacccaggctggagtgcagtggcatgatcttggcgcactgcaacctctgcctcccgggttcaagtgattctcctgcctcagcctcccgagtagctgggattacaggtgcctgccaccacgtctggctaatttttgtatttttagtagagacgaggtttcaccatgttggccaggctggtctcgagctcctaacctcaggtgatccacctgcctcagcctcccaaagtgctgggattacaggcctgagccactgcgcccagccagcctgttgtttttgtttttgttttgagacaagagtctcactctatcgctcaggctggagtgcagtggcatgatcttggctcactgtagcctccaccttccagattcaagcaattctcctgcctcagcctcccgagtagctgggattacagacatacaccacaacgcccggctaatgttggtttgtttgtttgtttgtgacggagttttgctcttgttgcccaggctggagtgcagtggcacaatctcagctcactgcaacctccatctcccgggttcaagcgattctcctgcttcagcctccccagtagctgggattacaggtgcctgccaccatgccgggctaattttttatatttttagtagagatggggtttcactgtgttggccaggctggtcttgaactcctgacctcaggtgatccaccccaccttggcctcccaaagtgctgggattacaggtgagagccaccgtgcttagcccttttaaaaatgtttaaaaattattatttagtcctttcaatgaccctaaggtaggaactgttatctccattttgcaggtgagaacaccaaggcccagggaagatatatcacatttgaacccagattcagatttgaatccaggtggcctggctgctgagtgcatggtttgagtcactccctgtcccccagcttcctctgttccatcactctgggttattttcctccttgaagttatcagggattgatactatcctgtgtttcatttgcttgtttagcacctgtctgctctcacctagaatgttagctctctaagggcagggactgtatcctgccacattggcccacgtctggagagcctgtggcacatggtggatacaccatggatttgttgaatgaaggcgccccctgcaagccaggccctcaccctggcttctggctgtgggcccaggggtgtcctgggagcacaaccctagctgaattcctgcctgccctcccctccaggccgagtgtactacttcaaccacatcactaacgccagccartgggagcggcccagcggcaacagcagcagtggtggcaaaaacgggcagggggagcctgccagggtccgctgctcgcacctgctggtgaagcacagccagtcacggcggccctcgtcctggcggcaggagaagatcacccggaccaaggaggaggccctggagctgatcaacggtgagcagggcgagggcaggggcttgggagggggtcttctcccaggtgagcctttgtagaagtcacatcagacccttyaccccagcttgctcagctgccaggcgtggtgttggccaacacaaaaacgccagtgcatgacctgaccctgaccttcacagcagccattctctttcttttccatctggcatttgagggtgagccaggtaggggcagaggacccagcctgggggctggcagacatgggttcaggtagtagctgtgcctctgtgaactctgtgacctttgggaggggactcgtgtcacctcccctagactcagctttctctgtaaaatgggcatcctctaaggaccattgtgaaggttcaagggaataaggcaatggattttgcacagtaggccctcagtctgtgggaagtgttgtcaatagtaatatcatccactaggggcctgagtcataaacataggtggatccagagagagcagtcaggaaggtagtgagtgcatgcagggtgcggtggctcacgcctgtaatcccagcactttgggaggccttggagggcagatcacctgaggtcaggagttcaagattagcctgggcagtatggtgaaactccatctctactaaaaatacaaagattagccagatgtgttgacgcatgcctgtaatcccagctactcgggaggctgaggcagggaggcagaggttgcagtgagccgagatcgcaccactccactccagcctgggcagcaaagtgaggcaccatctcaaaaaaaaaaaaaaaaaagaggtagtgagtgccagtagatagtgagttaattctgacctaagggaggaagctattccctgctctgttctgtgtttcctctgcagtctggcaccaaggtggcaaactttaaaggccagatggtaaatattttaggttttgtgggccatgcagtctctatcagctctgctttgtaactggatagcactcataactaatatgtaagcaagcacatggtcatggctgtgtgccaagaaaactttactatttacaaaatctgggaggatttggcctgcaggccatcatttgcagagccctgtctaaagctgtccagtttggctgccactcccaccctgtgcgggaggatcacttgagcccaggagtttgagaccagcttgggcaacatagcaaaaccccgtctctaaaaaaataaaaaaattagctggacatggtggtgcacgcctgtagtgtcagctacttagaagactgaggtgggaggatcctttgagcccaggaggcagaggttgtaatgagccgagatcacactaccgcactccagcctgggtgacagagcaagaccctgtctcaaaaataaataagataatatcaaaaattggtttctcaattgcactggtcatactttagctggtggctgccatctttgacagcgggaatataaaacatttacattcttggccgggcgcggtggctcacgtctgtaattccagcactttgggaggccaaggtgggtggatcacgaagtcaggagatcgagaccatcctggctaacacggtgaaaccctgtctttactgaaaatccaaaaaaattagtctggcatggtggcgggcacctgtagtcccagctactcgggagataggcaggagaatggcatgaacccgggaggtggagcttgcagtgagctgagatcgtgccactgcactccagcctcggcaacagagcgagactccgtctcaaaaaaacaaaaacaaaaacaaaaaaaaacacttttccattcttgcagtaagttgtgtctgatgcctttctcagagtccccaaacctgggctgtccctactccaaacaacccatctctcaaccatgcccagacagcctgggttgctatgcagctctgccacgtcctggctatgtgctcttgagcaagttacttaacatctctgggcttcaatctttttctccttcttcttttgagacagggtcttgctctgtcacccaggctggagtgcagtgttcatagctcactgcagcctcaacctccttgggatcaggtgatcctcccacctcagcctcccaagtagctgggactgcaggctcataacaccacacctggctgatttttgtatttttagtagagacaggacttcaccatgttgcctaggatggtctcaaactcctggcctcaagtgatccttccacctcagcctcccgaagtgttgggatgacaagcatgaaccaccgcccccagctgtcagtctttttcatttataaaattagtattagaataataagacccacttcacagggtagttgtgaggactcctggctaatacagtaaagcgggagtaacagctcctggcatcggtaaatgttctgtcattgttagtggtcactgtcattgctgttgttggttgtggtagcacagggcccagcacagagtgtacactcggtcagtattggctgttgttttactctctcatcacttggtccagttggcctgtaggatgttattacatatgcacacccccaacatggcatctaggacagtaagtgccacccgttagtcttatatgtaagcatggcagagagaagcygagttcttgcacagaatcttgaaggctgattgaagagccagcctcctgacctctgagggcagggactggatctctctctttcccctgtattcccatcctgccacacaaagcctggcccagagtcagccctcacagccttgtttcatgagccagtaggaagcaagaaggattcctggcacaggacggggcagaagtaaaggcctaggactaggatgtagccagaactctggggaaggctttgcagggagctagggggtgatgagacccttcacgggcaggtcccagccaggttgaggagggtccttgtcaggtgaggaggtttggttctttcctggaggcagcaggacatatgtggccatgtgggaccaggagaggaacccacagtgctctgctttcagcagagatctgtgaagctagaatgtcaagggccagggaagtggaaggcccagaaccttcaggggttctggttgccccagagcaagaagaagaagtggagggagaagccaggagagaattgcaagatgacccttcaggtcctcccagctctagtggtctctgttctgaggcttccggaccctataagagtgagcaggagggtgcaggcatttggggatggagcggcatgaagtgggctcctgggggtcagcagagcagccaggcgcaggacagagctgctccaagcaatcctgatgagagctggcagaaggctgaggtcggtggggatagtgaggagggcatgggtctgggtgtggtgggcgagggtgtctcgcccatctctgggttggacaggtgcacctggtaagtagccaggccctgaggcgtcaccrtaggtacctgcagattctggaatgtcagcaggagccttgcctgcccacctggtggaagctgtgggaggaattggagcaagaggcggtgtgacttgaacttgggggctggaagtggaagaagaagtgagagggagcagacccgagagagattcaggaggcaggatagagaggactgggtgatggattaggtgggcaagggtgggatgtctgggggagggtcagggcagaacagcgtggcccaccctgggctcgtacagggctggatttcagtgccagctgtgtggtcttcatttcctgagcctcagttgcctcatctgtagaatggggagagggtggctatgaggatccaggagctatgggctcagtggctggcgtgctctgcacggtggagcctcagccccagtcattggggtgtggacgatgggggagctgaggtcaagtcaaggcctctgctcacgggcagcccctgctgccaccccacagcccgtagaaagagttccggataggaccacaggaggcctggtgggctcagcacacagatgatgaccttggcacacgacctccctctcctggtatcctcctgcctgagacggtgctggggcagatctcctcagaggtcgataggaggatgcagtgaggtggccccggccgaggtacactcggtaacagatcatcatgtgcagtgtcggcgcaggcattgggcacctgggcctcattttctcttccatgawgtggatgttctcccctcgagggttcatgccgggtgatcaggagaccatgatttgggcagctcactccccagctggcagccgggctaaatctcatcagtgcccatttagatctggtgctccgcccttgccccgaagggacaggctgcctgcagagagagccgggacctccacattttctgctgaggctccttttcccagcattggctcctctgcagctgctgggccacagccagaggctgtcagagatccaagggagtcattgccagtgtccttgtctaaggaggatgggccatggagaagccctccctgcccgctctccacccagatctgttgacagccacccctcacatgcccagggcctggagggtcccagcaaggctgagactatgagcagctgtcctactcacatacccatcccagcatccaggtcagcccctttgtcctggggtcctcaaggtcactggcgcccttccagcctgctggccttgggccagcctctagcccctccttctggatcttggtcttstcagatctgaccctgtcacctctttccccgaccaggccccttcccctctggtgcctgggcagcctgggggaagtatgytggaagcagcgtaatgatctggcaaggcagaggagacagcacgtcttgaaacatttttggggtcaaggactaccccatttgttccctcactcccacctaggtcactgatgtgcattagcttggactgttgtaacaaaatatcacagacagtgtggcttaaacaacagtcatcactttccacagttctggaggccagaagtccacaatccaggttccctcagattctgttcctggcgagaacccacttcctggcttgtagacggctgccctctcactgtgcactcacatggcattccccaggcgcatgtgcacggagtgaaggagcacgagctctctggtgtctcttataaggacactaatcctggccaggcgcagtggctcatgcctgtaatcccagcactttgggagactgaggtgggtggatcacctgaggtcaggaattcaagaccagcctggccaacatggtaaaactccatctctactaaaaatactaaaaaaaaagccagatgtagtggcgcacacctgtgatcccagctactcaggaggctgaggcaggaggatcgcttgaacccgggaggcagaggtcacagtgagccgagattgtaccactgcactccagcctgggtgacagagccagattctgcctcaaaaaaaaaaggggcgctaatcctgttggatcagggccccacccttatgacctcatttaaccctagttacttccccaaagtccccatctccagatgcagccacactggaggttagggctttaacacatgaatttggggtgacacaaacattgagtccataacggatgggcagcttggatctgtcaggggcctgctctgcaacagccactgcttaagcggtcactgattcactccttggaacaggctccaacgtgggagcagcggttaccccattttacaggccagttgagtgaggctccaagaggtaaagtcacctgccagactctcattgttcaggagcagcagaggtaggatctggacctgatggagtctggagtcagcacccataacatgtcctcctggaccttggggatacactgtgagcaggctggctggggtctgccagcacagataggtgccattctgttttgcatactatttcagggggtcctgaacaccttgaagcaggtggaggcccctgctccagactgggagctcctggagaggccaccctgtgtctgtgtggttctaagctggagccacatcgaatcaggatggggctccagcacccgacagyccccatcaaatttcacaggttttggcgccgtcgggcaaggctgacacattgtcttggaggaggcccaggaagtctggccttagggtcgcagcctgagtttcaggcagatagggcatgagattccagcatttctgcttcgagccccgtggtagatccctgtctscctccttccccatggcctatttctgtctcatttattcattaacttcttgaacattcgtgaacacctgttttgtgcacagtgctgggttctgagggtgcagcaatgaagaaggccaacccagcagcctccattcctgcactgtgaggcgggcaagcaacacaccaatgggacggtagtaaatgcagcacccagggggaggcacctaacacagtgggggattaggggaggcttcttggggagaccagaggatagctgatgagtttcaggcaggacaagaggcttaaaccaaggtctgcgaggtgggagtcggaggatgtcattgtcgcggggtcaggtacaggctgagctaacaagacacacaggaccaaacccctcaaggtcagcctcacagagcaggaactcaggaagaaagcgtttttgtttgtttgtttgtttgtttgtttgtttgtttgaaatggagtttcgctcttgttgcccacgctggagtgcagtggcaacgatctcagctcactgtaccttctacctcccagtttcaagagaaagcgtttttttgtttgtttgtttgtttktttgtttgtttgtttgaaatggagtttcgctcttgttgcccacgctggagtgcagtggcaacgatctcagctcactgtacctttctacctcccaggttcaagagaaagcgttttaaaaaaaaaaatcattccagctacttgcgaggctgaggcaagaggattgctgcagcccaggggtttgaggccagcctgaacaataaagtgcgaccccatctctgcaaaaggaaaacaaaaacagtcattgcaggctcccatcatagcagaaaattttccaagagagctggcaggtcagaggcagatctgggtgatatgagctattggtgtgccaaagtgtggcttttatttgtttttaagtggtatggcttgcacactatgtgtgtgagagaggacaacttgggcgggctgtccaatttcagggatccctgtggctgtgtccccagccctggccgctgggggctgtggcaaggtgatgcttgttcagggcctgggcctggctcctcagacgctcagtgcctgcaggcagtcctgcttccccgaagtaggtgggtacctctgggggcaccgtgcgatcccctggctggcttagtggtccagacagaaggggggacaggggactccagtgctctgtgcctaaggccaaggagatacctagaagttcagggagaggaggggtgggagggggtcctagcaacatctggtttaagtcggagtcactggtggatgtgtctggcacagaggaggaccccgtggcagccctggaagcggggcattctgatcaaaccagggcatcacgggcagaagcctctgtaatgtgccatcccaacagaagctggggccctgtatggcatcgatgtccctgtcagaccaggacacgtgggccggcagggccaaggatagggagagcagagcagtagaggctgcgtcatccctgggatgcagtccccatggaggggaagaatgatgacagcaagggacgttggtcagggtcctgctcggtgccgggcactatgctgcatgtcacagccactggcacaagactgtcaggcggaggggcacagggatgtcagggcagcaggtcgtggtgacatccagctcagataccaggacactggtggctgccatgacgtgcagccaaacagggagctatggctgtgctctcacggtggtaccatttccactgcagtcccaagcaggttagagcgtgaggccgaggggccctggggacacttggatcagtccagtgtgttcagcaggtgccacggttgggtgtccaggcctcccagcactggctaggtcacccagcagtgttcccgtgggtctccaacaggctccaggccagtgtatcagctatgtatgtcctgggcaagttggccggcaggtgtgtcatggcatcatttaggtcagaaggagcaagggtagaagtgtcagggtgacattaagaaaccccctactgagtgtgtcagggtgaccttcacgttggagagaagaactggtgtccctggagagtggctgccaggccttagggtacacggggcgggtgcagttcacccagagggctgccctggcttgctggggctgtcgcaccactggcctagggaggacactggaagggacgcccgtttgtgtcagagcaagaggattggggtagggcaggctttggcccatgggcaccttcctgggggtggcctggagtcaggaaggcggtagccattcctcctgacctggcacgtgcacaagactgcatacacacacttgctcacacacagtcacaccacacacaccacgtgmacacacacgcagccctccccacttggcttccgaaacgtgagtcactcagatgctactctgctgccgtcttgccccctctgctggcagccctgttcctcctaactccaccagccctggcctcctccgcctcctggagagtcagagccgatgggctagtttgggccacacagggtggggccaccctgagttctgccagcatgcagactgtaggtggggagccgggagaagagctatgttgcctgcctctgggaccctggggctacagcccacgagtgtcccttgcagagcccaccagggtgccttggaggcccatcccagtgccaggctgttcttcccagatgggacagctggggccacaggctgccgtggcagtgctgggctttctctggacagctctcccacctctgcccagggggcccggggggccagccccctgcctgggtcagcctctccctgcctgctgctctcctctggcccatccagcttgtatgtagattttccctcacgtgtgtgtgtgtgtgtgcgtgtgtgtgctggtgagagtgacagcgggagcagggatgtgagacctgcagggtggcagggctcatggatgactggcggggtgcattaagtgctcatgctcgtgaaaggcacctcttcttgggtgtgggtgaggacaggtgtgactgcgcatgcaggtatgtgtgaggagaggggttgtggggagcatgtgcgcctgtgaggggaggctttccaactgaagtgctgcctcccccgctggccagctctggagtcctccatcctgtctggtcaggccccccccaacccctgacctggcactcccattccgttccatgtccacaggctacatccagaagatcaagtcgggagaggaggactttgagtctctggcctcacagttcagcgactgcagctcagccaaggccaggggagacctgggtgccttcagcagaggtgcgcaaggaatgggcctcaccaggttgggggacccttaccaccctgaggggtagaggccrggagggtctgggcattgggctcccaggtgccacaccggccttcggggtccagcaggtggcagcacagccccttcctcaggcttcagaggctgctctgctgggcagggccagggccacacagggaggggggctgcarcactttcttcctggcatcatctctaccctggggggcatggtctcttgtgtgtctgtgcacagatgtcctcatcccaggcccrccaaggtgggtacatcctgtcctctgcctcttcctttttgtggtttaaggttgagggccctgagagtcccagggcctgtcccccagaatccctctcaaaggtggggaaaccaggggtgagaggaggtggccctgagtttaggcctgtctggccaggacagtggaaatcagggacagaggggactaggcctcctcctcttcctcctcttcagtcctcggggtctacagaaaaacatcagggagaggccaggatgggttgcagggtgtggtgtgcaggtgtcttagtggggtggggcggcagcatggggccagcagctgcccacctcctccgaggaggctggtgggacagatgacatggcagggctgggaaccaggcccagggagacgagttcactaccgaagtggcccctaaatgcacggcggcggccgtagccctgcctgctatccttcatgctgtcctygggcttcccagggcctccttaatggccctgccacccccagctgggccgccgctcagcactggcaataaacatggtgacrgatgagtgtggacgagtgtgaggctcagcgcaggcaggagccccatctgtcgcggctgccacccgccctgcctcatcctggcctctgccagcccagccctgacacccccaccgcccctcctggctcccaggtcagatgcagaagccatttgaagacgcctcgtttgcgctgcggacgggggagatgagcgggcccgtgttcacggattccggcatccacatcatcctccgcactgagtgagggkggggagcccaggcctggcctcggggcagggcagggcggctaggccggccagctcccccttgcccgccagccagtggccgaaccccccactccctgccaccgtcacacagtatttattgttcccacaatggctgggagggggcccttccagattgggggccctggggtccccactccctgtccatccccagttggggctgcgaccgccagattctcccttaaggaattgacttcagcaggggtgggaggctcccagacccagggcagtgtggtgggaggggtgttccaaagagaaggcctggtcagcagagccgccccgtgtccccccaggtgctggaggcagactcgagggccgaattgtttctagttaggccacgctcctctgttcagtcgcaaaggtgaacactcatgcggcccagccatgggccctctgagcaactgtgcagcaccctttcacccccaattaaacccagaaccmctgctctgctctcctgtgtctcatttctcctcagggaagcatagtggggaagatgtcgtggggaggggatcatagcccccccatcctaagggtcccagctgcaagttctcccccgaggcttccccttgccctgggccagggggagtcacagcagctggctcttggggacatgggcactgtccagctgcccagcaccctgagatctgcttccctgccatctcaggggcttccagaaggttcgtgggtccaacccggcacctggcccagcacccattgcagctgcagttaccatgacaacagggccctcccggactggagggggctcctgcagggagggggatgggagcagacatggcttttagtgcctgaaggtggagcagagggaatcctggggtgggtggcggggagatggggtcccccgccagtgtgggggctgtggatgtggcatgcctgacccccatcccctgttcagtcggggggctgtgggtctgatggagaagtggttattcctgcatgccctgttccccctccacttgatggggaccagcccagattgcgggggtgcctggctggcagagcttagggacctgagcaactaaagcccggccccaggggacctcccctcccccaagcgctgagtttctaataaaggccaagcctcataaacaatcacctgtgyccgctcccatctggctggcttcgggagcaatcgctcattcgcctgctgcctgcctgccggagcatttgtcattaggaaggtttaatgggtttcctctcagctccagagggctggggagagccggctgcatggatacaccgccaggcagaatgttctcccatcgcctggtggaggggggttgggagtgaggcagccatgccaccattcacaccaacagttggatgtggggttggggaagtgactgcacccctcctggaacagtagaggccctgggtctggaaggatcggaaattagtggctggggcccagagggtttgctgagttccactccagggtgaagaatgggctttgtgtcctgaccatcagcagcagggcccagggaaggctgtgcatcgttctgtgtgggagccgctgcccccacccgtgtgtatgtgtgtctgcgtttgcccaagaatgtgtggggccatgtgactggtcgtctctctgtcctgtgcattttgggagtcctccggttctgagagtcctccggttctgagtgtgaccacctgcccctccaggtacccccttcccttgtctgtctgtgcagtggccaaaacccaaatgagaatgtcgctgttaggtaaacatgcctccagagcccacttcggggccggtgattcattattaagcagctgcgcattccctcacctcccacccaccccctcaccccctcctgtctagaaccagggcataaatcccaggcctttaggatggtgacagtgtagtcttccctagtgccacttacaggcacctcccaggccagacccgccccagggggtcagtctctacgtgcccctggcttctgtggccgctgggcagagctggagcaggtcaccttggggtaaacggtattactgccccaggacaggagttggcttcgctgtgcccacgtccatgatgagaggggaagtcagtgagttagcagtggatagccgaagacgcacacagattgatcctggcctgggaaatgttagtctgcctgcccatccttgtttgtaacaaaagccacaaactcaaaaggagctctgagcgtgtgtgtgtgtgtgtgtgtgtgtgtgtgtgtgtgtgtgatctctctgaggacctgatacagatgtgatggacacacccacacccagccctaatctcggtgtgaggatgtggctccccagcactcagcatagtgtggacacagattgtggacctcagcagcctcaattctccaccttactttaggagaatccagtatctaaggccgataaactacctcgtcccctcactgtggagactctctgcctccaaataaatgtgagttgggggggatacagatgttctaggtgtcctggctttgtgctgcttttcatttcatttcttcagcaggtacagggtaaagtgcctctccacatgctaatccgggaattaatcctttttccgatgtcaaacatattcgcttaaatggaaattaattgcttttcttgaggatttctctaaaaattggttttaaatgagtacattaggcagtcccatttattattcgttggtttcgttcccaatatggcccyggtatccgagttcccggagatgccagcacggagcggagatgatttaatcagggtaaccattaattagagatgaggagagcctcccccaggaggagtgggagtgccccctttgtggcctcagcagggtggcggtctgggccaatagggctctttaaatgattgtttctgctctggattcaatagggaccaaccactggggtcaacatggggcaggatcacctgggcagcaccccctaccttcattcttggtccctcagccccaagggtgacgctcctcacctttcttgtaccccttccaactagcctggctgcaccccttaggtctgcctcatgcaggccttcagacaggcctggctcgtataaagccctcatctggttcttccccttctgtgacttcccttcccctgcctttagccagatctctaaggctgctgaggacttagcgtctccttttttattttttagattgagacaaggtctcactctgtggcccaggctgcaatgcagtggcactcatggttcatggcagcctcgaactcttgggttcaagagatcctcccacctcagcctcccgagtagctgggactataggcgcacgccaccatgcctggctaattttgtaaaatttttttagagacgaggtcttgctatgttgcccaggctggtcttgaactcctgggctcaagcagtccttccccctcagtctcccaaagtgctgagattacaggcatgagctgctgcatccagcctactcctagttcagtcccttcctgtctccctcatactcttctttcctgcctccaaaacttcttgtcttttcctctccttcccctccaagaattctggtcccccatcaagggctgtccctgcccaatccctcctgcaggcaaacaggctccaggtgtgaggtatgagtgtgttcaattgaaggcacctgagtgcccctttaaaaggctgtttctagcttttttgggattagtttactcggcacaaatgtgacttgtctaaaaacgatttttgaaattacaaagcaacaagagaaaaaagaaaatggaaaaattcagctgggccctactctttcatactcagcttcttaaaagccagctcgattgttaaaaacccattaaaaaattgccagactggccgggctcagtggctcacgcctgtaatcccagcagtttggaaggccgaggggagcggatcacttgagcccaggagttcaagaccaccctggacaacatggcaaaacccccatctctactaaaaacacaaaaattagcctggcatggtggtgcgtgcctgtaatcccagctactcggaaggctcaggcacgcgaatcgtgtgaacctgggaggtggaggttgcagtgagctgagatcatgccactgcactccagcgtgggtgacagagcaagactgtctcaaaaaaaaaaaaaagaaaaaaaaaattccagacctcttagtaatgcatcaacagtgattgcagagtggcaatccagtgacgggagaatactcatttgaggccagttttcattgctgtgctagaattctcggttgttttgatcaaactgcttttaaacgaattgctttcgatcaaaacaactttggattgggtctcctcacccatctccccaaagggctggccctggggaaccccttccccccagttcgcttaagcttgagtcatggaataaggggatcctcactggagatgggtctccaggcttggacttcggggccacctccacctctgtcgccattggacacacacagtcaccgaagcgtcaaatgtcaaaggtcctgtttattccggcaaaccggaaagaaaaagtgtaaataaaaaaagaaacagatccatgcactcaactcctgggggtgggggtgggggtgggagtgagggatgaggaatgggtgggaagcaaggagggaggggtggaaggacagagagagagagacagagagaggcagagacggaaagaactggagaaccagagccataaaaagaaaaagacatccataaaaaggcagaaagaaagaagtggtgtattaaaagcagagatcaataaaggagaagaggggaaattgaaaaaatagacagaaatacataggcagagaacaaaagcccagcaaaaaggcggggagaaagggcgtgacagagacagagagatcacccttgagggacacaggcagaatgaaaagggcccccagcccccggaggccccccaggcagcagcccgagccacagcattggctcaggggtccccagaggtgctgatgacgtgaaacagggtgacattgtagagcacctggtggccgttgttccaggtatagagggcrcgctcccgggggttgtaatccagcatcgagatgtgggaatactggttgtggaagggcacgtccgtgtactcgtaactggacgtgttggtaaaataggcgaagtagaccttggccccagccaggtgggagttggtcacgtagagcacaccgcagatcatgaaggcctcgccagcgctgcgcttggggtagccggtgtcccaggaccgcatgacctcgagggtgtgcgggtccagccggctgaccacgatgttgcccgcgttctggttggtggtgtacacagcccagagcccgctctcgtccaccatgaagtccatgtcggagaagccgccccaggagtaggggaaggtgttgttgtaaccggcgcccgggaggctcctctgcaccagcacagagcgygagcggaagtggtatttgaccaccacgttgctctggtacttgttatagaacagggagccgttgtacaccacgtggcccgtgcccgcccacggctggggcagcaggtgctggataaagttctggcctttgatgaagtctcccagggtacggaactccaggacccggcggcctttgtaatagccatccatgtaccagacctatggtagcagccgctggtcactggggggaaccaccaccaacgacccaagggtcccagcaccagctacagccattagagttcaacagtcactaagtggtcattagtcatgggaactctgttgaccattcattaccaattatggccctagtgtgaccatgatcatctcctggtgacagcattaaccatgggcagtgaattcaagtgacgtcttatcactcaatggctgtccagtgaccactaaccacccaatatccaatgaccagggaattcctgggcccagtgagtccccaggggctgcagtttcttggggaactgcatggccccagtaggacccaaatcccagtgagtgctattggtctttttttttttaagtaatttttttttttttttttgagatggagtccctctctgttgcccaggctggagtacagtggcgtgatctcagctcactgcaacctccgcctcccaggttcaagtgattctcctgcctcagcctcctgagtagctgggattacaggcgcatcccaccacacccggctaatttttgtatttttagtagagatggggtttcaccatgttggtcaggctggtctcaaactcccgaccttgtgatccactgtctcagcctcccaaagtgctgggattacaggcatgagccaccacgcctggcctttttttttcttttgaaacaaagtctcactgtttttcccaggctggcgggcagtggcacaatcacggctcactgcagcctcgacctcccaggctcaagcaatcctctcacctcagccccccggaatagcagggactacaggcac

SEQ ID NO: 95424 - DNA, 74094 bp, Homo sapiens
ttcctcccctggctctaaggtgggttaggggccctgatcatgggttctgacaggtttatgggcctaaggttcactctggtgagactgtcttctgtcattccctttctgttcctaccctagtccagcttccttcaagtgctatccctttggtctcccatggcctggacaactggccatccctggggccactgttttgccctcaggttctggatgaaagacagctggattcatggtccgtactgctgagtgagtctatgatcttgggtaagtggcctctgagagtcctatgtgatgaatatttcaggccatggcaaacagggtcctgctacctaccttttatggttaaggattaaattaaataattcccaggctgggcaacatgggacaccctgtctctacaaaaatatataaaaaattagtcaagcctggtggtgtgtgcctgtgggtcccagctacttgggaggctgagatgggaggattgcttgagcttgggaggctgaggttacagtgaatggtgatcgtgccactgcattccagcctgggtgacagagtgagaccctgtctcaaaatagaagaaggctgggcacagtagctcaagcctgtaattatagcactttgggaggctgaggcaggaggatcacttgagttcaggagtttgagaccagcctgggcaacacggcaaaaccttgtctctacaaaaattaaccaggcgtgctggcgcatgcctgtattcctagccactcgggaggccgaggcaagataattgcttgagcctggaaggtggaggttgcagtgagccgagattgcacaccattccattccagcctgagagacgggagtgaaaccctgtctcaaaaaacaaaacaaaacaaaacagccaggcgcggtggctcacgcctgtaatcccagcaatttgggaggccgaggcaggcagatcacgaggtcaggagttagacgccagtctggccaacatagtgaaacctcgtctctactaaaaataaacaaaaaattagctgggcttggtggcgggcacctgtaatcccagctactcaggagactgaggcaggagaatkgcgtgaacccgggaggcggagcttgcagtcagccgagatcgcaccactgcactccaacctgggctacagagcgagactcagtctcaaaaacaaaaaacaaacaacaaaaacaaaaagccccaggcacagtggctcatgcctgtaattgcttgagctcaagagttcaagaccagcctgggcaacatagtaagaccctgtctctattaaaaaaaaaaaattgaaaaagaaaaagttatctaaagagcctggtagactacgtaagtgctgattcaatattaatcgctgggaattttagtcttattattcagtcttcctgggtcctgccaagtgtgagcaattcatagcaaatggagggtctgtgtgaaggttcacttctggccaggatgacccttccctaccagctgttgggggaactgtgtgtgcatgtatatgtacatgcatataaacacattcacttgtgaattttataatacaaatattttgcaatacaaaaatgtaaaagtatgccctaattttaaactcctttctggtgcttcttgtggttgaaggtaaagtactttttagggctaggtgccgtggctcatgcctgtaatcccagccctttgggaggccgaggtgggcggatcacttgaggtcaggagttcaagacaagcctggccaacatggcaaaacactgtctctgctaaaaatacaaaaattagctgggcgtagtggcgcgtgcctgtaatcccagctactcgggaggctgagggaggagaattgctggaacccaggaggcagaggttacagtgaaccgagatcgtgccactgcactccagcttgggcaacagagtgagactctgtcaaaaaaaaaaaaaaaagaaaaaaaaaaagaaaaaaacttagccccatttactaatagtattttatttaccatcttatcaatttttcagtgtacagttcagtatatacacattgttgtgcaacagatctctggaatcattttgtaaaactgaaactcttgaacaataactccttttcctccttcccccccggccttggtaaccactattctactttctgtttctaagattttgattactttagatacttcataagtggaattgtatggtatttgtctttgtgtgattaggttctctcactgtgcgtaatgtcctcaaggttcatccatgttgtagcatataataagatattttttcttttcttttgttttttggagacggagtttcactcttgtcacccaggctggagtgcaatggtgtgatctcagctcactgcaacctccacctctcgggttcaagcagtactcttgccttaacctcctaagtagctgggattacaggtgcatgccaccatacccagctaattttgtatttttacttttatattatttatttatttatttatttatttattttgagatggagtttccctcttgttgcccaggctggagtacaatggtgtaatctcagcttacctcaacctccacctccagggttcaagcaattctcctgcctcagcctccggagtagctggggttataggcatgagccactatgtccagctaattttgtatttttagtagagatggggtttctccatgttggccaggctggtctcgaactcctgacctcaggtgatccacccgccttggcttcccaaagtgttgggattacaggtgtgagccactgcacctggccattttttcttttttaaagactgaattaggctgggtgcagtggcttacacctgtaatcccagcgctttgggaggccaaggccagcagatcgcttgagctcaggagtttgagaccagcctgggcaacatggagaaatcctgtctctacaaaaaatataaaaagttagcccattgtggtggcacatacctgtagtcccagctacttaagaagctgaggtaggagtatgccttgagcccaggagtttgacacctgcctgggcaacacagcaagaccccatctcttagcagcaatatgatctttttttttttttttcctgtctcttggctgttgtgactaatgctgcaatgaagacgggtatgcaaatatctctttaagatcctcttttcaattcttttgaatttatatccagaaatgggattgctggatcatatgataattctatttttaatttttttgaggaacttccatgctgtttctcatagcagctccaccattttattcgactctcaaccgtgcacaagggttccagtttctccacatcttcaccaacacttattatttgacagtggccattctaaggggtcttagggatatttcattgtggttttgatttgcatttccctgatgaccagtgatgttgagcatcttttcatatgcctgttttctatttgcatatctcctttgggaaagtatgtattcaaatcatttgctctttttgtttgtttttgagacggagtctcgctctgttgcccaggctggatggagtgcagtggtgcaatctcggcttgctgcaagctccacctcctgggttcacaccattctcctgcctcagcctcctgattagctgagactacaggcgactgccaccacgcctggctaattttttgtatttttagtagagatggggtttcaccacgttagccaggatggtctcgatctcctgaccgcgtgatccgcctgccgcctgggcctcccaaagtgctgggatcacaggtgtgagccaccgcacccagcccatttgctcatttgtaaatcgagtttttgttgttgcattgtagaaatttattattttttaaatttttatttgagacagagtttctctcttgttgcccaggctggagcgcaatggtgcaatctcggctcactgcaacctccgcatcccaggttcaagtgattctcctgcctcagccttccgagtagctgggattacaggcacaccaccatgcccagcaaatttttatattttgaggagagacagggtttcaccatgttggccaggctggtctcaaactcttgacctcaggtgatccacccgccttggcctctcaaagtgctgggattacaggcgtgagccaccaagcctgacgggtagtaatttattttttatataatttttttcttctttttttggtagagacgaggttttgccatgttgctcaggctggtctaaaactaccgggctcaagtgatctgcctacccgggcctcccaaagtgcagggatcacaagcatgaaccaccatgcctggctgtaatttttcatatattccggatattaaccctttaccagataatacagtttgcaaactttttttttccccattctgtaggttgccttttcactgttggtcatttcttttgctgtatagctatccttaagtttgttgcaaacccatttgtctatcttttgtcttgttgcctgtgttttgctgtcatatccaagaaatcattgccaaatccattgtcatgaagcttttccccatgttttcttctaggagcactatagtttcaggtcttatgtttaatctttaataagttttgtgtttttgtatatggtgtaaggtaagggtccaacttcattcttttgtatgtggttatacagttttctcagcaccatttgttaaagacacaatctttcccccatgttctggtgctttaaaaaaaaaaaaaattctggctggttacggtggcttaggcctataatcccagcactttgggaggctgaggcaagtggactgcttgaggctaggagtcccagactagcctggccaacatggtgaaaccctgtctctaccaccgaagatacaaaaattagccaggcgtggtggagtacgcctgtaatcccagcctactagggaggctgaggcatgagaatcgcttgaacctgggaggcagaggttgcagtgagccaagatctcaccactgcacgccagccggggtgacagagtgaggcagggtcttaccctgtcgcccaggcaggagtccagtggcccaatcatggctcattgcagcctacactgccagggttcaagccatcctcccacctcagcctcccaagtagctaggattacaggtgtgtgtcaccatgcccagcaaatctttgtattttttgtagagatggggtatccctatgttgctcaggctggtcttgaactcctaacctcaagcgatcctcccacctgggcctctcaaagcactgggattacaggcgtgagccactgcgcctgacatggtgcttcttaatttattcttactttttatttttatttttttgagacaaggtcttgctctgtctcccaggctggaatgtagtggtacaatcatggctcactgcaacctctgcctctccggttcaagtgatcttcctgcctcaacctctggagtagtttggactatgggcacatgccacaacgactagctaatttttgtttttctttttttctttctttctttctttctttttttttttttttgagatgcagtttctctatgttacctaggctggtctaaaactcctgggctcaagcgatcctcccaccctggcctcccaaagtgctgggatgacaggcgtgagccacgtggtgcttaaaaaaggcaacaaaaaaccccccacacactgggtatagaagtggcatgggcctctatacactgtgagattcttggtactagctacaaattctgtgtatactcaagattttctagagtaggtgcaattaccccgttttacagatgaggacacagaggctgagccgtagtgacccacctaaggtcgtatagccagcaaatagatggaggttggattggaactgaggactttactcaagggctctcacaaacccttgggggcttctcgctgctttatccccatcacacctgaaagaatgaatgaatgaatgcctcgggcaccgtgcccacctcccagcaaaccgtggagcttggacgagcccactgctccgcgtggggggggtgtgtgcccgccttgcgcatgcgtgttccctgggcatggccggctccgttccatccttctgcacagggtatcgcctctctccgtttggtacatcccctcctcccccacgcccggactggggtggtagacgccgcctccgctcatcgcccctccccatcggtttccgcgcgaaaagccggggcgcctgcgctgccgccgccgcgtctgctgaagcctccgagatgccggcgcgtaccgccccagcccgggtgcccacactggccgtcccggccatctcgctgcccgacgatgtccgcaggcggtaggtaccatgggggggaacacggactcagggggacaggcagggcgctgggtggggggtcgcttcccctcggggtggccggtggcygctgctgacagacgggcgcgcatgcgtggggtggtgcggcgcgcagcggcagttggcgcgggcagggtggcacttccggtcgcgcgtgcccgggctgtttggcgccaaaatggaccgtggattcccccgtagctccctggtggctagaaactaggcggggtgggggttctcttttgatccccaaatacagcaagctttgggttcgtttccggggtccccttcttcaagcagcggtgggccgggctcctgactccagcttggtcgcacaggaagtgggcagcccgcggccaacggacacccctcgggcaccggcacttcggcctccacttccggtgtccggcccggtccccgggggcgcttctgtggtggggggtccctcagtgcctttcccccaaagctgtgcatctcgatggcggcctccagagacggatgtcacccgtcggggcctgggctgggctggctcatgttcgagagcccagccttccgtggggtactcattctgtcagttgggactgtgtggttcttgctccttgggaaagtccatgttttggcaggaactttaaccgtgcattgcagcgcagggcccgggaagcgtgaaggctgcatggttggtcttttcctgtaaatctgtgcctgtgagccgtgggcatcagggaagtcttgctaatgagaactggctacactttcgtgtgtgtttgtgtgtgttcatgggtgtgttctttagtgtgtgtctaatgttggaggccctggctttagcagttcatgcctctgtccaacttccgtgcacaaggatcagtgggagcactggtcccagccccttgttcatgaacgccatcagttcattcctgaaaacttgttcaagtgaggtgtgcgtgagtcagaggaaccctcaccaggcgtggacacttccagctggatttgtgaaagcactctttgccatttttctatttccttaggcttgttaactgacctggttgggccagtccggttctgatttgggtctttggggagggatggatatttggttcaacccccgctttttttcttttctttttttttttttttttgaaggctgggtgctgtggcttatgcctgtaatcccagcaatttgggaggcagtggcggacgaatctcttgagccaggagtttgagaccagcctgggcaacaaggcaaaaccccatgtctactaaaaatacaaaaattagcctggagtagtgccgtgcgcctgtggtcccaactactcaacagactaaggtgggagtatcacttgagccccagaggttgaggctgtgtgtagcgagctgagatcgcgctattgcactccagcctgggtgacagagtgagaccctgtctcaaaaaaagaaacactttttatttttagagatgggtctcactctgttgtccaggctggagtgccctggcacaattataactcactgtagccttgaactcctgggcttaagggatcctcagcctcctgagtagctgggaccacaggcgcccaccaccatgcccagatgactttcttagtttttgtttctgtatacgtgaggtttcaccatattgcccaggctggtcttaaacccctgccctcaagcagtcctcctgcctttgtgtcccaaaggttaggattacaagtatgagccatcatgccttaactactacttttttttgtttgtttgtttgagatggagtctcattctttcacccaggctggaatgcggtggcgtgatctcggctcactgcaacctccactttcagggttcaagtgattctcctgcctcagcctccgaagtagctgggattacaggtgcacaccaccacgcctggctaatttttgtgttttcagtggagtcggggtttctccatgttggtcaggctggtctcgaactcctgacctcgtgatccacctgcctcmgcctcccaaagtgctgggattatagtcaaaccacttcttaaccagttagtgggtatatatcttcttgaatcatctgtgccagtattctcccaaaataaaacttgatttaaaatggaatggaagtgaaattatgaaagtgcctggcttcatgatgttacacccaattcagagaagtttgggcccggccttccttttttattccttttttttattttgtagagatggggtcttgccatgttgctcaggctggtcttcgattcctggcctcaagcgatcctcctgcctcagcttcccaaagtgttgggattacgggtgtgagccaccatgcccagcctgcccagccttcttgaaaacatgacctccactggctcaatgaccttaaacaagcgtatgccacctctatatccatagtctaggaataatgacatgggttttcagctggtattgggttaaatgagaatatgcatggcacataaaggttcacatgctagtggctaacttagcttgtttttttcagtttttttttaagagacaggatctcactgtgtcacccaggctggaatgcagtggcacagtcatggcttactgcagccttgaacccctgagctcaagcaatcctcctgccttagcctcctgagtggctggcacatgccaccatgcccaagttaatccttaaaaaattttttagaaggctgggcgcggtggctcacgtctgtaatcccagcactttgggaggctgagatgggcagatcacctgaggtcaggagtttgagaccagcctggccaacgtggcgaaaccccatctctactaaaaatacaaaaaaattagccaggtatggtggcaggtgcctgtaatcgcagctactcgggaggctgaggcaggataatcgcttgaacccaggagccgagattgcaccgttgcactccagcctgggcaacaggagcgaaactctgtctcagaaaaaaaaaaaatttttttttttagagatgagggtcttgctttgttgcccaggctggtcttgaactcctggactgaagcaatcctctgcgttggcctcccaaagggctgagattacaggcgtgagccacagggcccggccattattcctcaagagttcttaaaagtggatgctgcaggagttaactgccaggaagcaggaattcctgctaaggtctgctgcttgccaaagcctttcccttcaacaggggttgccagtaggccactggctcaggggctctgttggccctgtgcaaatattttgtttggctgaattggaataccattaggtgagccttacaatccaccactgaccctgggttccacatttctttacactcagattgcttcactgtaggcattggagttttggaggactgcttttgaccatgtggtagacattgaaattgtagtttatatgactcactccacagacttttttttttttttttacattttgaaaatatttcattaaatgaaaaataaacatggtatccaacagtacttgaaacttagatttttttttttttttaattgaggcagggtcttgctctgtggcccaggctagagtgcaatggtgtgatctcagctcactgcagcctccgcttcccgggtttaagcaattctcctgtctcagcttcccaagtagctgggattacaggtgtgcaccaccacgcccagctaatttttytttttccccctcgaggctgagycttgctctgtcgcccaggctggagtgcagtggccgtgatctcggctcactgcaacctccacctcccgagttcaagcaattctcctacttcagtgtcccaagtagctgggattacaggcgcccgccaccaagcccaggtaatttttgtatttttattagagactgggttttgccatgttgaccaggctggtttcaaactcttgatctcaagtgatccacttatcttagcctcccaaaatgctgggattacaggtatgatggtgtccagccggttcattgtttttattttattttattttattttattttattttattttattttatttwattttatttttgagacagagtcttgtgctgtcgcccaggctggagtgcagtggtgcgaacttggctcactgcaacctccccctcccgggttcaagtgattctcctgccttagcctcctgagtagctgggattacaggcatgtgccaccacgcccggctaactttttcttatttttagtagaaaccggggtttaccgtgttggccaggctggtgttgaactcctggactcaagtgattcgcctgcctcagccccgcaaagtgttgggattacaggcatgagccaccgtgcctggccttttaattcattcttaagcctgctctcagacagctaggcttgcttctccacaataaagagtgttgaattttgtcggtgtatcccgcatggtgccattataacactgaaattagtgattatttcagggtctgttaccagagcgtgtctgccgtattcactgtatctgcagcttggagcacagtagactcaaatgcttgcatgccagctcttcccctgtacagcctggattaacactgatgctagcagactcctttgcacaactgattagctttcgtaactaccacagctttcttactgctagtcattctgtgatgggattaagctaggtcttgaactccttaactccagttccttggctactactgagtacatactgaataaggcaaaattgacttacctcttttgttttgctcccctgtggtagaattctaggggtacagactgctgggtttcaaatgccgccctacttgccagccgtatggctaagttattgaacttcttggtgccttggtgtttcatctataaaaagggggtggggctgcctgctcgacaggggtgttaggaagactgagcttatcagtacagatatgttgagagcagcacctgtccaaagcccttcatcactggttattacgtggtactgtgtgtacagtggggatgctgtgggtttggttccagaccactgcagtaaagtgaatctagcaagaaagtgagtcacacacacattttggtttcctagyatgtgtaaaagttattagactaggccgtgtgcagtggctcatgcctgtaatcccagcagtttgggaggccaaggcaggaggatcgcttgagccaaggagttcaagactagtctgggcaacataggaagaccccccccatctcaaaaaaaaaaataaagccaaaagtggtggcatgcacctggggtcccagctactcgggaggcagaggtgggaggatcacttgaacccatgaggtcgaggctgcagtttgccatgattgtgccactgcactccagcctgggtgaaggagtgagactctgtctcaaaaaaaaaaaaaaatcagctgggcgtggtggctcacgcctgtaatcccagcactttgggaggccaaggtgggcagatcacgaggtcaggagatcgagaccatcctggctaacacggtgaaaccccgtctctactaaaaatacaaaaaaaattagccaggcatggtggcacacgcctatagtcccagctccatgggaggctgaggcaggaaaattgcttgaacttgggaggcggaggttgcagtgagccgagatcatgccactgaactccagcctgggcaacagagcgagactccgtctcaaaaaaaaaaaaaaaatcatctgagtcttcagcgattcataatctttttgcaggtggagggtcttgcctcaaacttgccggcttaaaggacatacatttattaccttatgcaggtcagaaatctgatgtgggtttcaccggatgaaaatcaaggtgtaagcaggctgcattcctttctgggggctccaggggagaatctgtttcctattttggggtgttggcagaaggtggtagttgtaagactcaggtcccattttcttcactggttctaaactgagggtcgttgcccgcttctggaggcggtctcatccctcggctcatgcccccttcctctacctttaaagtcagcatttgcgggttgcatctctctctgacccgtcctccaacgttgcccgctctctgcagctagaaaggttctgtgytcttaagggctgaagtgattagattgggcccaccccagataatccaggataatctccccatctcaaggtctgtattcttagttacatctgcaaaatcgctttggccacgtaaagtaatatattcacaggttccagggattagggcatgaacatttttcggtgggtccactctttttgagatggagtctcgctctgtcacccaggctggagtgcagtggcatgatctcggctcactgcaacttctgcytcctgggttcaaatgattcttgtgcctcagcctcttgagtagctgggattacaggcgtgagccaccaagcccggttaatttttgtatttttagtagagatggggttttgccatgtttcccaggctggtcttgaactcctgagctcaggtgatctacccgcttcagcctcccaaagtgctgggattacaggcatgagccactgtgcccagtgggtctactcttttgcctactgcggatgccttcttgggcagccctgctccagctgccatgcagccggcctgaagaagctggtttgacagagacttgtaacttgtcttgcatggtccactatattttatttttagagacaaggtcttgctgtgtcacccaggctggaatgcagcggcacaattatagctcactgggctctagtgatcctcctgcctcagtctcctgagtagctaggaccacaggtgcatgctgccacaccaagctaattactattttttgtttaggcagggtctctgctgtgttgcccaggctggtcttgaattcctgagctctattgatcctcccgctttggcttcccgagtagctaggcctataggcacatgctagcacacccagctaattactaattactattttttgtagagacagggtctcgctgtgttgctcaggctggtcttgaattcctgggctctagtgatcctcccgcctcagcctcctgagtagctaagactataggtgcatgccaccacacccagctaattactattttttgtagagacaggttctcgctgtgttgcccaggctggtctcaaattcctgggctctagtgatccttccgcctcggcctcctgagcagctaggagtacaggtgcgtgctgtcatacccagctaattactgttttctcgtagagacagggtctcactgtattgcccaggctggtcacaaattcctgagctctagtgatcctcccgcctctgcctcccgagtagctaagactataggtgcatgctaccacagccagctaattattctttcttgtagagacagggtctcgctctgttgcccaggctagtctcgaattcctgggctcaagtgatcttcctgtcctggcttcccgagtgtagagattacaggcatgagccactgcgcccagccatggtctgctgtatttcagacgagcatttctggcgtagaggtgttagagtaatctaacattttataatttcttcctatccaatctatactagatacctctgctgggttagttttcttaacacggctctgatgtcattggttctacttccccttgactgctttggtgtttgttaactatggaacaagatggataagtgtgatgcttttgccctccctccgactgtccccagccacctctctggaggtgcctttccctccctgtatgtggccagtctcacgtttgtttcttgtgtgtttccagaaccagccacttctcaatggtgcccctgtttgagcagcttcctgtgcccggttcacacagagctgtcaacttcttcctgaggctgttataccctttctcttgggaatcccgcaggcgtgagctgtatttgccttattcctctgtggttgtttatatatatctttttttttttttttttttttgagacggagtttcactcttgttgtccaggctggagtgcaatgacgtgaccttggctcaccgcagcctccacctcccgggttcaagcgattctcctgcctcagcctcctgagtagctgggattataggcatgtgccaccatgcctggctgattctggatttttagtaaagacgaagtttcttcatgttggtcaggctggtctcgaactcctgacctcaggtgatccgcccgcctcggcctcccaaagtgctgggattacaggcatgagccaccgtgcctggccagctgtttatatatatcttatctcccctctgcagagggttcatctctgagggaagcactaggaaggaatcatagggtctcaggctgggcactaagccggcattctgagtcctctgctccgtccttcacggctgtctgcgaccctcctggcttcagcaggtgtgatcggtgtcatcacagttttaccagggaagggatgtcgctaaagttaccctcccgccagctcctcactgcctgcctgggatcccacctgccactctggggccaggcaggttaaatccagtttctactggatgaaacattctaggggttttgaaggtttctctattctctttgccaggctaaatatcccagttcatatgaggggttgaaagaaagcagacccattctgcaaggacaccttggtctccgcaatcagttgaaccttgtccttcacaccccaggcaacctcgggatcaggggactggctggcttggtcgaggtagaagccatgtccttccagttttctcagcggcgtgactgagaagtcaagtgtaacgctattaccacagcgtgtgtgcctctggctggaagtaccagtttctgtagccctcctgacttaaggctctccttggaccccagttgctacaagggtagaatgacttttgcctggaagaggttccttgtgctcctggaaatcctgatgtcaaagcatctttttttttttttttttttcttttgagacagggtcttgttctgttgcccaggctgaacaggctggattgcagtggtaccatcataactcactgcagcctcaacctcccaggctcaagcgatcctcccacctcagcctcccaagtagctggtaccacaggtgcacactaaccacacccagctaatttttacattttttttgtagagatgggatctctcagtgtagcccaggctggtctcaaactcctgacctcaagtgatcctcctgccttggcctcccaaggtgctgggattacaggcatgagccactgcgtcttgcctggccttgtagcaccttgagtccaagtgatacagtatatataatatacagtctatattaccactgtgtttgtagggtgctaagtgtctcttctacagagcagtcttttttttttttttttgagacagagttttgctctgttgcccaggctggagtgcagtggcatgatcttggctcactgcaagcttcacctcccgggttcacgccattcttctgcctcagcctcctgagtagctgggactacaggcgcccaccaccacgcctggctaattttttgtatttttagtagaggcggggtttcactgtgttagccaggatggtctccatctcctgacctcatgatccgcccacctcagccttccaaagtgctgggattacaggcgtgagccaccgtgcccggccctacagaatggtctttcctaaccacacagcaagtcaggaagtccctgcctagtgacacctacatctaatcacttagctctttgcctggagcagggcctggcattcagcaggtgctcatatgtgagcggcgctggtggggaatcagggcccgcatgacccagagcagctgttgtaagacatgggtccagcaaagcattcctcatgctgctgcctgcacttaccctctaggaaggccagcctggaggagccacttctgcccttcaggcaaatgataactgagcacctgtctgtgcgggtgctaggtggaaaggtccagagatggcagtggcctggtccctgcctggggcaccttctctccaccaacagacacttacccagctggttagacctgttctcaccccgcagtctgtagttagcacccaggctgggaacaacagcctgtgttcctctccctttccttggtaccttctcttcttgttcctttatttttttctgaagagataggatcgccctatgttgtccaggctggactcgaactcctgcccacaagccatcctcccaccacagcctcctgagtagctggggttacaggcacgcagcaccgcggcactgcaccrgctattgttcttttatttttttccctctttgtccctgaaagagtcaagctactaattgtcagtaatcaaatcagaccaygatttcccaggcaaactcctggcagttctacatttaggaatgactagctagagacatcctgaagaatgagttattcggggaggcgccagccacctcctctaacttcacctctatctgccctctgtgtgggtaccccttgcttccctggatgcttgactcccccatttcatcctcaaaatgccaccaccccccaccaggcctttaggaacatcagctggctgttccccacagtgtcctgtggccctgggctactcattctgacactggccatactgtggcacaccttgttatgggctgttgtcagacccaactggagaaagaccagctgtaggtcatttcccttacgggagtgccccaactatatgacctgccccctctttcctggtatctttttgagtcagggtctcactctgtctcctagattggagtgcagtgatgcaatcacggctcactgtggcctcgacctcccaggctcaggtgatcttccttcctcagcctcccaagtaactgggaccacaagcacatgccaccaaacccagttatttttattttattttattttattttattttgagacagagtttcactcttgttgcccaggctagagtgcaatggtgtgaccagctcactgcaacctctgcctcccgggttcaagtgattctcctgcctcagcctcccaagttgctgggattacagccacccaccaccacgcctggctaatttttgtatttttagtagagatggggtttcgccatgttggccaggctggtctcaaacccttgacctcaggtaatccacccaccttggccctcaggtaatccacccaactgctgctgtatgttgggattmcaggcatcagccaccacgcccagccactaatttttgtatttttgtagagatggagtttcgccatgtttcccaggctggtctgaacgcctgggctcaagtgatccgctcgccttggcctcccaaagtgctgggattataagcgtgagccaccatgcctggtctctggtaccttttaaaatatacaggctgggcatgatggctcatgcctgtaatcccagcactttgggaggctgaggcaggtggatcgcctgaggtcgggagttcgaaaccagcctgaccaacacggagaaaccctgtctctgctaaaaatataaaattagctgggtgtggtggtgcatgcctgtaatcccagctactcgggaggctgagccaggagaatcgcttgaacctgggagtcggaggttgagctgagatcacaccattgcactccagcctgggcaacaagagcaaaaccctatctcaaaaaaaaaaaatatatatatatatacacacgtatatatacgtgtatatatatayacacacacatatgtatacatatatacgtatgtatacacatatatacgtatatatacacatatatatgtatatatacacacatatacgtgtatatatatacgtgtatatatatatgcatgccagacatggtgactcatgcctgtaatcctagcacttcaggagactgaggcaggcggatcacttgaggtcaggaatctaagaccagcttaaccaacatggtgaaaccctgtctctactcaaaatacaaaaaattaacgaggctggtggcacctataatcccagctacttgggaggctgaggtgagagaatcacttgaacccagaaggtgagggttgcagtgagctgagatcgcaccactgcactccagcctgggcaacagagcgagactccatgtctgtctgtctgtctatctatctgtataatgtatatgtatgtatgtatatatgtgtgtgtatatatatacacatatatacatacatatatacacacatactctgttacagagctgctgtgtgtgtgtgtatatatatatacacatatgtatatatacacatatacacatatatatgtatatatatacacacatatatatacacatatatatgtatatatatacacacatatatatacacatatatatgtatatatatacacatatatatgtatatatatacacacacacacacatacacataattstgttacagagctgctatgtaatctcacaatcatcagaaaaatgacccccaaaaggggaaccttgttcagatcagatgacttcttagcattaggcattccagtaggacactctagactcttgcggggagamaaaagccagcttagttttttctaacactcatatgttaaacttgtttgtgtccaaaacttctttagaactgtgatattcttacaggcaaatgaagttgcttaacaagtgtttgtattttctcccctatttcttcctcccaggctcaaagatttggaaagagacagcttaacagaaaaggtaatctccaccttaaaatttttcttattaccaaatctgactgacacactttgtggctcataaaaagaaatttgttttctttaaatggattttgcattttttcccatggagtttcaaagataatttggatattcttgttaaatgtcagcactaatttgctgctaatagttgggtggtggtggtgtttttttttgttgttgtttttgttttttgagacagagtctcactctgtcacccaggctagagtgcaatggcatgatctcggctcactgtgacctctgcctcccggattcaagctgttctcctgcctcagcctcccaagtagctgggactacaggcacgcaccaccatgcccagctaatttttatattattagtagagatggggtttcaccatgttggccagactggtcttgaacgcctgctcgtgatctgcccaccttggcctcccaaagtgctggaattacaggcgtgagccaccatgcctggcccaggttttttttttttttaaccaatctcagttcctaaacaatctactctggattgtaacttgtcctggtaacactgttttattgtgtttttgttattgttttgagatagggtctcattctgtagcccaggctggagtgcagtggcacaattttggctcactgcaaccttcgcctcccaggctcaagtgattttcccactcagcctcctgagtagctctaactacaggctcaagccaccatgcccagctaatttttaaatattttttgtaaagatgggattttgtcatgttgccccaggctggtcttgaactctggggctcaaagcaatccacttgcctcggcctcccaaagtgctgggattataggtgtgagccactgtgcctggccgacactttacagaagcacagtattattcttataaaccatgatatgtctccatctcacctccagctttcccatttttcaccactttggagacaggagtgaagtgatcctaatggaaattccctgaacacatttcatgactgtttagtgttttgactgagacagcattgcctgccattcactcattgtgatgtgatcaggcagctcaataatttgtgtattagtccactagtgaatagcttgggaatgtgggtactgctaaacctatatccttcccttaggaatgtgtgaaggagaaattgaatctcttgcacgaatttctgcaaacagaaataaagaatcagttatgtgacttggaaaccaaattacrtaaagaagaattatccgaggtaagtcagttctcagcatcctagcctctagaaaaatgtctcctcctagtaacttgtctgtgaccagggaggcagcaagatccccagctgtcctcattgcctgatgatgatgatgatgatgatgatgatgaaggaaacacatgtgtttccttgttctctgacacttgtttacattcactgctacttaaattatcctttcctgctgtaggagggctacctggctaaagtcaaatcccttttaaataaagatttgtccttggagaacggtgctcatgcttacaaccgggaagtgaatggacgtctagaaaacgggaaccaagcaagaagtgaagcccgtagagtgggaatggcagatgccaacagcccccccaaacccctttccaaacctcgcacgcccaggaggagcaagtccgatggagaggctaagcgtaagagcagatgattccttttatttttaattgtttttgagatggagtctcactgtgttgcccagtctggagcacagtggtgtaacctcggctcactgtaacctctgcctcccaggttcaagagaccctcctgcctcagcctcccaagtaactgggattagaggtatgtgccaccacacccagctaatttttgtatttagtagagatggggtcttaccatgttggccaggctggtccagaactcctgacctcaagtaatccacctgccttggcctcccaaagtgctgggattacaggcataagccaccacgcctggccctgcttaactctctttctttctttyttttttttttttttttaatgacagagtcttgctctatcgcccaggatagagtgcaatggcgcgatctcggctcactgcaacctccgcctcccagtttcaagcgattctcctgcctcagcctcccaagtagctagtattacaggcgggcaccaccatgcccagctaatctttgtatttttagtagagatggggtttcaccatgttggccagactggtctggaactcctgacctcaagtggtcctcccgccttagcttcccaaagtgctgggattacaggtgtgagccaccgtgcccggccccacttggctcattttcaacctagaagcaggctttggtagcatataagggggcagttaaacttggaccccaggtcagtgtgtccaggttcctttcttttgtacgcatcctcactagtaattactggacacttcctaactagcttagatgtgtacgtctttaaattttgtcttagctgggggtgtggtggctcatgcctgtaatccctgcactttgggtggccaaggtggctggatcacctgaggtcaggagttcgagaccaccctgcccaacatggcaaaaccctgtctctactgaaaatacaaaaaatttgccagacgtggtggcgggtgtctgtaattccagcctgggcaacaagagtaagacactgtctcaaaaaaaaaaaaatgttgttttcgaccaagttgcagcattagatcccaaaacatggctatgagtgtgacaggttgcagatgacaagtgctacaaatacttactccttctaagaccttatatgcctggttaaacatttattctcagactcttgcccagttttaggcaaaggaactctaatggaaattttttttttttttttttttttttgagatggagtcttgttgtctcccaggctgaagtgcagtggcgcaatctcggctcactgcaagctctgcctcccaggttcatgccattcttttgcctcagcctcccgagtagctgggactacaggcgcccgccaccatgcccggctaattttttttgtattttttagtagagacgggatttcaccatattagccaggatgatttcgatctcctgacctcatgatccgcccgcctcggcctcccaaagtgctgggattacaggcgtgagccaccgcgcccagcctcttctggaattttttaaaaaacaaacaataggatagtacttgagctcaggtctggttctcagctacttcatttttattttgttttattttattattatttttgagagagaatctcgctctgttgcccagtggcacgatctcggctcactgcaagctccacctcccaggttcatgccattctcctgcctcagcctcccaagtagctgggactacaggcgcacaccacgcctggataattttttgtatttttagtaggatggggtttcactgtgttagccaggatggtctcaatatcccgacctcgtgatccacctgcctcggcctcccaaagtgttgggattacaggcgtgagccaccatgcccagccttattttattttcttttaatttttattttattttttgagatggaggcatgcgccaccacgcccagttaatttttgtatttttagtagagacagggtttcaccatgttggccaaggtggtctcgaactcctgacctcaggtgatccacctgccttggcctcccaaagtgctgagattacaggtgtaagccacctcacctggccctttattttatttttttttgagatggagtcttactctgttgccaggctggagtgcagtggcacaatctcggctcaccacaacctccacctcctgggttcaagtgatttttttgcctcagcctcctgaggagctgggactacaggcacgtgccaccacgcccagctaatttttgtatttttaatagagacggggtttcaccatgttggccaggatggtctcgatctcttgaccttgtgatctgcccgtcttgcctcccaaagtgctgggattacaggcatgagccactgcacctggcctatttcttttttttctttctttcttttcttttttttttttttttaagagacagggtcttgctctgtcgccaaggctgtgtacagtggcgcgatcttggctcacggcaacccccatctcctgggttcaagtgattcttgtgcctcagcctcttgaatagctgggattataggtgtgtaccaccacgcccagctaatttttttgtatttttagtagagatggggktttgccatgttgtccaggctgttctcgaatacctgagcttggattattttcccacctcagcctctcaaagttttggtattatagatgtgagccactgtgcctggcccacttcatcttttgatattttaacaagaggctctgtttcctggccttctttagcatttggcccctcaaataactgacatgatatggctcaacaaactggcaggtgctaactgccaacattagcaagctggttgttgactagaataaaaatgcaaagatgcttagtccttagaacctggcttcctgcaatagcttagtaatgttgaactgcattattgctgtgggctttctattgatagtggcttttttttttctttttaatgctttttcttctttaaacagctgaaccttcacctagccccaggattacaaggaaaagcaccaggcaaaccaccatcacatctcattttgcaaaggggtcagtatacgataaattggcggctgccttttttaggggccggctgttttgggatggaattggtagggcgtcacgtggcaattctgtcttccgtgttgtataggttttcatcttgcggttctgttctctagacatttatgaatagcatttctgaaaacgttacctgtttttactcatataggaaagttcaaatgtacacaaaatcatgagttttgtataatgaaccctgaaatacccatcatctagtgccaacagttatcaagttacagccgttgtttcatctatacccccatattgtgtgtccctgccccacctggattactttgtccatawatagtttagtatatttctagacaatgagatctcttttgacaactttttaaaaaattactcatattttacaataattgctaacatttagcagtcttttttttttgagacagcatctggctgtcacccaggctggagtgcagtggcacgatctcggctcactgcaacctctgcctcccgggttcaagtgattctcctgcctcagcctcctgagtatctgggattacaggcgcgcgcckccacgcctggctaatttttgtatttttagtagaggtggggtttcactatgttggccagactggtctcaaactcctgacctcaggtgatctgcccacttcaacctcccaaagtgctggggttacaggcgtgagccaccgtgcccagccaaaacagtctttttaacaaaccaaagtataatactgttctgatgtctttataaaaatgtaagaattccctgctatcagatatatagttggtatttacgtttttccctttgtggtgaacaagccgtgtggcaaacagacagcgtttggttgacttgttccttaaagttatagattccttccctcctattttacttaaaattcctcacagattttaaattccttcatctcttatcttcttgccatttacttgaagaaattcatttgtccaatagttcctagattgggccgattgcatccttgtggtgttccacaggtccccttgccttctgttccctataaactgataggattacaggactgatcagattccagctttttattttttgagactgacttttttttttttttgatacggagtcttgctctgtagcccaggctggagtgcagtggcatgatttcggctcactgcaacctccacctcccaggttcaagcgattctcctgcctcagcctcctgagtagctgggattacaagtgcccgccacaacccctggctaatgtttgtatttttggtagagacagggttttaccacgttggccaggctggtctgaaactcctgaactcaggtgatcctcatgccttggactcccaaagtgctgggattataggcgtgagccactgcacctggtctgaggctgactttatggatggtgctgtgtccctccatcagaaaggtgtgtgaggtctcttctctgacactagcagctgttgatcggtgtttagacccgtgatttcttaggacttacaagatggcaagacaacattctaaacccgtcattcagagaaacattaaacttgaagcctctttcaacatcctggtgaatgagggtccacttcaggccagctggaggcctagggtcttgttccactaatggttggcctcactgtgtgtgacagccctgycaaacggaaacctcaggaagagtctgaaagagccaaatcggatgagtccatcaaggaagaagacaaagaccaggtagggccagtgctttcatttcctgactctaccttaacttggtgtatttgatgattgtgacttcatatgtgttctgtccaagtaaataaaaaccctgtctagggctctatttagggctctccagagagacaggaccaatagaatgtatatgtgtgtatacagctataggtacatatatacatatgcacgtgtatgtatatatatataattcgtttgatttttttcttgtttttatgggtacatagttggaatatatatttatggggagagactttattttgagaaattggctcacaagattgtgaaagccagcaaatttgaaatctgcagggcaggctggaggtccaggggagaaatgatgtcatagctcaagtggcaaggcagtcttacatacatacatgttatatatatgtgtgtgtgtgtgtgtgtgtgtgtgtrtgtrtgtgtgtgtgtgtatgtatgtatgtatttagacttctttttttgagacttttttttttttttgagacagggttttgctcttgtggcacaatcttggttcattgcaacctcagcctcccgggttcaagtgattctcctgcttcagcctcccgagtagctgggactacaggcgcgtgccaccacgcccggctaatttttgtattttagtagggatggggtttcaccatgttgcccaggctggtctcccatgttgcccaggctggtctcgaactccttgagcttaggcaatctgcccgcctcagcctcccaaagtgccaggattataggtgtgagccaccgtgcccagccaatttgttttttttkttgttgttgttgttgtttttaattttttttagatggagtctcactctttcactcaggatggagtgcagtggcacgatctcagctcactgcaacctccgccycctgggttcaagtgactctccatcctcagcttcctgagtagctgagactacaaggcatgtgccatcatacccagctaatttttatatttttagtagagatgggatttcactgtgttggccaggctggtcttgaactcctgacctcaagtgatccacccgcttcagcctcccaaagtgttgggattacagttctgtcttttttcttttcttttcttttctttgagacaggtctcattctgtcaccaggctggggtgcagtggcgcagtcatggctcactgcagcctcaacctcctgggcttaagcgatcctcccacctcaccctcccaagcagctgggactacaggcgcatgccaatgagctaagttttgtattttttgtagagatgaggtttcccatgttgcccagactggtctctaacaaataaattaaacaaattcctgacacaagatggagaatctttgattcttttacatagtatcaccaggcgatctctagtgatgggcagtgtgcctgcctacttctcggacctgcytttgttttggggttggtggggattaataccagagtaagagtttctcagatcttctccccaaaacccaggccccttcttttcccactcttgctctaaccatgtcaaatgtgttaatatttcaactcacacttttggtgttgaccttcccttgaaaccagtattctaatcttttttgttcttccttccctccacacaggatgagaagagacgtagagttacatccagagaacggtaagaatagttactmtacctttctttttgttctacgagttgtgtaatcttgatcacaaaactttttcagaaagtttaaggccgggcacggtgactcatgcctgtaatctcagcactttgggaggccaagaygggcgaatcacttgaggtcaggagttcaagaccagcctgaccaacatggcgaaaccccgtctctactaaaaattcaaaacttarctgggcgtggtggaatgtgcctttaatcccagctactcaggaggctgagtcagaaggattgcttgaacccaggaggtagaggctgcagtgatctgagatcattccactgcactccagcctgagtgacagagcaagactccatctcaaaaaaaaaaaaaaaagtttaaaaagaagaactttatcgtgtgtttccatggcaaccatatcgttaygaagtatctgaatttggggtcagatcattagcgtttagattcaagtagaattctcctgttttcttggaaggaatgaatcgagggcagctggcattcgaaccaggtgtaaaagtcatatcaaatactaaatgttaaatgagtatgtgtctgtcagggctcctgagataatgaagattgcttttggggraaagaggagctttatgaaaactgcttctttggggaagctcctggcactcacacttggggtctgtgttattttgcttgacagagttgctagaccgcttcctgcagaagaacctgaaagagcaaaatcaggaacgcgcactgaaaaggaagaagaaagagatgaaaaagtaaagctctatcacctctaagtttgttaattctcccttaatcctatatggtcccaatttccttccaggacgtggggacagggggtggggaacgtggaagaacaagatgggttttgctagtgatcgaaatgcctttgactttggctaaacacctttcaaacttgttttctcgtggtctctacatgaaaggtgggttatgagattgtgatagtgaggacccttgctacttatttgtgatattttattttattttatttatttatttatttttgagacagtctcccactctgtcacccaggctggaatgagtacagaggtgcgatctcggctcgttgcaacctctgcctcccaggttcaagtgattctcatgtcccagcctcttgagtcactgggactacaggcgcccgccgccatactcggctaattttagtggagatggggtttcactgtgttggccaggctgatcttgaactcctgacctcgartgatccacctgcctcagccaccaaagtgctaggattacaggcatgagccaccacaccggccaacctatgccacttaatcaactagtcacagagcttcagtttgtcacctcgccttcttgcttctctggctgatgagatctttgtgaagatctaattttcagacgtacgaggtgctaaaactttttttttttttttttttgagatggagtcttgctctgttgcccaggctggaatgcagtggtgtgatcttgtctcaccgcaacctctgcctcccgggttcttgtgcctcagcctcctgagtagctgggattacaggtgcctgccaccacagccagataattttgtatttttagtaaagatggggtttctccatgttgatcaggctggtcttgaactcccaatctcaggtgatccacctgccttggcctcccaaagtgctgggattataggcgtgagccaccacacccggcctaaaatacttttcaaacttatttttttgtagttctctacatggaaggtgggttatgaggttgtcatagcgaggatctttgctacttatttgtggtatttatttaatttaatttaattttttttttttgagacagtctcccgctctatcacccaggctggagtgcagaggtgcgatcttggctcattgcaacctccgcctcccaggttcaagtaattctcatgtcccagcctcccaactagctggggctacaggcgcctgccaccacacctggctaatttttgtgtttttatttatttatttatttatttatttatttatttatttatttattwgagacggagtctcgctctgtcgcccaggctgaagtgcagtggcttgatctccgctcactgcaagctccacctcctgggttcacaccattctcctgcctcagcctcccgagtagctgggaccacaggcgcctgccaccatgcccggctaattttttgtatttttagtagagaaggggtttcaccacgttagccaggatggtcttgatctcctgacctcgtgatcctcccatctcggcctcccaaagtgctgggattacaggcgtgaaccaccgcgcctagccaatttttgtgtttttagtagagacggggtttcaccatgttggccaggctggtctcaaactgctgacctcgaacggtccacctgcctcagccatcaaagtgctgggattacaggcacgagccaccacaccggccaacctatgctacttaaatcaactagtcagtttcagtctgtcacctcagccaccttctctggctgacgagatcttggtgaagatctaattttcagatgtaggaggtgctaaaattctttagcatcatccagacataaagttgtattctcctctctgaagtcagaccagctctttccccagtccctcatcttctttgtaaaatctgagtctaaggttctatgcaatacagatgctgggtcctgtttttttttctgtttgttttgttttttaataagatgactgagggccgggtgtggtggctcatgcctgtaattctagcattttgggaggccgaggtgggtggatcgcttgagctcaggagttcagggccagcctgggcaatgtagtgagaccccgtctctgcaaaaaatacaaaaatcagctggatgtggtggagcttacaacaggcagtgtgcctgtagttccagcttctcaggaggctgaggcaggaagatcacttgagctcaggaggctgaggatacagtgagccatgattgtcccactgcaatccagcctggatgataaagtgagactggtcttaaaacaaacaaacaaacaaacaaaacaaacaaacaaaaaaaaaccaagatgactagaagtttcttaccaacttaggtaggtgacgagtgccttacttgggagcttagtaaaggatggctgtccattggggaatcaactaaaatgtacagtaattttttttgttttttgagacggagttttgttctacttgcccaggctgcagtgcagtggtgtgatctcggctcactgcaacctctgtctcctgcgttcaaacaaattctcctgccttagcctcccgagtagctgggattacaggcttccgctaccacgcccagctaattaactttttgtacttttagtagagacaggggttcaccatgttggctaggctggtctcgaactcctgaccccaggtgatccacccgcctcggcctcccaaagtgctgggattacaggcgtgagccactgcatccggccgctgtacaataatttttgaaccattcagtacttgaggttggtctttcttgctttttttctttttttttaattgagatggaattttgctctttcgctcaggctggagtgaagtggcgcaattttagctcactacaacctccaccccctgggttccagcgattctcctgcctcagcctctccagtagctgggattataggcgcccgccaccccgtccgcctaatttttgtatttttagtagagacagggttttgccgtgttggccaggttggtctggaactcctgacctcaggtgatccacccacctcagcctcccaaagtccaggattacaggggtgaaacaccacgcccggccgaggctggtctttcattgatcacctttcctaccctgatcctagttaaattagacagcagttgcagtcagtgcatacctcgaatttgtttcagaacaagcagtcctaacgggctagttcaaccaccaccttccaaagaaggaacctggggcaagatcgaaatccctcacctgtaagcatactctcaggatttcttcttgtagtaggaagatttgctaagcgttttttttatttttatttgagacggagtctcactctgtcgcccaggctggagtgcagtggtgcgatctccgctcacttcaagctccgcttcccaggttcacgccattctcctgcctcagcctcccgagtaactgggactacaggcacctgctaccacgccaggctaatttttttttgtatttttagtagagacggggttatttatttatttacttatttattttttgagacggaatctcgctcttgtcgcccaggctggagtgcagtggcacgatctcggttcactgcaagctctgcctcccaagttcacgccattctcctgcctccacctcccsagtagctgggactgcaggcgcccgccaacacgcccggctaatttttttttttttttttttttgtattttagtagagacggggtttcactgtgttagccaggatggtctcgatctcctgacctcgtgatctgcccatctcggcctcccaaagtgctgggattacagtagtgagccactgtgcccagctgcaaagtgtttcttaatattcctgacctttgcgatctcttcacagactaccacatgtggagtttctgagggttggatttgacttgcctgattctctggcaagatgtgtctggttctttaaatgcagcctcaggctgggcatggtggctcacgcctgtaatgccagcactttgggagaccaaggcagacggatcacttgaattcaagaccagtctggccaacgtgatgaaaccctgtctctactaaaaatacaaaaattagctggtcatggtggtgtgtgcctgtaaactcagctacttgggaggctgaagcaggagaattgtttgaacctgggagttggaggttacagtgagccaagagtacaccactgcactccagcctgggtaacagagtgagactccgtctcataaataaataaatgaataaatgcagtctcagaggatgtgttgttgtgtctcagttggagctacttttcagattgggycatcctatttcattcctttaatatcggaagtagagatttataataaagttactttctgtgaggctatcaacacttaactgatgacaagtagtagaggaattttgaagtaaaaatactgaaactgcagtgttgtagtatctcctttctaagagtttcatttcctgtctacttaccccactgaagaagaaaagaaaattgctgtcttgaacacctggcacaagtgatcctctcacctcagccttccaaagttctgagattacaggcrtgagctactgtgcccactggtagacagtctttactcccaccagtggactctagaatcagttcaggtgttttatttccataggacactttaatagaaagatccaaaccaaatggaaaaaattaacttgkcttttttccctgcaacttaggaagaaaagagactccgaagtcaaaccaaagaaccgtaagtgcagcgaacctgcctttgtgctttgttgtgaaactgaattgctaacataagtatcttggtaaaataacgggttggtgtggaacagtgggcactaatcatatgtctcttatgtgggcaagttctgcttgtgaaaggtgagaccaccctgaagtgaaggctgaagttaacttttttaactttaatttaatttaatttaattttgagacggagtcttgctgtgtcacccaggctggagtacagtggtgcaatcctggctcactgcaacccccacctcccgggctcaagcaattctcctgtctcagcctcccgagtagctgggagtatgggcctgtaccaccatgcccaactaattttcgtatttttagtagagacagggtttcaccatattggtcaggctggtcttgaactcctgacctccgtgacccacctgcctcgcctcccaaagtgctgggattacggggtgaagttagcttcgatttctcctcccaaccccagggcccttctcagggttggtcacacagctgtgtgtcatgtggtagtgaaaggccatcaggtgagcagctgtgtcacttacctttcactgtgaaaatgctgtgtgacaaatggctccaaggccagaggcctagaacagtgagcatttttcaagctcacttgtctacagcttggtggctgtcggctgatcttgaggtggcttagtggggatggctgggctgacccagctctgcctccgcaatttggccaggctgggtacacgcttgtggctgtgccagaccacaagggcagaaatgaaaagtagcactttttcaaacctctgttgaaaaaagttgggccaggtgcagtagctcgcgcctataatctcagcactttgagaggctgaggcgggtggatcacttgaggtcaggagttcaagatcagcctggccaacatggtgaaaccccgtctctaataaaaatacaaaaaattagctgggtgtggtggtgcatgcctgtggtcccagctacttgggagactgaggcaggagaatcacttgaacccgggaggcggtggttgcagtgagcygagatcacatcactgcactccagggtaggtgatagagcgagactctgcctcaagaaaaaaaaaaaggaaaaaagaaaaagaaaacaattagctgaagcaaattttgagactgagcctgaatccagaggtgggcagaataccycacctgagcggcagggccctggcagagtgggaggtgaagactcggacccctgtgtgcagtcagctgtccacggtcactgactgacgctgatcgcacatcagcccagctctcaacctaggcaggccagacatgggtcttcctccaccgcaggctggattcccatcaggccacggaaatcatgacatccctttgtctgctttttgtattaaaccactggcatctctgaccaacattcagatggggtattgatggtgttcctgaagaccttgagtcctggagtagtaaatgccctctgggcttcctgcagtgaagacaggagaggcagcctgtcctctgaacctggggaggagcttgtgtcagcccttaggagctgttggccccggtgcagggccccccccgagctgaccagcctgtgtgtgtgttgtcttctgtgacagaacacccaaacagaaactgaaggaggagccggacagagaagccagggcaggcgtgcaggctgacgaggacgaagatggagacgagaaagtaaaggcgggttatttgtttctgaactccccctcattcttctgctcctgtttgcttgggcgggagtgcgcagggtggggctctgggttcaagwccagccccatccacccaggctccatggggccatccagactctgggaaggtcaccttttcctccttttgggggccgggatttgtggctggatgcctgtgctggatgcctagtgaacactcagttgtcctctgtctttcacactagagagggtctgtgtgagcctgggctgagatgtgcatgaagcatcctctcctgaggcctcactgctgagaagccttgacacacagtcagctctgacgcacatgtcagccacacctttgattctttcccagcctcctacgttctgagtctagctctccccctgccagcctccccagtctagtttagccaagtgcatgcgtttaaaccctaaagcatcatgtggaacactgctgggcctctgtcaaagtacaggatggccaggttgcctgcaggccctcctgcatgaactctagggaagggagctaggtcatcggtggggggcggcgggtccctatctaagagatgccgaagaccccaagagggtctctgggtttctgcctgttacaatctagagagtggagcccaaggtcacgggcttgctgggtgacaagcaccctcacttctgacccggtcgccagtgggcttccatccccaccccatagcaggggagcctttggtattgcctccagcctcccatccctcacctcttctgtccaaatgttggtcaccttactgtcagcactccttcagactggagtagtcacattactccctgccctctattggaaactggcaggggcctgagctcacactgccagcacttttgcctcatggtagaaagggatgtgagggctgggcatggtggctcactactgtaatcccagcactttgggaggctgaggtgggtggatcacttgaggtcaggagtctgagaccagccaggccaacatggtgaaatccggtgtcacctaaaaatataaaaattagccgggcatggtggcatgtgcctctaatcccagctacttgggaggctgaggtaggagaatcacttgaacccaggaggcagaggttgcagtgagccaagattatgccgctgcactccagcctgggcaacagagcgagactctgtctcaaaaaaataatatggtaataataataaaagcagtgcccagagaacaaggattgttggctgttccaccccagggggccccttgcacaggaggtgccatctctgcctcccaaagctctaagagccactgtcccccatcccaagagacagggtcttgctttgtcacccaggctggaatgcagtggtgcaatcacggttcactgtagcctcgacctcccaggctcaggtgatcttcccgcctcagcctcccaagtagctgggactataggcaggcaccaccatgtccagctaatttttttttwaaattttttgtagagatagggttttgccatgttgcccaggctggtctcagtcaaactcctagactcgagttatccacctatctcagtcccccaaagtggcggagtggtaggattacaggcatgaaccrttgcattcagtctgtttggtttgttcttttttttttttttttttttttttttttttttttttttttttttaagatagtctctctctgtcatgcaatggtgtgatctcgagtcactgcaacctccacctcccaggttcaagtgattctcctgtctcagcctcctgagtagctgggattacaggcgtgtgctactatgcctagctaatttttatatttttagtagagacagggattcaccatgttggccaggctggtctctaactcctgatctcaaacaatccacctgcctcagcctcccaaggtgctgggattatgtgtgtgaggcaccacgcccggcgtgtttgtttgtttgtttgtttgtttgtttttgagacaggatcttgctctgtttcccaggctagagtgcaggagtgcagtggtgctatcatagctcactgcagtctcctgggttcaagtgatcctcccacctcagcctcccaagtagctggcactacaggcatgcaccaccatggatgtctactttttaaacttattttttgtaagccaggcgcggtgtctcacgcctataatcccagcattttgggacactgaggtgggcggatcacctgaagtcaggagtttgaaatcagcctgaccaacatggtgaaaccccagctctactaaaaatacagaattagctgggtgtggtggcgaatgcctgtaatcccagctactagagaggccgaggcaggagaatcgtttgaacctgagaggcagaggtgagccaagatcataccattgcactccagcctgggcaacaagagtgaatcaatctctctctctctctccatatatatgtatatattaaccatatatatatgctgctttttgtattaaaccactggcatctctgaccaacattcagatggggtattgatggtgttcctgaagaccttgagtcctggagtagtaaatgccctctgggcttcctgcagtgaagacaggagaggcagcctgtcctctgaacctggggaggagcttgtgtcagcccttaggagctgttggccccggtgcagggccccccgagctgaccagcctgtgtcatatatatatatagtatattttgcagagatggggtctcagcatgttgcccaggctggcctcgaactcctggcatcaagcaatcctcctgccttagcttcccaaagtgctgggtttacaggcacatgccactgcacacagcctgtaaataaagttttattggaacagagccacactttctcatttacattttgcctgtgggtgcttttgtgctaccatagcagagatgatcatcctgacacagaccacgtggtcagcaaagctgaaaatactgatcctctggctcttacaaaaacagtttgccaagccctggtctaggaggttctttagtgccctcttgttagtttcaggtggggaattaagtgagggaaagtgaagcctcgtgtctacccggtagatctgcccaggcctgcctgtcttccagctccacagtgctgggatccctaacctgtaacttcagtgtttgcattttatctcactctggctcagaaactaattttttcccttctttatctctctacctcccccttatttttctgtcaggatgagaagaagcacagaagtcaacccaaagatctgtaagtgtttaaaatgcttgtgcttttgtgtcatctggatcagtagaaagcctgttctaggccaggtgtggtggcttgcacctgtaatcccagcactttgggaggctgaggtgggtgaatcacctgaggtcaggagttcgagaccagcctagcctggccaacatggtggaaccctgtctgtactaaaaatacaaaaattagctgggtgtggtggcgggtgcctataatcccagctactcggaaggctgaggcagaactgctagaagccaggaggtggaggttgcagtgagccaagattgcgccactgcactccagcctggacaagagtgaaactctgtctcaaaaaaaaaaaaaaaaaaaagcctgttctagaaacctgtggtgatgtagatgtgtggggaccctggggcctctgaaggcctcgtctcgggatgacaagctggcagtgtgcctatagagctcccatgggtatcttgctttcccatggggaggcattagtttgtcactttccgtgcgagttggcgatgtggttagtgtttctaagctgctacttgctgtgtatctgttcaccctgcagagctgccaaacggaggcccgaagaaaaagaacctgaaaaagtaaatccacagrtttctgatgaaaaagacgaggatgaaaaggtaaaggkctcacttttctttctttctttttttttttttttttttccccaagacggggtttcgccatgttgcccaggctggtcttaggaaaaagaagactgggcgtggtggcgcacgcctgtaatcccagcactttgagaggctgaagcgggtgaatcacatgaggtcaggagttcaagaccagcctgaccaatatggtgaaaccctgtctctactaaaaatacaaaaattatctgggcatggtggtgcacgcccgtagtcccagctactcgagaggctgagataggagaatcgcttgagcctgggaggtggaggttgcagtgagccgagatcgcactccaggctggggacacagcaaaattagctgggcgtggtggcatatgcctgtagtcccagctgcttggaagcctgaggcatgagaattgcttgaacccaggaggcggagrttgctgtgagctgagatcgtgccactgtactcctgcctggacaacagagcaagactctgtctcaaaaaaaaaaaaaaatgctgggcacagcggctcacgcctgtcttttcagcactttgggaggccaaggcaggcgcatcacctgaggtcaggagtttgaaaccagcctggacaacatggtgaaaccctgtctctactaaaaatacaaaaattagccagttgtggtgataggggcctgtaatcccagctgcttgggaagctgaggcaggagagtcacttgaacccaggaggtagaggttgcagtgagccgagatcacaccattgcactccaggctggggacacagcaagactctgtctcaaaaccaacaacaaaaaatacaaggacattggtcttattggatggggccccacctttattacctcatttaaccataattgtctcttaaagactctacatccaaatacagtcacatagcaggttagtcttaacatatgaattttgcaggggacatgactcggtctgtataccccctcatcaattgtttgcttacctttacattttagtatttatttttgagacagggtctcactcttgtcgaggctggagtgcagtggtacagtcatagctaccatagccgcaaactcctgggctgaagcaatcctcccacctgggccttcaaggtagctgggactacaggcagatggcactacacccagttaactttctatttttgtagagacagggttttactgtgttgcccaggctggtcttgagctcctgtgctcaagcagtcctcccacctgggcttcttcaagtgctggaattacaggcatgggccactgtgcctggccagttatttatttatttatttatttatttatttatttatttacttatgtatttgttttttgagacagagtctcgctctgccgccaggctggagtacagtggtgcgacatcggctcactgcaacctctgtctccctggttcaagctattctcctgcctcagcctcctgagtagctgggactacaggcatgcgccaccgcgcccaactaatttttgtatttttagtagagacagggtttcaccatcttggcgaggatggtctcaatctcttgatctcgtgatccatccgcctcggtctcccaaagtgctgggattacaggcgtgagccatcgcgcccggccctgtgcctggccaattatttgtttaccttgaggtgtccacttacacaggaaagctaaggttttaaaaaattggcttttcctctaaatcttttcaggaagtctttggttatgagatttatttattcatttattttgagatggagtctcactcactctgtcgcccaggctggaatgcagtggcatgatctctgcttactgcaacctctacgtctcgggttcaagcaattcttctgcctcagccttctgagtatctgagattacaagtgcccgcctggctaatctttgtatttttggtagagacgtgatttcgccatgttggccaggctggtctggaactcctgacctccagtcatctgtgtgccttggcctcccaaagtgctgggattacaggcatgagccactgtgctgggcctgactataagattttgtattctatgactttagatggtagagtgagtcagagctcacctgctggccctctcactgcctccctccccttctctctgttttatgataatcacttatacaaagttcttaacaccgaagcactatctgggtgkaaaacactctcttagcctttaatcctcttttgttttccctgtgtaggaggagaagagacgcaaaacgacccccaaagaaccgtaagaatttattcttgacattatcsaaagcagatggtaatgttaaaatgatggttctagaacaaaagggaaggggtttcagtaattgccagagcaaccttaggctcattttggatcgggttggtgaacataggaccaaggtgcgtcaggcaggatgcccctgcggtgaagagccactgtgaccacgcgcctgggcctcactgccacagccggtgcctccctgtgccacaggcacctcaggcagaaacctcacaggggcgattttgatattttctgaaacaattaaacaaacgatcttgtgattttttttttcccccagaacggagaaaaaaatggctcgcgccaaaacagtcatgaactccaaggtaaacatctgccgggaataaagccggtggcggcgctcacgaggcggctgggagctgctctctgagtgccatcatctgtgttcctgctcccacagacccaccctcccaagtgcattcagtgcgggcagtacctggacgaccctgacctcaaatatgggcagcacccaccagacgcggtacgtacagctctcttcccagccttcctctgcctgtcccttgtcccactgctcaccagccccgtgtccttcaggtggatgagccacagatgctgacaaatgagaagctgtccatctttgatgccaacgagtctggctttgagagttatgaggcgcttccccagcacaaactgacctgcttcaggtaagtgcactttcgtgtgcatgtttgcttcgtggaaggaggmacatccccagaggtgcytgcgggctcacgattctggtgatgttttttagtgcctgacctgcaacatgtcttaagctaacacttcgtggataagagccaccgtggagggctgggcgcggtggctcatgcctgtaatcctagcactttgggaggccgaggtgagcagatcacttcaggtcaggagttcgagaccagcctggccaacatggcgaaacctaccgaaaatacaaaaagtagccaggtgtggtggtacgcgactgtaatcccaactactcgagaggcttaggcaggagaatttcttgaactctggaggcggaggctgcagtgagccgaggtggtgccactgcattccagcctgggcgacagagcaagactccgtctcaaagagccacgtggaaagctgatgaagggacaatagagctttgctgatttttggtttggtttttgggtttttacactacacatattacccctccattctgcccacatcctgagggtcacacgctcagatgaaggcctactctgtgctaggtaccagtgatctaggtgtcgtggatgtagctgctcaggtcctgccttcacggagccagaaatgggtgatacctgtcgggtagtgacagccacgacagattttaaaagcctggtgacatgcagagagaataagtgggaggaggaagttctgtgaagacgggagaggtaatgattttcagtaaagaccttgatggcctgtgagagaagaggccgaggggatggccggggtggggcaccctaggtagaaggggacaccattaccagggctcggaggggcctgtgccagctgtggaaggtgaatggtgagtctggtgtggtggttgctgggttggggctgggccacacagggccttgcaggcctcagcactgactctcctgtcctctgagggaaggtgcctggcgtccggcccgtaccttcaccgaggctcacgtcagctcttgagtgggcagaggccctgtgctctcaggcatccccagccccattttgctccctctccctgcgggtgcagttaccctccagggcttcaccttgttcttcgtgggaaatgcctcagctccaggaacggccctgcctccttttaggcctgggtggtattttccctctctgtgaagaggagggggaagtgccttggggacccctgttggaagcacccccaggcagcggttcctgtacccactgggagggcacccacacgttccccgtgcttggctgatggttgttcccctccctctccttctatgggatccttctatctagatcaagatgctgttgcgtccaccagcaaccgctagccccccgaggcctggcccaaagcagggccacacacctctgcctgctggtgtgagtgaggtgtgctgtggtgggcagagctggcaaccatgcccgagggcctcactctggccttcaccagggacaaaggcttgggggagcctggggctggggctgccagagtcctgagtgtctcagcttcctccctaagttgagatctatcatagattcgttcctggagggtggatggtggcctggaggacactttccagaagtcacatgccttctgtccactggagctggactgcctgagttatttaggggctctccatactgctgtacttggcttgaaactggcgatagaagccagtcatgggtggggtctggcctaccaaccagtgggtcctgcccctgcctggggcttagagcttctctcccatgtctcccctatggagagagcctccagcccacctgtgcagcggggagcgggaccccctcttctgtaggccctcccttgatccacgctggcttcatctctctgtctcttcttctgggccttacatcctgaggcagggctgcaacctattctgtctgccatgcctggtacgcagtaggggagctccgcaggaggtatgcagtgttttgtttgagcctttctggcttccaaggcactaagctgggtgagtgtggtggagggtgctctccagagacctgtgcagacttcatatgggggctctgaggatagcccagcatctttggccgggaaagggtggtccttgtctagatgagcaggtttgtaagcagaacacccagttcatgtctttttccttgagtttgacatcttgcctctctgtcttcactaaagaacgtgctcccgaatgtcaaggggcatctggacagtggggccgcaggtgtttgagatttatgcccaaaaggaggcagaagtccttccttcccacatcccttttcacactgttctataacctgctttattttctaaattgaggtctaactcgtataatataaaattaaccatatgaggtatcttgaataggtgaattcataggtatagaaagcagattggtggttgccgggggctgggggctgagggccggttgggaggagactggagagtgactgctacttgatgggaatgaggctttattaacatttgagtgacagaaatgttctgcagctgaatagagctagtggctgcactgcatagtagaaggtgttctagaaaccggtatttcccgcactgtaagtctgactgatcttttggtgttgctgttgcagacacacatacacttgatgcttaggtgggagaataaggtagaaactctgggtgatagaacgctgtcttaatccagtgttcccgcaaccaaaaaatgagtgtcggggccaggcatggtggttcagcctgtaatcccagcactttgggaggctgaggtgggtagatcactggagataaagagtttgagaccagcctgctacacatagtgaaaccccgtccctactaaaaatacaacaattagccgggcatggtggttcaggcctgtaatcccagctactcgggaggctgaggcaggagaattacttgaacccgggaggtggaggctgcagtgagccaagattatgccatcgcgctccagcctgagggatagagcaagactctgtctcaaaaacaaacaaaaaaagagtgtcagacttgtacattctctcattgcctcgtgcctgatctgaagtctgcacgaagacccgccttcacggcttagctggtaagcatgtgctttgtttcctgtctagtgtgtactgtaagcacggtcacctgtgtcccatcgacaccggcctcatcgagaagaatatcgaactcttcttttctggttcagcaaaaccaatctatgatgatgacccrtctcttgaaggtaaggaatagtccgggattatgtttggggcacactttaaaaacagccaggcagggtggctcacatctgtaatcctagcactttgggggtctgaggccagaggatcacttgagcccgggagtttgagacgagcctggacaacatagcaagagcctgcctctattaaaaaaaaatatatagcatatatatatagtatacatatatacttatatatatgtataaataaaaaacatacttatgaagcaatagtcagctggagttgctgctgcctcttaaagttagggtgtgagactttgtgccaggagcagctgtaggccaagtcattgtgatgactgaggagcacccgacctggctgatgggatgtctgctgagtgggcgyttagagcgcctcctgggtttgggatgtgagtcagagcctttagtccatttcctttttctgctctaggtggtgttaatggcaaaaatcttggccccataaatgaatggtggatcactggctttgatggaggtgaaaaggccctcatcggcttcagcacctgtaagtgtgtggcccatcataggctggccrgggtctgaaaggggccttcatgttctccttcctgggggctgacggggctctggtgggaattctcagcaggcttgcagaaggccatgtgactgggaaccttagcaggttcagttggggtagcctcttgtgttagttatgactggctctggaactgactctccagttgtaagagcaggtcttggccggatatggtggctcacacctgtaatcccagcactttgggaggccgagttggggggatcatttgaggccaggaattcgagaccagcctagcctggccaacatggtgaaaccccctctctaccaaaaatacaaaaattagccacgcatggtggtgcatacctgtaatcccagctacttgggaggctatggcaggagaatcacgtgaacccagcagacagaggttgcagtgagccgagatcacgccactgccctccagcctgggtgacggagcaagactctgtcctcccctgaaaaaaaaaaaagagcaggtcttattcttgcaacccaaacccagactgaattccaaacaccagagatgagctcaatgaaggcctactcagctagtcttcgctctctggctggctcagacaggcttcttcagaacaagccagctatgatgtgttgtgccctatgtttctgacatttgggtacgggatgacttttagactgttgggtgagtttggtagactcctccatgccctgtggccactgtaggcgccatcagattccagccccttttccacacctcctctgttcaccccagcatttgccgaatacattctgatggatcccagtcccgagtatgcgcccatatttgggctgatgcaggagaagatctacatcagcaagattgtggtggagttcctgcagagcaattccgactcgacctatgaggacctgatmaacaagatcgaggtaagagatcgagggtcctcagcatccgggattcccactggaaacttgccttcagaaccagcagacactgttcttcagttggatttaggccagtttggcttaagcatgagagaaacctgttctctttcaagaccacggttcctccttctggcctcaacttgaaccgcttcacagaggactccctcctgcgacacgcgcagtttgtggtggagcaggtggagagttatgacgaggccggggacagtgatgagcagcccatcttcctgacrccctgcatgcgggacctgatcaagctggctggggtcacgctgggacagaggtaaggatgcggcrgggaccagagtgaagactggagaccggggagggtagagcatggcccacatcctctgtcccagtcctctgagatgctggaacctctcccgtaggcgagcccaggcgaggcggcagaccatcaggcattctaccagggagaaggacaggggacccacgaaagccaccaccaccaagctggtctaccagatcttcgatactttcttcgcagagcaaattgaaaaggatgacagagaagacaaggagaacgcctttaagcgccggcgatgtggcgtctgtgaggtaacctcacctgtgggtgctcccgctcccctaaggtggcccagcctctggcctgatctgaggactgctccatctttctctctgtggcttgagactctggctgctcaaatgtgacccctgagacagaaattagttagtggtctgggaggaccctgcatacttcattgaacgtcaataggacagatgtccacagaggcatgcttgggtgctttgctgataatgccactgtccttaattgaagagcctggcttctgggtggctctgctgtgcctgcatctcacagtctgaaggcccctgttggactgctaaaggggtattcacatctaagtgggcactttgtccagcttagatttgaggccctcaggaggcgtccctttctgtgagtttttaaaatatatgtttacttcactcaggaggaactaacttcctagtcctatgacccaaagaccaggactattttgatacctattacctgactttcttttggataaagactggcttcagggctttgcttttgatccccgctggcatctcttaacaggagcctgcatgtcctcaccattgttattttggttttattttatttttcttggttaacacacgtgtgtccaatgttttataacttctaaaatcttttttttttttttttaatttttttgagacagtctctctctgtcacccaggctagagtgcagtggcaccatctcagctcaccgtaacctccgcctcccgggttcaatcagttctcccacctcagcctcccgagtggctgggattataggcacccgccaccatacccggctaattttttttgtatttttagtagagatggggtttcaccatgttggccaggctggtcttaaactcctgaccttaagtgatctacctacctcggcctcccaaagtgctgggattacaggtgtgagccactgtgcccagccctaaaatcatttgtttttatttgtgtaactgttacgtgttgatactggtagatctagttatttcattttaaatattctgtagtattttgttaaatgaatatcctaacttactcctcaatgataggcacctcttcagtattgtaaatatgtggcagcatccttgagcaaagcttctcgcgagtgtatctgcttagaagtagcgttgctgggttgtgggtgtgtattcttaactttgatctagaagattgctctccaaaatggttctaccaacttaccatttgagcagtgtgcgttcttctttcctcacaccacctatctggcttcttaacccatctggagaatgggaagggaattttatttctctcacttaccatatttctaatgaggttgaatattgctttttttttttttttttgtagagacagggtcctgctgtgttgccttgcctggtctcaaactcctggcttcaagtggtcctcctgtcttggcctcccaaactgccgggattagaggcatgaggcactgcacccagccaaataggcacatttttaaaagtcttggttttgttgttgttgttgttgttgttgttgttgagatgggtctcgttctgtcacccagtctggaatgcagtggcatgattgtagctcactgcattctcaacctactgggctcaagtgatcttcccaccttagcctcccaagtagctgggaccacaggtgcacgccaccatgcccagctaattaaaaaaaaacattttgtagatgggattttgccatgttgcctaggctggtcttgaatgcctgaactcaagcagtcctcccgccttagcatcctgagttgccgggactgcaggaatttgtcacacgcctggctaattttaattttttgtagagttgggggtcttaatatgttgcccaggctggtcttgaactcttggactcaagtgatccatctacctctgcttcagcctcccaatgtactggttcaggtatgagccaccatgcccagcctaaaagtcttaattcaccgtttgtttcattgttgctaagggctgtgtgactcactttttttttttttttttaattttttgagacctaaaagtcttaatgcatcatttgtctcattgttagtaagggctgtgtgatttgccctttttttttcctttttttttttttttttttttttttttttgagatggagttttactcttgtcgtmcaggctggaatatggtggtgtgatcttggctaactgtaatctccacctcccaggttcaggcaattctcctgcctcagcctcccaagtagctgggattacaggcacaccctaccatgcctggctaatctttgtatttttagtagagatggggtttcaccacrttggccaggctggtctgcaattcctgaccttaagtgatctgcctgcctcggccttctgaaatactgggattacaggcatgaaccactgtgcccagccctgatttgcctttttaatgccattttttaggtgtgtcagcagcctgagtgtgggaaatgtaaagcctgcaaggacatggttaaatttggtggcagtggacggagcaagcaggcttgccaagagcggaggtaggtcaggccgagtcttcctcctgtggcagaggacttgccagctggtggcagatgcactgtggagaagggcctgcatgtgtgggacagcaccaggattccttcgttaggcattgtctcaggacctgtccctgttatgaagaaaacagccccggttggtcttacttagaaaaggrgccttaggtataaccagtgacattgcaggtgtcccaatatggccatgaaggaggcagatgacgatgaggaagtcgatgataacatcccagagatgccgtcacccaaaaaaatgcaccaggggaagaagaagaaacagaacaagaatcgcatctcttgggtcggagaagccgtcaaggtaacccttggagccccttggtcagctcactgccatgttcccaataagcaggttgccctctagtatctcgccaacctgacctctcaggcagcctgagccccggcactaagaaacctgtctgtttgcccctgagaagagcgggactggccaagagaccatgttccatggctcagtaccagcaaggcatttttgtgtggccacaaggctcagttctcctaatgtcccaaaatgggcatttgacacagttctaggggcatcaggcaggtgagccctcatagcttgtttttctgttttgttttgtttaagatggaatcttgctctgtcacccaggctggagtgcagtggcacgatctcagctcgctgcaacctctgcctcccaggttcaagcgattctcctgccccaccctcctgaatagcygagattacaggcgtgcaccaccatgccaggctaactttttttgtatttttagtagagacggggtttcatcatgttgcccaggccattctcgaactccggcctcaagtgatccacccacctcagcctcccaaagtgctgggattacaggcaggagccactgtgcctggcccctcatagcttgtttccaagagagctgtcacagccccctctggtgtggggtgggtctttttggggcaccaacagatggcctcccatccgttctgtggtcattggcttcactgaaggtcagttcctttaccacagtgtgagagagaggagtgagtatcctctgtgttgcttctctgacgtccataaattaaagatgcaatcagttcacttaattatgaggcttgccacctgctggctgcctgggccgtggctgagcccctgcaggaggacagacatgggtactgctgcatggcatgagtgcctctgcagggtagggggctgggaggaggctggggccacgaggccttgcagaggtgacacctgggctgagatggagaaggtcaggtaggacctagccacacgacctgggggagagctgcactgaggtggcagtcagcttactttgttggagaaaaggaaggaggcccctgcagctggagtggcttgagccaggggatgatgggcaggacaggggtcagggttcaggctgtggccttacagaccatggtgaggtattgtgggctgtgctgttaaaatcaaatcctgggacccgagtggcagagcagaagtgggagggacatggatgcccttggccacagcatctggccaaggaaggtggatgttcttcttttttcttattattgaagcccttgtagaacaggatgttctctttagcagcaactcttcattgacttcttaatgaaatcgagtcatgtcttactttaagtaacagaggaccatgcaagtcaaggccagcaaagaccctcagaatgatcctccatgaacttatgctctcattttcagactgatgggaagaagagttactataagaaggtgtgcattgatgcggaaaccctggaagtgggggactgtgtctctgttattccagatgattcctcaaaaccgctgtatctagcaaggtttgcatctttctttttgcttgacttctgcatgcactttctcatcaagtaggagatgcctgttttgccaaaatagcaccagcagctttttgccctagatgaaaactgaaaaggacgagtgctcctgcatagacttggtcacatatctgctggccaagtcagaactttctccccatgcccgtcttctgattccagggtcacggcgctgtgggaggacagcagcaacgggcagatgtttcacgcccactggttctgcgctgggacagacacagtcctcggggccacgtcggaccctctggagctgttcttggtggatgaatgtgaggacatgcagctttcatatatccacagcaaagtgaaagtcatctacaaagccccctccgaaaactgggccatggaggtgagtgcctggtgtccctcgtgagcccctgccttatcgtggagggtcactgctgacgtgcgttctgttttgttttgatttgtatttttttttaatttggttttttttttgtttttttttttgttttgagactgagtttcgctcttgttgcccaggctggagtgcaatggcatgatctcagctcactgcaacctccacctcctgggttcaagtgattctcctgcctcagcctcccgagtagttgggattacaggcacccaccatcacgtccagctaattttttgtatttttagtagagacggggtttcaccatgttggccaggctggtctcgaactcctgaccttaggtgatccacccgcctcggcctcccatagtgctgggaatacaggcatgagccactgcgcctggcctgacacgcattcttatctcccaagggaggcatggatcccgagtccctgctggagggggacgacrggaagacctacttctaccagctgtggtatgatcaagactacgcgagattcgagtcccctccaaaaayccagccaacagaggacaacaagttcaagtgagcactggggctggactcggggtcagcaggcactttcagcccacatcactcccttttcccgtgtgcttccgtctggttggcttccgccaacggccccccagtttgtgtctcttgctcgtcaaaggccagcctgactatgaatgatgctcaagtgtgtagatggcctggagttgctttaagtgtgtggatgacctggcgttgtctttgtaagagggttccctacccaggaacagggttcgtcttgccatttcaagacttcccgtgtgttcttcagtgtgtgcccagctcttgcatgtttttggctgtttcttagatattttctcctgtaaatgagacctcttatttgattcttttctttcctttttttttttctttttttttttttgagacggagtctcgctctgttgcccaggctggagtgcagtggtgcgatcttggcttactgcaaactcagcttcctgggttcatgccattctcctgcctcagcctcctgagtagctgggactacaggcgccygccaccacacccggctagttttttgtatttttagtagagacgaggtttcactgtgttagccaggatggtctcgatctcctgaccttgtgatctgcccgccttggcctcccaaagtgctgggattacaggcrtgagycaccacacctgtcctcgattcttttgtaactgggtgactgctttgagggaagcttttattttttattttattttattattatttttttaattttttttttttttttttttttgagacagagtttcgcttttgttgcccaggctggagtgcagtggctcaatcttggcccaccgcaacctctacttcctgggttcaagcgattctcctgcctcagcctcctgagtagctgggattacaagcatgggccaccatgccyggctactttttttgtatttttagtagagatggggtttctccatgttggtcaggctggtctcgaactcccgacctcaggtgatctacccgcttcggcttcccaaagtgctgggattacaggtgtgagccaccgcgcccggcgagcttttattttttaatgtccaatgccccatgccttctttttaacctccgtacctcacttgtttcaactaaaagcagcagccagcacccccagaggagcaggtggcaaccagggaaacccaggaggccaagagggctccccgggggcatctgtgcttctcccataagtctcgtgctagctttggcttgatctctattttcattttattttttacttttttgtgatggagtttcactcttgtcacccaggctggagtgcagtggcacgatctcggctcactgcaacctccacctcctgggttcaagtgattctcctgcctcagcttcccaagtagctgggactacaggcrcctgccaccatgcccggctaatttttgtatttttagtagagacagggcttcaccgtgttggccaggctggtctggaactcctgaccttgggtcatctgctcccttcaggctcctaaagtgctgggattacaggcatgaactactgcacccaacctcatttacttatttatttatcacccaacctcttttatttatttatttatttatttatttatttatctgagacagggtctccctctgtcacccaggctggaatgcagtggtgtggtcacagctcactgtagcctcgacctgctgggctcaagtgatcttcctgcctcagcctcctgagtagctgggactgcaggcatgcaccaccctgcctggttaatgttttaaaaattttttgtagagacggggtctcactgtgttggccaggctagtctcaaacttctgggctcaagcgaccctcctgccttggcctcccaaagggctgggattacagacatgagccaccatgctgggccttgatctctatttttaaggccatcttcaagtctcctttaagggcttactagtcaagaataatgttgaatttcctcaaatacctgttgagcctttatggagagaacagtaggagtctctgctggattgagttcctcactgagccactcgggactgttgctcgtggtgtgttcttaaccatattctagaccctgttcattgatatcttagggtttttgtctcaatgactcaaaagttgcctgrttttcttgctatgttctctctgggctttggtctcaaataagtgccttcaaaatgtcaacacaaagcacaagaaagccacctcttccttctagcatctgcaaatgttttttcctcttggttaccagagtctctggattaagctggcagtagctgctgcggccactgcyggccacctcagggccttatgtttctgtccctttgtttccttcagattctgtgtgagctgtgcccgtctggctgagatgaggcaaaaagaaatccccagggtcctggagcagctcgaggacctggatagccgggtcctctactactcagccaccaagaacggcatcctgtaccgagttggtgatggtgtgtacctgccccctgaggccttcacgttcaagtaagtgccccctcggagcagccggggccagggcgctccaggctgagccaggctggctttgtggtgtccccctccttacagacattgccaatccctccgcaccagctgttgtcctagccgtcacgttggcataggtggcaaacagacaacataaatcgtgtagactgaccatgatgctattgcagagcaaagctgagcgtaaaagtcaactcgctggtttggctgggtgtggtttctcacgcctgtaatcccagcgctttgggaggccgaggcagtggggaatcatctgaggtcaggagtctgagaccagcctggccaacatggtgaaacctcgtctctactaaaaatacaaaaattagccgggtgtggtggtgcgcgcctgtagtcccagctactcgagaggcagagacaggagaatcacttgaacctgggaggcagaggttgcagtgagccaagatcatgccactgcactccatcctgggcaacagagtgtgactccgtctcaaaataaaaaaagaaaaaaaaagaacttactggataaagcgcgagggacagctgggggcccacccccaagttctgcctctgcccaaggacacctcctctccgtcccctactgtgaagtgggagagtgggatcttgcctgctggggctcgaagggttgagtgagttgaaagtgctccatacagtacctggcttaaagtaaaggtttaacggacatgagttacttcttggttagagggaatcacatcagatgacttctctgtgtcagaggatcgaggctcttccaggaaaaacctaaagccacagatcgtttccacactgatccattctgtgttttttctaagaatcagcgtgtggttggaattaagccaacgttttccagatgccttcccggctcacaattccatttccttagagccccagctcccttgccttagttcagttactgtgaattatgagaactggagaagcaggttccctccagccttggcacagttggggcgcgttaccccctctggttgtccttggtgggaaggggacacctccccgtagtgttttctgccagttgctcctggcaaagtgggagagtcagcacagagacgcctttggggcccgtcagactcctggggggcctagtggggagaacgtgacagctgacttccctaacggcaggccttcttcaaagaacagcttttccacactagtcagaccacactcccattgtcccaggccctgtggcgccttacattggcctccagtgtcgcttctagatcagagccttagtcagggtagcgtaggttgtatcatagcaacaaccccaaatcacagtgacttaaaaccacagaagctggactgggtgcggtggctcatgcctgtcaggagttcaagaccaagaccagcctggccgacatacctgtctctactaaaaataaattagccagggttagctgggtgtggtggtgggcacctgtaatcccagctacttgggaggccgaggcacgagaatygcttgaacctgggaggaggagttgcagtgagccgagattgtgccactgcactctaacctgggtgacagagtgaaactctctcaacaaaaaccacggtagccgctgtctcgctcatacgaggtgcccatcacaggtcagcagaggactccacctgttgtgtcccttggatatctgggccgctggagtcagaagttgccagtgtttgagcccaagggaaagcacacaggacattccccaggcagtgacatcctctttggtcacttctgcccacgtcacatgccaggaaacacaagatgccaagtagtcgggaggcaggagcctggggtatttgagcagtgtcagccaccaccgtagccagtaatgcgcagagggtgaatgcgtgcttcaaactgtgagactaaatctccagctaaatcttttttttttttttctgtgagatggagtcttgctctgtcacacaggctggagtgcagtggcacaatctcagctcactgcaacctctgcctcctgggttcaagcaattctcctgcctcagcctcccaagtagctggaattataggcatgtaccaccacacccggctaatttttgtatttttagtagagacagggttttaccgtgttggccagggtggtctcgaacttctgaccttgtggtccacctgccttggtctcccaaagtgctgggattacaggcgtgagccacaatgcccagcctaaatcatttcttagggtacacacctaccttaattcatcaggtgcttgactttaaatggttattttcactggtcagtcatgcctgactgaccactgcaaggtggaaggttcattgatgtcaagtgggtgcttctctgcagcatcaagctgtccagtcccgtgaaacgcccacggaaggagcccgtggatgaggacctgtacccagagcactaccggaaatactccgactacatcaaaggcagcaacctggatgcccctgagccctaccgaattggccggatcaaagagatcttctgtcccaagaagagcaacggcaggcccaatgagactgacatcaaaatccgggtcaacaagttctacaggtcagcagaggcctctgttcttccacgaggccacagactcttctagaaggctctgcctgaaacaaggttgtggcatagcacccacagttgttctaagagttaggttgaagtagctgtttttccaagtgtttctgattatcggtgggcactgataatgactagaattctagttcccagccctcacttttaggtccttattttaatgttgcagagccctttttccaaaagaaatccttaagctggctgggcactgtagctcacgcctctaatcctagcactttgggaggctgaggcaggaagatcacttgagtctaggagttcaagaccagcttgaggaaacgtagtgagaccccggccctaccaaaaaaaaaaaaaaaaaaagactagctgggcgtggtggcacacgcctgtaatcccagctacttgggaggctgaggctgaagggatcactgaaacccaggaatttgaggctgtagtgagccatgatcccaccactgcactccggcctgggtgacagccagaccccgtctcaaaagaaaaaacgggtagagtgcctgggcacccccagagaacctcccaagctccatctatgactgtccaggttctgtcccgctgtccccacctcttcccaggtcctcctttctgtctctgggattttttctctttcctaagcttttggcctattacgttttctttttctaagacccgagtaacttgcggtgattaggcattaacctgaaactagcctgtacaggaagctatacacttgcctcacctcttagctaacatagatcaaagatttcctgaagcctttgtaataacaggaaataaaacaagggctgtgagtggtacaggtgagagaaacacaytcgagaggctgctaccrgcaggcggacacagcagggcagggccaggcgtgcagagcaagcagccaagctgacctaatggttggggggtctctaccctgtggttccctaattgggggcgaatctaccttgcagttccctcatttggggaggggttatctttacctgcggttccctaagtaggggggtctttaccctatgactccctaactggggaggtctttaccctgyggttccataactggggggtctttaccctgcggttcccaactgggtcgggggtcattacctggcggttccctaattgtgggggaatctaccttgcagttccctaatgtgaggaggggatatctttaccctgtgattcccttactgggaggggtctttacccygcgattccctaacttgggggatctttaccctgtggttccctaactagggggggtctttaccctgcagttccctaaatgggggggmgtctaccttgcagttccccagtgtggggaggagatatctttaccctgcagttccctaactgagggggtctttaccctgcggttctcgaactagggggtctttaccctgcagttccctgagcaccccaggaacatggtactgtttaattcagcataagctcaccacaaaggagagctcctaacgaggcctctcccgctcgcaggcctgagaacacccacaagtccactccagcgagctaccacgcagacatcaacctgctctactggagcgacgaggaggccgtggtggacttcaaggctgtgcagggccgctgcaccgtggagtatggggaggacctgcccgagtgcgtccaggtgtactccatgggcggccccaaccgcttctacttcctcgaggtggtgcccctgcttgctagagggaaggcttcggggtcaaagttggccagaaggagtctgatgtcgggttatacacaaggcggcttggctgcagggtttcagcttttgtaagaagtgggtggttggctgaygtgaagctgttctgcaggagctttacgggggtctgagcagggttctccagagcacaagttgtatgagattcaagtggtcccggagtttaacactcctggtttttaaaaagtacgtcattagagaacctaacgttttagtgtcttggtgcaactgaacgttgaggaccatgaggcagcttccaccagcctgactggtgtcttagtatgagttggagaaggtgcccctgctcctgggtcccttgggccaggcgcctacgtccaggcccagcccacatgcctgtgygggtggccctcgttatggagagggcccacgagtcagctgatcaagctcatgacttgtaaattgttggggcttggcctttccgtgttgttaccttaaaacgatacatccacgttctcccaggcatggatgaggtagcccaattggacagcagattctgcatagcactttttcctgttctagaaggtactctcaagtgcttgtaataggcatttcagtgtcagccagatcaaatgttagtattaataaaatggattgttttaagtttctattgtagcaaagtcaaactactctyattggtggctaattggtcatggccccactgagggagaaattaagtgactatcaaattgccttcttactagtctgcgttagagaggggacagtgcgtttctctcccaaacgattgcagttctctccttttcaggcctataatgcaaagagcaaaagctttgaagatcctcccaaccatgcccgtagccctggaaacaaagggaagggcaagggaaaaggtacgtcattgtatgagtttcttttcaagttatycttctgtaacttggaggctgcctgtgaatccctcagtgtaaaaccacctctggtgttactgactctgggacagcgaggccgcctgagttaacaaggcgcttgagagcaaggtggacttggactctgaggatcgggtttagcctctggcctctctcccccagggaagggcaagcccaagtcccaagcctgtgagccgagcgagccagagatagagatcaagctgcccaagctgcggaccctggatgtgttttctggctgcggggggttgtcggagggattccaccaagcaggtgagcgcccgtaggctccatctctgaatacctggtgagcccagaccgggcaggtgctacctgaaacgacttccaaccccggtcaccttcctgactcaagaatctccttccgaggccaggcacggtggcgcacgcctgtaatcccagcactttgggaggccgaggtgggtggatcatgaggtcaggagtttgagaccatcctggccaacatggtgaaaccccgtctctaataagaatacaaaaattagctgggcgtggtggtgtgtgcctgtagtcccagctactcaggaggctgaggtgggagaatcgcttgaacctgggaggcagagcttgcagtgagccaagatcacaccactgcactccagcctgggtgacagagcgagactccatctcaaaaaaaaaaaaaaatcttctggagagttgaaagcatggcttcgtgcttgatctgccaggcatctctgacacgctgtgggccatcgagatgtgggaccctgcggcccaggcgttccggctgaacaaccccggctccacagtgttcacagaggactgcaacatcctgctgaagctggtcatggctggggagacyaccaactcccgcggccagcggctgccccagaagggagacgtggagatgctgtgcggcgggccgccctgccagggcttcagcggcatgaaccgcttcaattcgcgcacctactccaagttcaaaaactctctggtggtttccttcctcaggtaaacgggtagaagccccccagtgttgccagacggcccggggctgtgccgcatgtcagcagtggtcattttcgccctgcactgaggcctctgccccccggaagctcacagctcagctctcaccagggagagactttgataacattcgtgaggggcttccggcacagtgggtcgtttcttccctctgtctgtggaggtgactcctgcagtctctcctgccccctacagctactgcgactactaccggccccggttcttcctcctggagaatgtcaggaactttgtctccttcaagcgctccatggtcctgaagctcaccctccgctgcctggtccgcatgggctatcagtgcaccttcggcgtgctgcaggtgggccctggggctggggcgggcagacagatgtggccagcacgtgacccggccagcagccagccatcccttactgaaggcagggttcaatggcataggcctgccatccaggcagcagaggctggcatggtgctctgtcccactggcggagtcaggggagatgcgtgctcagccggcccccagcaagtccaccgctagtgtctcttgagctgtgttctcgaacatgcctgggagggctggctacaatgggcttctcgccatgcagctcctggctcctttccctcgatggggaagggtgagcagcccaccatggagcactgtggaatggctgagtctgcacagagcgggaggggaagtgaggtgcgcagagccatgtgtaggcggcagctgttcgattggtttaaaagacagttttgctctgggtaactgcgcacacaaacccccacagatggccgagggttgcactccaggtggctgtgtctgcagggacagggatggacatagtctgtggggcccaggccttatctgaaaagcatcccccatcctctctgtatcagctcagcaattgagggcataattaaaaatgaaacagctatccagatgctagcacaggatgtctgcctaagtgggcaagcacttggctacccggtcccctagctcagcctcagggcgactcaggctcaccagacaagacttgttgcagccacgttctctgtccttgtgaccacagccatcagggaagcgacagggctcctggtctccagtgttctccccgagtgctaagaccttggggcccttgcagtgctttcagagctggccggacttccccgcagggtttgctcccaccttccccagtggctgtcccctgggctcagctgcttttgttctttatctgctccaaactcctctgaccaggagcacgcctgctgaggtaactggggatttctgcaagtgcactccgcattggccagccactcccgactcaggctgctgaccctgggcctgggtctggccagtccagttgggagtgtcccactgacggtggggttgtccgtccttctcccccacaggccggtcagtacggcgtggcccagactaggaggcgggccatcatcctggccgcggcccctggagagaagctccctctgttcccggagccactgcacgtgtttgctccccgggcctgccagctgagcgtggtggtggatgacaagaagtttgtgagcaacataaccaggtaggtggcccccgtcgctcctccacacactgccgagcaggcctcagtagctcatggggcccgtgagtactccctggtgaggcttggggaggagaggatggtacagcatctgccctgccacacggtgctctgccacatggcactctgccacctgtggtctccagttctgaccctgcatcatctgcttccctagtagatagcatgtgcagagcggccagccgcatgcttggctgtggtcatccacaaagcccacgccatagccccatccccccttccagatggcatccaggcacactgccacccatgtgacctcgggcagtgctgtgatctcgggagaaggccatctgagcaggcagggggtggcacctgtgatgaggggacagctgctgcgtgcatctccagaggtgttgacctcctcctctgttgcaggttgagctcgggtcctttccggaccatcacggtgcgagacacgatgtccgacctgccggaggtgcggaatggagcctcggcactggagatctcctacaacggggagcctcagtcctggttccagaggcagctccggggcgcacagtaccagcccatcctcagggaccacatctgtaaggtaatggcaccctgacagagcggctcctcctcgaggcccagcccagcagcctcgtgggaacagtcagcctgcccaagactcaggggagacatggaatctgatcccaggctcctcctcccgagtcctcagcctttgtgtgacccctggtctctcttgcatggtcatgggaagtgtcagagctcccgcagtcctggacttggtctggaatggtgtcaagccactgcccacccaccactgscttcccccttgctgcctctccccgcatgttttcccaggatgccaagaccagccctttcaccatcccctggcaccactccccttcccccaccctaaaggctcagcttagattcccacgctctcctacacctgcgctgcctcaggtccctgccgtggcctcgagccaagtgcgatatccctgactgtctctttcccgatgggcgtgagccccagggggcttcctggtcaccatggtgttcccagctcccagcccaccatggatgctcggatgctgctcacatgaggtgacagctggsccccccacactctttcaggacatgagtgcattggtggctgcccgcatgcggcacatccccttggccccagggtcagactggcgcgatctgccyaacatcgaggtgcggctctcagacggcaccatggccaggaagctgcggtatacccaccatgacaggaagaacggccgcagcagctctggggccctccgtggggtctgctcctgcgtggaaggtgggtcctgtaagttgtggttcccggtgggctgaggggaaggaaggcagagccctgggcctttggcctgtgaacctggaggccagggcagggcacagacacaccaagcctgggtgtcccagagaaggtagctgctgaccatgttgagtagtaaaagcaggctgggttcatggcccacacctataatcccagcactttgggaaaccaaggcgggaggatcacttgagcctgggaggttgaggaggctacagtgagctgtgattgtgccattgcactccagcctgggagacagagtgagaccctgtctctaaaaagaaaaaaaaaaaacaataaataaataataaaagcaggtcaggcacgatggctcacctctgtaatcccagcactttgggaggccaaggcaggcagatcacttgagatcaggagctcgagatcagcctgcccaacatggtgaaaccccatctctattaaaactacaaaaattagccgggcgtggtgtcgcacgcctataatcccagctatttgggaggctgaggcaggagaatcgcttgaaccccataggcagaggttgcagtgagccaagatcatgccattgcactccagcctgggcaacagagcgagacatataatactaataataaaaacagtgcccagagaacgaggattgttggctgctccaccccagggggccccttgcacaggaggtgccatctctgcctcccaaagctctaagagccactgtcccaagcctataccccatcccacaactgcagcctcatcactgtcctgtcttccagccggcaaagcctgcgaccccgcagccaggcagttcaacaccctcatcccctggtgcctgccccacaccgggaaccggcacaaccactgggctggcctctatggaaggctcgagtgggacggcttcttcagcacaaccgtcaccaaccccgagcccatgggcaagcaggtaggtggggagggggcatccgagggcctgggtcaggccctgtacttggcggcctaactaggtggaagtgtgggtttagccaagtgggggacagcaccccaggaccccaggcacctggcctctgcctcctgcccctccacgtccacgggacaagctcataggccaaggccatggccgtatgctgtcacagtgccatttccctccctgtccccgacggtgacccggcctgggtgctactgccctcgcccaccgcgcctctttcccccagggccgcgtgctccacccagagcagcaccgtgtggtgagcgtgcgggagtgtgcccgctcccagggcttccctgacacctaccggctcttcggcaacatcctggacaagcaccggcaggtcagtggggcggcgcccgctgggtctggacaggaaggaggcttctgtgcctgtcaccaggtggggctggggccagcgcagtcacttccgggaggacgcctgctggctgccgggtagccccatcactctcagtgggaagacggcccacaggagggacagtgctgagacatccgagtcaggctgcgtccctatgctggttccttaytgtttgtttttgaggcagagattgagccagaaggacagtccgtcgcgctaaaggagcaggctaaaacccatggtggcgacagctcactcgctgtaggttcaaatgaactagcaccttaattcctacctgcttctcaggtgtcgggttggcttaacaagttagtctatgagttagtctyagttaagtgtattttcatcatagggcacgcgcattgcttaaaaaccagtgtccacggttcttgtgaaaaccacatttcacccctccccccgaatctggttctcgggaagcagccactctctcttttttttttttttttttgagatggagctttgttctttcgcccaggctggagtgaagtggcgtgatctcagctcaccgcaacttccacccccctggttttaagtgattctcctgcctcagcctcttgagtagctgggattacagtcatgtgctaccacacccggctaatttttgtatttttagtagagatggggtttcaccatgttggccaggctggtcccgaactcttgacctcaggtgatccgcctgcctcggcctcccaaagtgctgggattacaggcatgagccactgcgccggccagggaagcagccactcttaactgggagcgaaacgtgtctaggtggcccatttgtcttttttttttttttttctgagacagggtctcactctgtcccctaggctggagtgcagtgacatgatctctgcccactgcaacctccacctccagggttcaagtgattctcctgcctcagcctcctgaggtgctgggattacaggcatgtgccaccatgcccagctaattagtttttgtacttttagtagagacggggtttcaccatgttggcgaggctgctctcgaactcctggcctcaactaatccacctgccttggcctcccaaagtgctgggattacaggcgtgagccactgctcccagccccacgtgtctttgtctcaagtctttctgaagctcttcaaaggcccagtgacttgtggctgtggggcgggatgatgggccagttggagggtccaaggatcttgtgctggaagggttttgggcccatgtgagcaggaccagaacccttccccaaggggtgcaatgcccaggtwgtcctccatctgagcaggggctggcagtacacctgcccccgggccttgggcctgggtgtccacatcaggcattgcccttctcccctcctgcaggtgggcaatgccgtgccaccgcccctggccaaagccattggcttggagatcaagctttgtatgttggccaaagcccgagagagtgcctcaggtatggtggggtgggccaggcttcctctggggcctgactgccstctgggggtacatgtgggggcagttgctggccaccgttttgggctctgggactcaggcgggtcacctacccacgttcgtggccccatctttctcaaggggctgctgtgaggattgagtgagttgcacgtgtcaagtgcttagagcaggcgtgctgcacacagcaggcctttggtcaggttggctgctgggctggccctggggccgtttccctcactcctgctcggtgaatttggctcagcaggcacctgcctcagctgctcacttgagcctctgggtctagaaccctctggggacygtttgaggagtgttcagtctccrtgaacgttcccttagcactctgccacttattgggtcagctgttaacatcagtacgttaatgtttcctgatggtccatgtctgttactcgcctgtcaagtggcgtgacaccgggcgtgttccccagagtgacttttccttttatttcccttcagctaaaataaaggaggaggaagctgctaaggactagttctgccctcccgtcacccctgtttctggcaccaggaatccccaacatgcactgatgttgtgtttttaacatgtcaatctgtccgttcacatgtgtggtacatggtgtttgtggccttggctgacatgaagctgttgtgtgaggttygcttatcaactaatgatttagtgatcaaattgtgcagtactttgtgcattctggattttaaaagttttttattatgcattatatcaaatctaccactgtatgagtggaaattaagactttatgtagtttttatatgttgtaatatttcttcwaataaatctctcctataaaccaccctgggtgggtattcgtgatttgcacgggacttctggctgaggtcagacaggaacaagctcttccatgctgaaggcgacccacgtggagtttgaagctagcacgtttgaagctagacactccgtgtgtctgtctgtgtttgttcagaactgagtcacgtgagttgatccccatgacatgcaaatggaacttgctagtgtagcttccaggaaagccttttaaaggaagtcttggctggccttccccgtggctggtaggccttctttggtctgaagtgggttgtgatgcctggcagtggagcagccatcctgtgaccatgaggcagagctctgtgctgcaactggtggaataaggagagagaagtcaccactgagctgcccttggagccccggccaccccatccccaagcaaaacctctttagttgggttttttttctttccaaagaatttttttttttttttgagacagtcttgctctgttgctcaggctgtagtgcagtggggcagtctccgttcaatgcagcctctgcctcctgggttcaagaaattctgcctcagcctcccgagtagctgggattgtaggcgcccatcaccacgcccagctaatttttgtatttttagtagagacgatgtttcaccatgttggccaggctggtcttgaaatcctgacatgatccgcccacctggacctcccaaagtgctgggttacaggtgtgatccactgcacccagcctcccattagcttttttttttttttttttgagacagtttcgttcttgttgcccaggctggagtgcggtggcacgatctctgctcactgcaacctccgcctcccaggttcaagtgattttcctgcctcagcctcccaagtagctgggattacaggcatgcgccatcacacccaactaattttgtatttttagtagagacggggtttctccatgttggtcagggtggtctcaaactcccgacctcaggttatccgcctgcctcggcctcccaaagtgctgggattataggtgtgagccaccatgcctggccagcattttttaatagtgacataacacttctgtgtgtcctttggccactggatgtaccgtttctctgtgatggccacatgactgtctttgctgggagctccctgggcatttgggatgactgcccctgctcagtcatcctggcttatcatgtctgtgccatacagagacctcccatttttaggaagtcaatttatatttgtcactcttagttttttgtagcctgtttatttttgagacggattctcactctgtcgcccaggctggagtgcagtggtgtgatctctgctcaccacaacctccgcctcccgggtttaagcaattctcctgcctcagcctcccaagtagcagggattgagtagctgggattacaggcgcctgccagtacatctggccaatttttgttaatttagtagagacagggttttgccatgttggccaggatggtcttgaactcctgacctcaagtgatcctcccaaagtgctggcattacaagcatgagtcaccgtgcccggcctttgtagcctatttagaaacgcctttcctccccccagcaagagatcttaaacatgtatcttcttccacatttctgacattcccattttaacacatgaatcacttttgtaaggactaaaaatggggatctcagcttattttttgaataagactgatagcaaatgcacacagcaaagtacaacagctcagcttgacatatggtaaagttcccccatccgagatttttttttaaatatactttctgctgctattttaagctaaaaaattcattttaaagtatataatgagtataatgagttttctttttctggattccaaggcaccttgatcaagacaactgaatctttgtactaatgcatagtgtgaccttgtgagaaaacaatcacccatgtacctattatctttttttattttctatttttttgagacagggtctcagtctgtcacccaggctggagtgcagtggcctgatctcggctcatggcaacctccacctcctgggttcaagtgatcccctgcctccgtgtaactgggactacaggactgtaccatcatatgtagctaattcttgttttgttttttgagatggagtttcactcttgttgcccaggctggagtgcaatggcgcaatctcggctcactgcagcctctacctcccgggttcaagggatcctcctgccccagcctcccaagtagctgggattacaggcgtgtgcctggcgaatttttgtatttttggtagagacgggctttcaccatgttgcccaggctgttctcgagctcctgaccccaagtgatcagcccacctcagcctcccaaagtgttgggattacaggcatgagccaccacaccaggcctaatttttacttacgtagagatgcagtctcactatattgcctaggctggtctcaaactcctggcctcaagcgatcctcccgcttggcttcctaaagtgctagattacaggtatctgccaccatacccagccaatagtgtcaatttttttttttttttaaatgagatggagttgtggtcttgttgcccaggctggagtgcaatggcatgatcttggctcactgcaacctccgcctcctgggttcaagcgattctcctgcctcagcctcccgagtagctgagattacaggcgcctaccaccacgcccagctaattttagtagagatggggtttcaccatgttggccaggctggtctcaaactcctgacaacaggtgatccacccaccttggcctccaaaagtgctgggattacaggcgtgagccaccacgcctggtgatagtgtctattaagattgcctttacaaaacttagtgggacatggtggcacgtgcctgtagtcccagctactcaggagcatgaagtgggagaatcgcttgagcccaggaggtggaggttgcagtagcaatctcggctcactgcaaccgagattgtgccactgcactccagcctgggtaacacagcgagaccctgtctcaaaaataaactgctttgggccgggcacggtggctcacgcctgtaattccaacactttgggaggcccaggcaggtggatcacctgaggtcaggagtttaagaccaccctggccaacagggtgaaaccccatctctagtataaatacaaaaatcagccaggtgtggtacatgcctgtaatcccagctacttgggagattgaggcagaattgcttgaacctgggaggcggcggctgcagtgagccacgatcacaccaccacactccagcctgggcaacaaagcgagactgtctcgaaaaaaaaataaactgtcttgcacctcgaaggttgtcttacctaggaatctctcttgttcctctatttttgaaaattggggtagaatatgaaatatgcgagtcctaaatgttcagcttaaatttcgagaagtgaacatagcactgtagcctatatccttatcaagatagagaatgtctctgtcacctcaggtcaccttgtgcctcttcccacttgatctcccccttcccagtccctgggcagcctcccatccagttttgtctccatagatgacacctgcctgttcaggccagcatgggctcttgtgtttcagatctttcagcataaatgcctttgggattcatccatgtcattaatatgtgtatcagttttgtcctttttaaaaaaaaaatatatatatattttagaggcaggatcttgctctgttgcccaggctggagtgcagcgatgttctactgcagccttgatctcctgggcttaagtgatcctcctgcctcagcctcctgagtagctggaactacaggcgcatgccaccatgcccagctaagttttacattttttttgtggagatggggtctcactgtgttgctcagggtggtctcaaactcctggcctcacgtgatcctcccacctcagcttctgtagtagctgggaccacaggcatgtgccgccatacccagctaatcattatttttatttttatttatttttgagacggaatctcactctgtcaccaggctggagtacggtggtgcgatcttggctcactgcaacctctgcctcctgggttcaagctattctcatgcctcagtctcccgagtagctgggattacaggcctgccaccaggcctggctaatttctatgtttttagtagagatggggtttcgccatgttggccaggctggtctcagactcctgggctcaagcgatctgcctgcctcggcctcccaaagtgctgggattacagacatgagctaccatgcctggtagctgatttttatatttttttatagacaggatctcgctttgttgcccaggctggtctcagaatcctgggctcaagcgatctacctgccttggcatccccaaatgctgggattataggcatgaaccactgcgcctggacaagaatatattaactatactcactatgttatacaataaatctcttagaaagcctttatttgaactttttttctttatattgtttggaaacaactacagtctcaagagcagtagattgaattgtgatgcaggtcaggcctttgtatccaagggttccacctctggcattcaaccaaccacagatttaaaatattcagaaaaattccacaaagttccaaaaagcaaaacttgtatttgccacttaccaagtactacatggaatccatgagaataaagcaacgtgtagacgttatgtcaggtattacaaataatctagagacgacataaagtacacaggagaggccgggcgcagtgggtcatgcctgtaatcccagcactttgggaggccaaggtaggaggaacacttgaggccaggagttcaagaccagcctggccaacatggcgaaacaccttctctacaaaaaataacaaaaatttgctgagcatggtggcacacacctgtagtcccagctactccagaggctgagatgggaggatcacttgagcccagcaggtggaggttgcattaagccgagattgcactagcctgggtgacaaagcaagactctgtcaaaaagtagtgtacacaggagaatatgtgtagcgtatatgcaaatactatgccattttattttattttattttattttatatttgagacagagtctcactctgtcgcccaggctggagtgcagtagcacaatcttggctcactgcaacctctgcttcccgggttcaagtgattctcctgcctcagcctcccaagtaactgagattacaggcatgtgccgccacgcccggctaatttttttgtatttttagtagagacggggtttcaccatgttggtcaagctggtcttgaactcctgacctcaaatgatccacccgcctcagcctcccaaagtgctggaactacaggtgtgagccaccatgcccggcctatgacattttatattagggatttgagcacattctgattttggtaccacatggggtcctagaaccaatcccctggggataccgagggatggctggacatagatttgtatacacatgtgtatccacgtctaggctacttttctaggagttgaatgactggattgaaactttagaactggcacagccgctaaaagtcaagcaggtgttttatagggatttcattaactttgcagacttctggaagaattgacatgttaatgacaagccttcctttctaagaacagggtttgtcctgtttgttcaggaattcctttgtgtccacagcttttcatccagatcttgcagacttcataacttgattcctaagtatttagtcccttcattactaatataaatgggatgttttcttgatttctaaaccatggtcctttgcctatggagagatgctccatttgtattggctgtgattttgtaaactgtgttttttgaatctaaccaacttgttgaattcctttttttttttttttttggagatggagtctcactctgtcacccaagctgcagtgcagtggcgcgatctctgctcactgcaacctccatctttgggttcaagggattctcttgcctcagcctcctgagtagctgagattacaggcatgggccatcacacccagctaatgtttgtatttttagtagagatggggtttcaccatgttggccaggctggtcttgaactcctgacctcgggtgatccgcttgcctcagcctcccaaagtgctaggattacaggtgtgaaccaccgcgcctggcctgaatttccttgtttttaatcccactttttcagtggtcacattttcaggtatacgatccttcaccaagaacaacttgaggatgtattttggt

SEQ ID NO: 95425 - DNA, 21046 bp, Homo sapiens
ctgactaccccctgaccttctcccactgcctatcctgatctcctccatctgacccatgacctcctcatttcatctctctgacttcctccttctgaccagctgtctccgataacctccagacctcccctgtctgaccctctccctctttcatcccagctaaggaaaggacttgtctggcccaacagttcctaatctaggccatgctaccagccccaccccagcaggcagcccagccagtgctaagtggaaccacatggcttgggcaggggcgggtgggggcttcccctgggccccgagcccctgtctgattcccccatcccccaaccctcagcaaactgtcccactgaccccctgccccagcctcttggcgggagctggattctccagaatctgccatgacctcacccctgggggcggctctgctgatctcaccacggggagctggggcrggggggctaagacgttggggaggcacgggcttggatgaaggacccccattcccactcttcctaggtcagaaccctcattttccagactcctcggaggcctgtttcagcctctgtttcctcttgcctccaatctccttctctccccatccctgcccgccctctctctgtcccactttctgtgccgggtctttccaggcctccatctgtgtccaagtctctttctctctctctctctctttctctcattctctctctctcttctcaatctctctctctctccacccgccttccccaacccatcaccccagcccccatctctaattgcctgttttgtggctaggctgtcattaagagaaatctgggttgcagtcccctggggctgagatctgggctcccaggctctgctgaccacaagagtcacttccccacggaacaatcatcccagctgccccatctcagcctggggcccagggcaggattgagaccgacgacctcacccagcctggaggctctcccctgacccgcaccctaacctctctgcagaggaaagagggtcttccctcaactaccactcatttacattaagaaagtccttcccggcatccaactcaaagctctcctgcttgaaacttgtgtcccctctggaatgacctttcagaaactgactgccctttcttttcacagctggcattatgacaaaaaggcacacaagctgcattgagtcctgcctacaggggacaaggggtggggrgggtctgtcaggggcccagcctgccccctgccactctcccctgtgctggtcagggcccccacggggatgttgggtggggtctgggatgtggagggacagaggcggggactgagtcagggcatggctgggaaccccccaggtgtgcgatgtgtgtgcaaatacgtgtatgtgcatgagattgtacaagcgtgggtgagtctgagtgagacaggcagagaatagctgggcatatgtcgtttctccaggtgtcaatgtgtgcaaatatttggcttctaatggagggattagatacacttgcttgacgtgtggccatgcaacgcttgccgtgagcttgcaggtgtgtctgtgactttaacacctcggacttctgatgggggagtgccgttctgtgtgagagtgtgacccagtgggtgagtgggtgatgggttgtgaatgttgacagtgtttgttcggatgtcaggggcagcatgtgtgagaatttgagcacgtgggagggtcataaaagctgggaccatttggcgggtggctgaagggggttgcctggacacggtgtttcacattcctggagtcccaggggacttatattcagagtggatgcctaagattccatgaccatgtggatgtgtgagcgtgggaatgmggcatagtccaatcagggattaaccatatggacaggcaccttcctggactccaaagtaagaagtgtgctgtggtgtgtgtgtgtgtgtgtgtgtgtgtgtgtgtgtgtgtgtgtgttgggagactgagctcaccttagaaagggatttccaggaggacctagtctagggtctctcagatcagggaagccccatctccaacacttgagaagctacgccatcccctgactcccgaagcgccccccactctgaaccctgaggggcgggacagggcgcccagccagatgcgcgcagctgggcgtgcgtcagcgctgactcacccatccggcggcccccgggaccccttgggggctcctgagaaattcctcgggaaaaacacccaaggctccagcagctggggtggggagggggggagcaacttccactcctgccccgccctgcgccccgccccgtctcgcccctcaccgcggccctccccgaagccctgtccatggtgctgatcgcggctctggggaccgcggggtgggggagggggcaacagggagggaggggaggagatgggcgctcgccaatttggggcagaggaggaaaagggagaatgaggtgaagccatttaaagagacgcaaaggaaactgtgggttcccgaagagcaccccccaatacttgtccccacccaccttcatcctcatgggcaattatttgcacccaaaaatcataactacacccctcatagcggcactcagagacacacaatcacacgcataaccactcacacggttaccctcgaaaatcagcacatagacaagagcacaagtgcatactcacctgtcgcaatacacaccgtcccagcactgccctgtcactcacagtcacactatcaccatcaacctccacacgcaagcacatacgcaacttcactccaaatgcacacacatgctacacacacatacacacatgcacacacctgcacattgcatgcattcccacgcgctcgccagaaaacgcactcacacatccccacccccaccccgagctgtcacacccacaaatcacccagagtcagatactcatgcgcccacatcacaccggggccgcacgcggcgcccacgcccttcccctccacgcccctccacccccctccacccctcgctcttttagagcctctctgagtcgtggaccctgggtcccatctcttccctcccggctcaccggcctgcgtccccggcagaagctgcagcgcggccaggagcaggcagagaccggcccgcggctggcccaggtcccggcggttccccatcccggcggggcccacgggcaaggcggggaaccagtcggggcggctgcggggcgcggcgacttctcgggctcggtgcagtcactcgcggcggccgctcctctcagggtccgcgggaaactgcccgagaccccgccctggcctcgccctgcgctccagcgcctggccaggcggggctttttggagggggagcgctgacagctggactgggaagttgggaaactttgtgctgagsgctgattggctggctggggtggagcccagcgccaggagctgggttgttcctgccccaccccactgtggaggagaagggtcactcccacccagccctagagttcgagggttccagtcttaccccaaaccttttccgcctagcagatcccctcaaaggagaccttaacctcattcaagacttcagcctccatccaggccctagaattaggaggagrtgcagctttataccaaatcttttttattttctattatttttacattttattttggagacagggtcttgatctgtcacccaagctggagtgcagtggtgcaatcatagctcactgcagcctccaactcctgcgttcaagccatccacctgcctcagcctcctgagaagcaggtaccacaggcacacactgccacacccagctaattttaaaatatgtatattttgtagagaccgggatcttgctatgctgcccaggccggtcttgaacttctggtctcaagcgatcctccggccttgccctcccaaagcgctggagttacaggcatgagccaccgcccctggcaccaagtcctttctgcctcactcaggcccccaactggggtcccaacctcaccccgaactctcactcacctacctgctttatcctcagtccctcagctgcacaataggaggtaccagcctcagccccaaagcctttccttcaagtccctaacgggtcctcatcccacctcaaatctcaccccagatcccaaaatggggtccccagccttactccaaaccttcatctgtccactcaaatccctaagtcacgtgtcctggtcccaaattctcaccacagatcccaaaacacagttttcactttccccaaattcttgattcctcaaataaagggtctcatctccatccctaaccctcatctccccccgccccaactcaggtctccagtggatgccccggcctcaatcccaaatccccaccaaatgagggagtctgagctgggtgcggtggctcatgcctgtaatcccagcattttgagaggctggggcgggcagatcgcttgagtccaggagttagagatcagctggccaacatggcgaaaccccatctctactaaaaatacaaaaattagccaggcattgtgactggcgcctgtagtcccagctacttgggaggctgaggtgggaggatcacttgaacacgggaggtggaggttgcagtgagctgaggttgtgccactgcgatccagcctggacaacagagcaagactctgtctgtctcaaaaaaaaaggccggcgcgttggtgggaggtggtgggaatctgtccctgtcgcaaagcaacgcacagccactggggaggaaggggtggattcttgccattcttgggatgaggcagaggcccccctcaccgtgctgggacccccacctccagcatgaagaggcccccatgaggtcaaatagagcttttatgcaattggacaagcgcagacacgcaggatgtgagggtgyttccccagggaggggaggaaccaagaggcgtattctgagccctgaactgctccccgaaccctgcttcccccacctccgccccaggggaagagggagacgcaagcagtgcctccctcccagcctctgactccccagacaaagagtctctgtgtccctgaagaggaggggttggggccccatcaagcctgagggggagatgggggccccccagggtgggaggaggagagggtatctctgtaagctgtgcctcctcccaccccagggacatctgaggctgagacttctccaactaaaagactctcacaaaattcctgccctgccctgccttgctggaagttcttcctatagtctaactacatcttctgacagttctacaccccttccctctatgaaacacttctggatccacattctctgtctccttctctcactctctcccttcaatcagagattcttcacccagaatacagacactaattccccccaactttcacagaaactctccccagccctaaataatttatactcggccaggctcagtggctcatgcttgtaatcccaacactttgggaggctgaggcggctggaccacttgaggtcaggagttcaagaccagcctggccaacatggcgaaacctcatctctactaaaaatacaaaaattagctgggtgtggtggcacacgcctgtaatcccagctactcaggaggctgaggcaggagaatcattttaccctggaaagctgaggttgtagtgagccgaaattgcaccactgcactccagcctgggtgacaagagcaagactctgtctcaaaataataataataatttacagtcataataaaaattataaattaagaaaacagttacaaatggccaaggcaggaggatcacttgaggccaagagtttgagaccaatctgggcaacatagcaagatcccatgtctaaaagaaaaagaaatttaaaaattagctgggcatggtagtgtgcgccggtagccccagctactctggaggctgagataggaggatcgcttgaggctgtggtgagctatgatggtgccactgcactccagcctgagtgacagagcaagatgctgtctcttaaaaacaaacaaacaaaaaccagtgatgtctatagtaggtgcggagaagaaatgtttggcagatgaagaaaatgaggtgcagagaggatttaagagattctctcttactgcctgttcagggtcagtccagaattgagggtctccgggggagggcagaggctttgccctgcaggggatctgtgggagggggttaggagggagcagatgagcccaggatgaatggtcagagtcaggtgctgcccggcggaggtcacgagtccagggaggggatcaacatggccgctgcaccccggactgtgttgatctccggctgctcatcaggaattggtctggaacttgcagtgcaactggcccatgaccccaagaagcgctaccagggtaagaagtgcagggtggcactaggaggcagccgggtggaaacggcttccccagcactgtctcccctacccatccctcccagctgcacttgtgggcttggggagacccaggattccctccaggaatcatcccctcatcctagaaatatttcttgagcatcttctgggtgctctgaatgctggcaacacaactggagatgaaatagacaaaaatctcagccctcrggaygggtgtcatgtggggaggagagggagaatgggtgataaacagataaaaagaaattgttgctctatctggtgggaataagtgctgrgacacaaaataaagcatgctgagagtggcagggggtgggtgggggttatttttagaagggtttcactagggcatttcctagattggaataatcactaccctgatgctcactcttccacgtctccccagattattgcttttactgagataagcttcttaagtgctcctgaccttgggggttgaagggatggccttctagttctaagaacttgcccttctgcacctctagaataaatccctgggacctgcatcctaaccaaccaggagaacccctgacccagagggagcatgctggagtcaaagtgggcaaagggttgttacttacaaagaggcgactgggggtgagggcattgccccagttggcagggctgcttctcccagccctctgccctctgttttagagacgcacacagctttgagcatgacagcctgaatgccagtgtgcagggaataacgtgtgtccctatgggcgggcagatgggtgtatgaaactgctggaggctaatgtttatggagcttttacaatgcaccargctgcattctaagtgccctgaatccaggaagtcatttaatcctcacatcacacccgtgaggcaggcacaatcattcaccccattttattattattttattatttatttattttgagtcagagtcttgctctgtcacccaggctgagtgcagtggtgcatcttggctcactgcagcctccacttcccacgttcaagtgattttcatgccttgacctcccgagtttctgggattaaggcatgcaccaccacacccggctaagtttttgtatttttaatagacaaggtttcaccatgttggccagaccggtctcgaactcctggtctcaggtgatctgcctgcctgggcctcccaaagtgctgggattacaggcatgagccaccrtgcctggcctgccctattttagaaatgaggaaactaaggtgcagactgtgaaaggtctttgctcaaggtctcccagctgcaaagtagcagagctgggatttgaactcaggsagcccatcccttgcacccatgtttcccactatatcacatgtagatgcaagtgaccccattcacgtgcctgctacccacaaatcacactgacccgaagacaagaggcaaatgcccccaggagtgttcatgggtgattatgggtgcacacattgggggatatcaaacacgtatgctggtgcatgtgcagacatagtacatatgctgaggtcctgcttaagaacataagcttgaggctgggcacagtggctcatgcctgtaatctcagcactttgggaggcctaggtggacagatcacctgagatcaggagtttgagaccagcctggccaacatggtgaaaccccgtctctactaaaaatacaaaaaattagccaggcgtggtggtggatgcctgtagtcccagctattcgggaggctgaggcagaagaatggcgtgaacctgtggggtggagcttgcagtgagtcgagatcatgccactgcactccagcctaagcgacagagcatgactctgtctcaataaataaataaataaatatacaaaaattagccaggcatggtggcagtgcctataatcccagctacttgagaggctaaggcaggagaattgcttgaaccgggagacagaggttgcagtgagctgagatttcaccactgtattccagcctgggcaccaagagcgagactccgtctcaaaaaaaaaaaaaagggcataaaagcttggccaggtgctgtggctctctggctcctcacgcctgtaatcccagcactttgggaggatgaggtgggcagatcacctgaggttcgagaccaggctgaccaatatggtgaaaccccgtctctactaaaaatacaaaagattagccaggtgtggtggcaggcacctgtacccctgtaatcccagctactcgggaggctgaggcaggggaattgcttgaacccaggaggtggaggttgcagtgagccgagattgcacccctgtactccagactgggcaacaaacaagagtgaaacttcgtctcaaaaaaaaaatatatatatatatatggctattcacttcagtgttcatatatgcacatatgttggctatagttgtgtatgcatttttttcatggcaatctgttttatgtttatatattttattgtcttacctactaggctataaattccatgaaggcagaaactttatcttatttatttatttatttatttatttatttatttatttattttgagacagtctcgctctgttgccaggctggagtgcagtggcgctatctcggctcactgcaagctccgcctcccgggttcacgccattctcctgcctcagcctcccaagtagctgggactacaggcgcctgccaccacgccaggctaatttttttttttttttgtatttttagtagagacggggtttcaccatgttagccaggatggtctcgatctcctgacctcgtgatctgcccacctcggcctcccaaagtgctgggattacaggcgtgagccaccgcgccaggccgcccggccttattttttattttttgagacagggtctcactctctcacccagacggtagtgcagtggctccatctcggctcactgcagcctcaacctcctgggctcaagcaatcctcccaccrcagcctcccaagtagccaggactacaggtgggggccacccaccacacctggcaaatttgtaaaatataatttttttgtagagatgggatctcgctatacttcccaggctggtctcaaactcctggggtcaagcaatcctcccacctcagcttcccaacgtgctgggattacaggcttgagccaccacacctggtgactttatcttatttcatgccatagcctcagcacctagaatagggcatagtgtatagtagatgctcaataaatgtctgttgaactcatggttggaaggatggatataggtacgtggagatgcgtgtacacaagtgtgcacttgttggctgagtgataaatgtaggtgtgtaaacttgtgagtttccatctctctgtgacttgtaacgmaagatcacagacaygtggcgcccacaccaaggggaaaggagctcagtgcctgtccctgctttactctctgccccgcagtcgtggccaccatgagggacctggggaagaaggagacactggaggcagctgctggggaggctctggggcagaccctcaccgtggcccagctggacgtgtgcagtgatgagtcggtggcccagtgtctcagctgyatccagggagaagtggacgtgctgggtgagacttcacagcccctgattcactaagccccatcctggtctgagtatagaccctcaatatggcaaggtctgagcaccagctctctggcttcttcagcaatctctgaacctgggcagaaggggtagaccagttggccaagaggggtagaccagttggtcctaccaattgatttattaagggctgggtgcagtggctcatacctgtaatcctagcactttgggaggccragacaggaggattgaccagcctcagcaaaatagtgagactctgactctacaaaaaaattaaaaattarccagtcatagtggtgcatgcctaatcccagctactcgggaggccaaggtgggaggatcccttgagcccaggagtttgaggctgcagtgagttatgacagagccagtctggggagacagagtaagaccttgtctcaaaaataattttttttttgagacggagtcttgctctgcgcccaggctggagtgcagtggcgtgatctcggctcactgcaacctccacctcccaggttcaagcaattctcctgcctcgcctcctgagtagctgggattacaggtgcctgccaccatgcccagctaatttttgtatttttcttagagacgaggtttcaccgtgttggtcaggctggtctcaaactcctgacctcaagtgatccgcccacctcgacctcccagagtgctggaattacaggcatgcaccaccacacctggccaaaaatcaattttttttgagatggaatttcactcttgttgcctaggctagagtgcaatggcrcaatctcrgctcactgcaacctccacctcctgggttcaagtgattctcctgcctcagcctcccaagtagctgggattacaggcaggcgccaccacacttggctaattttgtatttttagtagagacggggtttctccatgttcatcaggctggtctcaaagcctgacctcaggtgatccactcaccttggcctcccgaagtgctgagattacaggcatgagccaccatgcccagctcaaaaatcaattttttaaaaaaacaaaaatattagagacactagtaacaatctgaggcctggaggtggggcagattttatggaatagaaattctcatatatggagaaagccatatgtggttgggaaaattacttggatgagtcacttggggaagacagcatgatacagaaataagtcataaggtccctaaccttcgcaggaaggtgggtgtcgctgtcttgatgtaatttggggtcagaattgaattgctcatggattaaggggggcactattcccagcagcccttcctcccactcagggctgaggatcccctatgacaaatgctaaactgtgtttaaaggtyaccaaggtttcatatttgtccacccaagataccctggactggccttggacttggagtacggggtgaggtgcttcagggagygtctagaagtaatgctagaagagtgagggactttaaggtaacccttagtacctcttctcttagtgaataatgctggaatgggcctggtggggcccctggaggggctcagccttgctgccatgcagaatgtctttgacaccaactttttcggagctgtccgtctcgtcaaagctgtgcttccaggcatgaagaggaggcggcagggccabatygtggtgatcagcagtgtcatgggcctgcagggtgagctgtggggacccaaccctggaaatcccaccagtgtctgatcctccccagactgggaggatggcgaatgggttttagatcatattctaaattagcatggaccctgggcacggtgattcatgcctgtaatcttagcactttgggaggctgagacgggtggattgcctgagctcaggagtttgagaccagcctgggcaacatggtgaaagcccgttcctactaaaatacaaaacaatcagccaggcatggtggcatgtgcctgtaatcccagctactcaggaggctgaggcacgagaattccttgaacctgggaggtgtaggttgcagtgagccaagatcgtgccactgcactccagcctaggcaacaaagtgaaactctgtctcaaaaaaaataataataaaataaaataaattagcctggagaattgtgttcagaaggattctgaagttcagaaggaaaaagtggccagacatggtgactcacgtctataatcccagcactttgcgtggcctaggcaggagggctgtttgagctcaggagtttgagaccagcctggtcaacacagggagtcctcatcactactaaaaatttttttagaattgggccaggcacggtgactcatgcctgtaatcccaacactttgggaggccgaggcaggtggattacccaagatcaggagttcaagaccagcctggccaacattatgaaatcccatctctactaaaaatacaaaaaaattagccgtgtgtggtggcacacacctgtagtcccagctactcggggtgctgaagcaggagaattgcttgagcccaggaggcagaggttgcaatgagctgagattgcgccattgcactccagcctgggcaacaagagcaagactctgtctaaaaaaaataaataaataagtaaacaaacaaacaaacaaacaaacaaaaaacaacaacaaaactttggccagatgtggtggttcatgcctgtaatcccagcactttgggaggctgaggctgatggatcacttgaggtcaggagttggagaccagaatggccaacatggtgaaactccgtctctagtaaaaatacaaaaattagctgggtgtggtggtgtgcacctgtagtcccagctactcaggaggctgaggcaagagattcacttgatctcaggaggcagaggctgcactccagcctgaacgacagagtgagactccgtctcccccccgccaaaaaaaaattaaattaaataaaaaaatcagccaagcatcctagtgtgtgcctgtagtcccagttactcaggaagctgaagtgggaggatcgcttaagctcaggagttcaaggctgcagtgagccatgattgcaccactgcaccccagactgcagaacagagcaacaccttatcaaaaaagaaaaagaaaaagagagagagagagaaggaaggaaggagggagggagggagggagggaggrrggraggaagrragggagggaggaagagagacaagggccctaatgaagagaaaaatgaaggggatccccaagcggccccaaaggtttagagaatggagggaaataggggagtttcctgggaccagrtggagctgggaggaggtggcacccggcacccgagaacaacctctttctgaccccatatgaccccatcacacaatgccatacacccatcatcttggcaccatgtatctgctttctctggttcccacatcctctttgctctgtctcccaaagaccccatcaccctggaacccacaaagcccacctcccagaccctcaaagagctctcctccctctgaccctcacaggtgtcatcttcaacgaygtctatgcagcttccaagttcgccctggagggattcttcgaaagcctcgctatccagctgctgcagttcaacatcttgtgaggcgggcacgtgggcagagggggcttggagccagtgatggggaggtggcatcgaaagggggagaggagagatgaagacaatgaagctgagtgcagtggctcacacctgtaagtccagcgttttgagaggctgaaatgggaggatcgcttgaggtcaggcatttgagaccagcctgggcaacatagcgagacccccatctcagcccaaaatktaaaaattagccaagggtggtggtgtgtgtacctgcagtcccagctactcaggaggctgaggcggaggattgtttgaacccaggagttggaggctgcagacagctatgatcatgccactgcactccagcctgggcaacagagtgagaccctgtatcttwaaaaaaaaaaaaawtggacaaaataggtcagggagtggttggggcatcagacttacactacccatgcctggtcgccagcatctccctggtggagccaggccccgtggtcaccgagtttgaggggaagcttctggcgcaggtttctayggctgagttcccaggcactgaccctgagaccctgcactacttccgggacctctatctcccagcctccaggaagctgttttgctccgtgggacagaacccacaggacgtggttcaggtgagtgaagggcccagagccccaagacgtggctcaggtatgttgcggggtgaggccctccctgggtcccagcgctcagggcctccattctgcaggccattgtcaacgtcatcagctcgactcgaccacccctgcgccgacagaccaacatccgctactcrccgctgaccacgctyaaaaccgtggattcctctggcagcctgtatgtgcgaacgacccaccgcctcctcttccgctgtccacgcctcctcaaccttggccttcaatgtctgtcctgcggctgcctcccaacgcgggtgcggccaagatgagcagaacagagcttcacgatccccatccctgaacaaccagacctcttcattccacatctaattcaaaggatgaacagactcttcatttattcattctgcaaactccccctcccctcctctgtgcctagacatggctagaatcccagaagggcctttattttcaggcatagactcctctgtggtcacagctggagcacagagagggaccctgggaacttggcctgggaagcccagagyaggaagccacagctgtctctgggaaagcaagggaggcttcctggaggaagcggcattgttatgagccttgaaggaagagacagactctgctacattcaacctcgtgacttcatgatcctgggcctgagaayacaggaatgattcatagcccaccccccacctccatgcatacaccagagctctgtggaccaaggggwcattcctggtcacacactccatcagcaaaatgtatttgagcacacaccagcaatgtatgtatattttttccattaaatatatatttataaccacaagttgtagttacatttactatttaataaagctcaatttcttaaaattaaataaaaacttaaaaagccagttgaactactggctccaaagagagagagagagaaagcaagcaagcaagccagacatggtgcctcatgcctgtaatcccagcacttgggaggccgaggcaagtggatcacttgagtccaggagtttgagatcagtctggccaacatagagaaacactctgtctactaaaaatacaaaaattagctgtgcgtggtggcaggcgcctgtaatcccagctactcaggaagctgaggcatgagaatcacttgaacccaggaggtggagtttgcaatgaggccaagacggcgccactgcactccagcctgggcaacagaatgagactttgtctcaaaaaaatacaaaaacaaaaactcatgaatggataaacagacttttgtatattctttttttttttctttgagatggagtctcgctctgtcgcccaggctggagtacagtggcgcgatctcggctcactgcaagctctgcctcccgggttcatgccattttcctgcctcagcctcccaggtagctggaactacaggcgcccgccaccacacccggctaattttttgtatttttagtagagatggagtttcaccatgttagccagcatggtcttgatctcctgaccttgtgatctgtccacctcggcctcgcaaagtgctgggattacaggcgtgagccaccgcgcccggccaacttttgtatattcttaaagaggaaggaaattctgatacgtgggtaaatactgagaataccatactgagtgaaataaaccagatagaaaattccacttatctgagatgcctaaggtagtcaaattcatagagatagaaagtcactcagtgggcgccaggggctgagggaggacagaatggggaattagtgtttcatggggacagagtttcagtttgggaagatgagaaagttctggagatggatagcggtgatggttgcacaacagtgtgaatgaacctaaggccactgatctgtacagttataaatggttaaaatggtaatttttttttttttttgagacagagtctcgctgtcacccaggctagagtgcagtggcacaatctcagctcactgcaacctctgcctcctgggttctagcaattctcctgcgtcaccctcctgagtagctgggattacaggcgcccaccaccacgcctagctaatttttgtatttttagtggagatgggttttttccatgttggccaggctgatctcaaactcttgacctcagatgaccctcccgccttggccccccaaagtgctgggattacaggcataagccactgcgcccagccaaaaatggtaaattttgtagtgcacatattttaccacaactttgaaaacagacatagagtgttttagtttaaaaaaaaacttaatatagaccaggcacagtggctcacatctgtaattccagcactttgggaggccaaggcaggtggatcacctgaagtcaggagtttgagaccatcctggccaacatggaaaaaccccatctctactaaaaatacaaaaattagctaggcattgtggtgcgcgcctgtaatcccagctactccagaggctgaggcatgataattgcctgaacccaggaggcagaggttgtggtcagctgagattgcacctctgcactccagcctgggtgacagagtgagactctgtctcaaaacaaaaaccaaacaaacaaaaaaactgaatatatactttttaaaaaactttttcactaaaagcagcatactatacaaataaatgtgaactttagttgtttccttggatcatgtataccttggaggattttcttttttttcttttttgagacagggtctcactctctcccccaggctggagtgcagtggcgcaatctcggctcaccgcaacctctgcctcccgggttcaagtgattctcccacctcagcctcctgagtagctgggactacaggcgtgtgccaccacgcctggctaatttttgtatttttagtagagacagggtttcaccgtgttagccaggctggtctcaaactcctgactgattcgccctccttggcctcccaaagtgctgggattacaggcatgagccactgtgcctggtcgcagggttttccatatcggcccaagcagacatcctcattccttgcagatctggagtttattccattgtggagataaacaataatttatgcaactcttttctctactaatagatctctggattctctccaaatgtttgctattacataaatggcagcaatgacaaacctcatatcatctcacacatgtgcaagagtttctgtcatgagattatttggccaaagtatctaagcatttgtaatttttctgaacattatcaaattcttgtccatcctggaggaccaatgtccatatggtagcctccttgcttggcaatacctttggcacacaccatattatctgtcttctgaatttatgcaaatctaatggataaaaattggtatcttggtgtggttttaaattgtacttctcttattatgagagaagctgaatatcttttcaaatgttaaagaaccttttgtgtttcatttttagtgggcattctgatcacacctttgcccaatttattttctgttggattgttgatgtttttattattcatttctagaaactttatatattgaggaaattaaggaatctgatacgaagtgcagacacttccattcccagtttgcttttttttttcttttttaacttatctgttaagggtgtttggccttatttttatgttgtggaattgttattattactattatttgagatgaagtttcattcttgctgcccaggctggagtgcaacggtgcgatctcggctcagcacaacctcctcctcccgagttcaagtgattcccctgcctcagcctcccaagtagctgggattacaggcatgtgccaccacacccggctaatttttgtattttcagtagagatggggtttctccatgttggtcaggctggtctcaaactcccgacatcaggtgatccacctgcctcggcctcccaaagtcctgggattacaggcgtgagccaccataccgggccattattattattttacttttaaatttcaagacacagaaacaaagaacatactgatagcacagtggctcacgcatgtaatcccaacactgggaggtggaggcaagagaatcacttgagtccaggattttgagaccagcctgggcagcatagcaaaaccccatctctacaaaaaattttaaaaaattagcctggtgtggtgtcatgtccttgtagtctcagctactcaggaggttgaagcaagaggatctcttgcatccaggaattagaggctgcagtaagatatgatcgcaccactgcactccagcctgctgagagagacagtccctgtctcaaataaataaataaataaataaaataagaaaagacatacacagactgattctgttaaaacacaaagacaggccggatgcggtggctcacgcctgtaatcccagcactttgggaggccgaggcgggcggatcacgatgtcaggagatcgagaccatcctggttaacatggtgaaaccccatgtctactaaaagtacaaaaaattagccaggcatggtggtgggcgcctgtagtcccagctactcgggaggctgaggcaggagaatggcatgaacccgggaggcggagcttgcagtgagccgagaccacgccaatgcagcaagccgacattgcaccactgcactccagcctgggtgacagagtgagactccgtctcacaaaacacacacacacacacacatacacacacacacacacacaaagacaatgtcaatgctcttttcaaacctctgcagtggtttctcctcttatttagacttttttttttttgagacagggtcttgctctgtcattcagatcgaagtacagtggtgcaatcactcagcctcaacctgctaggctcaagagatcctcccacctcagcctcctgagtagctgggaccacaggtgcgtgccaccatgcctagctaactttttaaacattttttgtagaggggggtctcactatgttgcccaggctggtcttgaactcctggtctcaagcaatccttccaccttggcctctcaaagtgctgggattacaggtgtgagccatgatgtccggcatgcttcccctcttatttagactcagatcaaaactgcatcatctgaccaatgaatatttgtctcaaattatctcccactttttccccatcacctactcattccagcaacactgacttctttgctgtgccgtttcgtctgtctgtctgtctgtctttatctctttttagagacagggtctctctctgtcacccaggctggtgtgcagtggcatgatcatagttcactgcaacctcaaactcctggattcaagtgatccttcagccttggcctcctaaagtgctggtattactggtgtgagccaccacgcctggcctacttgctgtttcttaaactctccaacctcaatacctttgcacttgctgttccctctacatagaatgcttttcccaaatatccacaaggttcccttcctcatttccttcatgcgctcaaataccacctcctccaagaggtcctccaggctcacctcaagatagcacactgtccctttattttcttacgtgttttatttcccatgatctgacatggttctctctcttttttttttccttccttccttctttccttcctccctccctcccttcctcccttccttccttctctttctttcattctaaaaacaaataatcatagaaacgggggtcttgctttattgagcaggctgcttttgaattcctgggctcaagtgatcctcccacctcggcctctcaaagtgctgggattacagacatgagccaccacgcccggcaggcatataccactgtttcttgcttgtctccacccactaaaatgtcagctccatgggcaggggactgttgtctatttgctctacccacatcaccagcaccgtggaaaccaaaaaatgactcaaggagttaaccaagctggcacatcctggcagtacagtccaccctgagaagctcctgacacctcctacctggacaagacagggtacttctctgaccctcagtttcttcatctgtgaaatggaacttgccagggagaaagttatattaagggctggaatgtagtcggggtctaataaattagagcccttaatagttatgttgatggtagccttattccttggtctcctgggtcctgcccggccttccctgggaagctctgagctcaaagccctggaggagggagtaaaaccagaggctgcatctctgcaaggacacatccctgcaagtccacccctcccgcccgcgccttctcggtgcaaactcccgatcccagggaggggaaggcgggcggaatctgagcggcaggcgcagctgctccgggcgggcggccaaggttccctccctcgagcactggcattcctgagggaggggccgagcgcagctgcccgcctggccggaggctcgcttgcgccctctggtgtccaagtacgagaggccacgtggacttgcgcaccagcagccggtctgttctaggccactgtctgcagctcaggtggacctgggtggagctaggtctaccccctacctttcttgggctcccttttcttatccgggttcacgaactcagcttccatcactaaacttgctgtgtgaccctgagcaagacactcaacctccctgtaccacagtttcttagctgtgcaatttgggacaggatcctttacctttttagtgccactttttctttctttctttctttctttctttctttctttctttctttctttctttcttttctcctttttctttctttctctttcttctttctttttctttctttctttccttctttctctttctt

SEQ ID NO: 95426 - DNA, 65566 bp, Homo sapiens
ggcgtgaacctgggaggcggaggttgcagtgagctgagatcgcgccactgcactccagcctgggcaacaaagcgagactccgtctcaagaaaaaaaaaaaagaaagaaaaagaaaaagaaaacacaagcagagtcagggggatgggaaaagcatcaggatatctgaggtctgaatatgttctaggtgtttgaagaacaacaaaggggctggtgggttggccagacatggtggctcacgcctgtaatcccagcactttgggaggctgaggcaggaggatcacctgagccaaggaattccagacctgcctgggcaacatggcaagacaccctctctacaaaaaatttaaaaattaactgggcgttgtggtgctcacctgtagtcccagctacttgagaagccgaggcgagaggatcacttgagcccaggcgtttaaggctacagtgaggtgtgataacatcactgcactccagcctgggcaacagagtaagacccttgtctcttaacaaaatgaaaataggccgagcacggtggcttactcctgtaatcccagcactttgggaggctgaggcgggcagatcatgaggtcaagagattgagactatcctggccaacatggtgaaaccccgtctctactaaaagtacaaaaattagctgggtgtggtggtgtgcacctgtagtcccagctacttgggaggctgaggcaggagaatcacttgaactcaggaggcagaggttgcagtgagctgagattgtgccactgcactctagcctggcaacagaacgagactgtctcaatttaaaaaaaaaaaggggaacagaaataaattcacgtgcattacttcacttcatcctcacaacaaccccatcagatgggtgtgaatatcctattttacagatgacaaaactgagggccagagaggctgagtaatttgctctaaagtatacagacagagctgagagatactgtgagttgagttctagactaccacaataaagcgagtatcacaataaagtgatacaaaaaatttttggtttcctagtgcatgtaaaaattatgctgacactataccatatgtatattaagtatgcaatagcattatgtctaaaacaacaatgcatataccttaattttaaaatactttattagcctggtcaacatagtgagacctcatttctacgaaaaaaatttaaaaattagctgggcatgttggtgctcacctgtggtcccagctacttgggaggctgaggtgagaggatagcttgagcccaggaggacaaggctgcagtgtgctatgatcacagcactgcactccagcctgtgcaacggagtgagaccctgtctcaaaaacaaaacagaaaaaccttaaaaactttattgctgcccgggtgtggtggctcatgcttataatcccagcactttggctgaggcgggcagatcacttgagcccaagggtttgacaccagcctggccaacatggtgaaaccccatctctaccaaaaaatacaaaaattagctgggcatggtggtgcacgcctgtagtcccagctactccagaggccgaggcaggagaatcgcttaaaccccggaggcggagattgcagtgagccaagatcacgccactgtactccagcctgagcgatagagtgagaccctgtttgaaaaaaaaccaaaaacaaaaacaaaaaaacctttcttgctaagaaaagctaaccatcatctgagccttcggcaagtcataatctttttcctggtggagggtcctgcctcaatgttgatggcttctgactgatgagggtggtggttgctgaaggttggggtggttgtggcaatttttaaaaataggagaacaggtcaggcggtggtggctcatgcctgtaatcccaacactttgggaggccgaggcaggtggatcacttgaggtcaggagttcaagaccagcctggccaacatggtacaaccccgtctctactaaatatacaaaaattagcctagcgtggtggtgggcacctgtaatcccagctacttgagaggctgaagcaggagaatctcttgaacccaggaggcagaggttgcagtgagctgagatggcaccattgcactctagcctgagtgacagagcaagactcagtctcaaaataaataaataaataagataataataataatacttgaaagtcaaatgtactccttgatcagtgggctgcagaatggacgctgtgttagcaggcatgaaaacatctccttgtacatctccatcagagctcttgggtgaccagttgcattgacaatgagcagtcatattttgaaatgaaacttttttctgcacaggaagtctcaactgtcggcttaaaatattcagtaaacagatgtgctgtcacccaggctttgttgttctatttatagctcagaggccaagtacacttaacatcattctaaaggtccccaggattttcagaatagtaaatgagaattggtttcaaccgaaagccaccagctgcattagcccttaacaagagtcaggctgtcctttgaagccagtcattgacttcacttctctctagggtgaaagtcctagttggcatctacttccaatagaagactattttgttgggcaggcgccgtggttcacgcctataatcctaggaattagaaaccagacggggcaacatggtgaaaccccgtctctataaaaatacaaaaaattaggtaggcgtggtggcacgcacctgtaatcccagctactccggaggctgaggcatgagaatcgcttgacctgggaggcggaggttgcagtaagctgcaatcttgccattgcactccagtctgagcaacaggctcttcccatccccctgactctgactcagaaaaaaaaaaaaaaaaaatagaccaggagctgtggctcacgcttgtaatcccagcacttcggggggctgaggtgggcggatcatgaggtcaggagatcgagaccatcctggctaacacagtgaaaccctatctttactaaaaatacaaaaaaaaaaaaaaattagccgggcatggtggcaggtgcctgtagtcccagctacttgggaggctgaggcaggagaatggcgtgaacccaggaggtggagcttgcagtgagccaagatcgcgccactgcactccagcctgggcaacagagcgacactccatctcaaaaaaaaaaaaaaagactattttgtctacactgaacaatttgttgttgattgtagccaccttcatcaataattttagctagatttcttctgggtaacttgctgcagcttctttctctctctttttttttttattaaaacatgtttactttttaggccaggcatggtggcccatgcttgtaatcccagcactttgggaggtcgaggtgggaggtttgcttgagcccaggagttccagaccagcctaggcaacatggtgaaactctatcactacaaaaaatacaaaaattaaggccaggcatggtggctcacgcctgtaattctagcactttgggaggccaaggcaggtggatcatgaggtcaggaatttgagatcagcctgaccaacatagtgaaaccccgtctctattaaaaatacaaaaaattagccaggcgtggtggcaggtgcctgtaatcccagctactcaggaggctgaggcaggagaatcacttgaacccgggaggcagaggttgcagtgagccgagattgtgccattgcacttcagctcgggcgacagtgcaagattctgtctcaaaaaaacaaacaaaacaacaaacaaacaaaaacccaaaaaacaaaaattagctgggcatggtggtgtgtgcctgtaatcccagctactcaggaggctgagatgggaggactgctttagcccaggaggtcgaggctgagggccacaatgaatgggtaccatttcttgctctgtttgctggagaatacaggttacaatcagagtggtgagtgctttaatgggggtagaaaaacctgcagtgggggcccagaacatggactggggcagtctggctgaaaaatggaggtgacctttaagctatctttttttttttttgagatggagtctcgctctgtcacccaggtcacccaggctgcagtgcagtagcatgatctcagctcactgcaagctctgcctcccgggttcacgccattctcctgcctcagcctcccgagcagctgggactacaggcgcccgcccccgggcccggctaattttttgtatttttactagaggtggggtttcaccgtgttagccaggatggtctcgatctcctgacctcgtgatccgcctgtctcggcctcccaaagtgctgggattacaggcgtgagccaccgtgcctggcctaagctatctttatacattcatccatttgttcaacaaatgtctgttgagggcccaccaggtgctaaaggctaggttgaagaaatgatrtttacattagtttccattaatttacattgaactgaagtgctagctaaggcaataaggcaagaaaaagaaataagaaccagactgagcatagtggttcatgcccagcatgaacatgggttcatgtaatcccagcactttgggaggctgaggtgtgaggagcactttagtccaggagtttgagaccagcctgggcaacatggcaagaccccatctctacaaaacaacaaaaacaaaaattagccaggcatgatggcgcgtgcctgtagtaccagctgctactctggaggctgaggtgggaggatagcctgagcctgggaggtcgaggctgcagtgagctgtgcaatggtgccactgcactccagcctgggcaacagagtgagaccctgtctcaaataaataaataaataaataaatattaaaaaaaataaagaaatgagaactaggctgggtgtgatggctcacacctgtaattccagcactttgagtttgagctttagtttgagctcaggagtttgagaccagcctgggtaacatagtgagaccccagtctctatttaaaaagtagaaacaaaagaaccaaagtaggggataaaccagctagtacacagtagaactgttaggaacattacactatcaggctctcaataataacctgacattgaacaggttattaaaagcctattatgttccggattctgttcaggacgctcaggagatagtaaagaataatactacattattgttaacataataattaaacaaagttttcgtgccctcctgcagctaatattccagtgtgaggagacacagacaataaatgtaataaacaaattacatagtgtggtatgaggggggaagagcgggaaaagggggaccagaagtcctaggaggttgtattataattttaagtgggggtggggtaagaaagaaagaaatgcctgaaaggatgagatataagcaaagacctaaaagaggtaagggacctgcggattttttttttttttttttttgagatggagtctcgatctgttgcccaggctggagtgcagtggcccgatctcggctcactgcaacctccacctcccaggctcaagccagtctcctgcctcaccctcccaagtaggtggaactacaggcgcctgccaccacgcacggctgatttttgtatttttagtagaaatggggtttcaccatgttggccaggctggtctcgaactcctgacctcaagtgatccacctgctttggccttccatagtgctgggattacaggcctgagccaccgcatctggccaacctgcggatatttgggggaagagttccaggtggacagaactgaaagtgcaaagggcctgaggcaccagcatgcttgctgtgtccagaaacagctagaccagtgtggctggagctgagggcaggaaggtgactgggcgttatctagcaggactgtgtgggccacgcgaggactttgacgtttcctctgagtgaggtaagagctattagggctctgagtagaggaagatcatgatctgaatcgagttctaacaggctcccacagggtcagatgttaccatttattaaatatttactgagtgccagacactattctgttcaatatggtttgatctcatttcattctcacatggaccctrtagggaatatcattccatttcamagaaaagaaactgaggctcacagagtttaagacactgacccatggccgcacagcaataatcttcagcgcctgggtgccaaggtaaagtaagccagcctctccctcccccaagcatttcagacaaggatcggtggctgcagagcgcacccgtcttcgggaacggcgtctgtgtccctgtctgtctgyttctatttccacacgtccctgtctgtctccacgcgcctctgcctgtgcgtcccccatctgtgcccaagccgccgtctctctgcgcccggcccccgcacatcggagctatttcgggtttaaggcttaaaagcccaacagctcggaggagacgcttcctccggcccccggctcggaccacgcgccgcacgcggccagctctgggagctcccagttttttctgcgggatccccgagscggggaagcccccgcgggaggaagggtgggggctggggcgacccgggcccggaggctctcggccccccagtggccaaccccggcattgacgccgtcaggagcccagccgtgcgtcasstgtcgccctggcaacgggggcgacgtcaccacattggtggtgcgtcagtccgctgrcgtcacgccccaggagaggcaataggcaagtggcgggggcgggttctaggcccgaccggcagggggagccctggggcactgatggcagatgcgtttggcttggtcttgtakgaggccctggccctgccgacatggccaccgcagtcccaacggcgcgctaggttggcgagatgaagaggagtcgcagtgccctgtccgtggcagggaccggggacgaggtgcgagaggaggggcttgggctaggggcggggcttcgccccttgggggagactagcgccctctagtgaccacggctatttcctgaacgtggcttcactacctccaagctgtgaggagtttggtcccctcgtgcctcagtttacccccttgattccattttttctcctgctgccctaagaggctctcagccggcccagggacagcaggcaaaggcttctcaaatgaggagaggattttggcgaggaggtgggagggggcgctaggggtggtgaggtcttgagagtctcagatgtgagggatgggaggggggcattgacattaagaccaagaggggccctcttagacgtggaggttgggaagagaccctaaaaaggtgatgtgttagagaggtctcacacttgagacagaatgtctagatgtgacagaccccaaggctggggcatcgagaggggaccccacaaaaattatggctgagaaggggcactctcagacctaagggatggcagggcaccctctgtgtgaggggtcagcgagtggctcacacgtgaaggggagcctataccgccattaactactcccttagacagctaggtaggggtgttcttggggagaggggctcagagcttcccagccaggccacgcccctattccactttgtccctccccagaggtcgagggagacccccgaatccgaccgtgccaacatgctgggggccgacctgcgtcgccctcgccgccgcctctcgtccggtcctggcctgggctgggcccagcctgagccctcggaccctggggtccctctgccgccacggcccaccaccctgccgctgctgatcccaccgcggatttccatcaccagggccgagaacgacaggtaggtaggagagggagcagagtgggaggtgggttggggaggcacagtgccaactgggctaggtccagccaccagcccttcccgatctccatgctccctgccgtttgcaaaactagctgcaacttgtcctgtggcgggctgtgacacccctaccccaaggcacccttcgcaggctctaggaaccccttatttcattttccagctgcctgagtcagcaaggggcaggactgaggaaaggggtgtcatgtctccagcccccaagatgctcccatattcacagagctggggcaggttgatcaggcggctgtgcaccggctttcatgtccccgcctgggaggatcaggtttcttctccgccttgaaggggatggtggagtcttggaaggggtctggactagtatttttctttctcctggggagatgtgagaaatatctgcgagctctgggttcacacagcacctcctgctgattctcatctggggaccttccaggtacccaaccagtttcccagagtactcaacccccctcttggctcaagaatgagctggaaagtcagacagctgagctggtcctggcttctggccggcccctgcccccatgccctcctctggtcaccgctttcggcagttccaatccacccccacccccatctactcaattggagggttccagggtctctgtttccgtcatggtccaatggttcatttccagatagggagagcaagtgactgtctctcgcccctggagctgcttaattatacctctccacgcccatcccactagcctcaggtccagatcagtttatcccccagctcaggccaccgctcctcgtttcctccttcttctgcaaccccagctgtgtcctgacacccccacccacctcacattacgcactcccacccgcttccagatctctaaccaacgttacagcataccccgccaagaatttggcccagcccaggactctcaaatatgatctggggagaactcacagcccctgcaaattccctagaagccgttttgagtgtgtaatggggggggtgttcctgagagaagtggggaacacagttttggcccttggaatacccggcggctgctgatgggggggccggtttttgctcggcgttcgcccacgccgggagccccctctggcggggagaaaagtggctgtgggggttgaagaccggcagtcttttttttttttttttttttttttcaaataaggagaagggcgcggggggagggcggtggcaracggcatcgcgtgccctggggagcccgtgacagggggcgcacgggggcaggggtctggtccccgggtcccgcagcagagcagtttcgcgttcgagctcttatcggcgtgggggggggggcggtgggacacgcgggcgcgtgcactccccccgcccagcagccatccttgggggggttgagggggatgggggcgcactcggatcccgctcgctctctgcttgctcgctcggcgcggcgctgggggaggcgggagcgtgagtcacggcgactcccgatttaggtgccggaaggggggctctgctggcgggggccgcagggaggaggctcgcctgtttactcgcctgaaaagggcacgggggtgcgctccgcggctacctgggaccttcctcagtttacctctggcagaagcgctttagaagaggcagcgatgtatagagcggtgggccggcagctgcggtatccgccacagggtgtcttcctggagccacaagggaaccaatgggacacaccccagaaacaccccagaggccccaggccgaccacacacatacactcacgcacacgcacacactaacatacatagacgtcctccgacactacagtcagacgacagaggccgaatcgcgtgcacaactccgcaagcacacaccgaccacaaacgcatccaagcgcttgagaacacattcacagtccccaggccacctgaaaaaagaccacgtagggatgcacatcctccaaataggtagcacatgtgcgcacacatccttcacccacagacacacacagttatacacacagccaaatccagagaaacgggcagacaacagcagccaaccacgtgcgcacacacacttccagccgacactgaaaacacagacaaccctcggaagaggccacgtgcgcgcacatcccgccccgggcccgcaccatcactatcctccgacgcacagacaggagatcccacacactctgccgccgcccgctgcaggtaccgcgccggtggcactaggaccactcctcaaaaactgccccccgccaggggtagcggcgaggacacgccaacaccggactccgccctcgccatgatggaccgactgactgacactctggcaaccagtccggtgtctgcttccagatcggattaaccgtttaactccttcgtgcctgtgcgcgccgcggccaagcagggtgctttgaagacagacgagttccagcgccccctcccagcccggagcggggatctgcgtgggcgggaagggcccccctccttaggtagctgccccccgctggcccggacggaggaggaggggggcggcgctgacagccgcggcgggcggggggcggggaggggcgggacggggcggaggagccggggctggcgccgagcgggccgcggaacgcggagcgcggagcgcggagagcgccgccsggcactgagcagagctccaggcgccgaaaggaagctgcagagcccggcccgggggcgattggcccgcagcgcccccgggtctgtccccggggcgccatggccctaccscggccgggcgcacccgcggggccctgggctcgctggcttgcgcgcagctgagcggggtgtaggttggaagggccagggccccctggggcgcaagtgggggccggcgccatggaacccccgaccgtcccctcggaaaggagcctgtctctgtcactgcccgggccccgggagggccaggccaccctgaagcctcccccgcagcacctgtggcggcagcctcggacccccatccgtatccagcagcgcggctactccgacagcgcggagcgcgccgagcgggagcggcagccgcaccggcccatagagcgcgccgatgccatggacaccagcgaccggcccggcctgcgcacgacccgcatgtcctggccctcgtccttccatggcactggcaccggcagcggcggcgcgggcggaggcagcagcaggcggtaagactccccgcggcggatgcgcgcggaacggatgggcgcgcagggaggaggcaactcgagctgccggccgcagggggcgctaggatgcgggtggggtcggtttggctggcgggggcggagggaattcggctgcgggggcgtctgggacctggcccctggttgtgcgctctacgggaggcttcctgctgaagcccatcctggggtccatttagggggcgccacgctgcgcgtggtgttaacgaggtctgggttggggaagggggctgcacacttaggggtctgtattcttggtgacagtgcagaacagctgctaagctgggaaccacttggagggaccttcctgggggcactatactgagggctagattcgcagtgtttggggtactcttggagcactccataagggggtgcctgctaggaccaggatctttacttcagggtggggtgctctcagggtccttctaggggatggaggactctattgcggggatgttagtggactcctcctgcagcagctggggtcagaaatccagagggtgcctcttgggggagcactgttttgggagccttgcgttagattggagttcccctctcagggcaagagtgttagcgttaagtagctgttcagaggcaggaaacagtggagggggggcgcagtcccagcacagagggaaggagtccctgactgcagaggtgacagcatagtgagggtgcatgtgtgttgagcttggtctcctctgagggtattctccgattgacctccgtttgctccagctgtccgggtatgaccagctgtggctacctcagttgtgtgctctgtgtgagcttctggggtcttgtgatggtgacacgatgactctgtgtcctccagggacagtgtaattgtgacagtgtgactgtgtatttccagggtagtgtgactgtgtgtttctgggacagggtttgcgacagtgactgtgtgtgctccaagaatgctgtgactgtcacagggtgactgtggcctcatgggatgcagtgattgggatagagtgactgtttctgctcctaggacagtgattgtgcaatggtgttggtggtctagggacaatgtgattgtgacagtgtcatttctggcatgcagtgattgtggcactggggtgtttacacttggggaacaatgtgattgagttcgtggaacagtctgtgctccttggacactgtgattgaaacacagtggctgtgtgttagtcttcaccaggtgctcacgtctgagcgtcggtgctctgacatgtggtctgtgttccctctgcctggtgtatcctaagaactggtgtcctctaaccacctggtgttcttagttattgttcctsctctgatggtgctccagggtctgattgcttgtgctccagcgatgtgtgcaactgacagctttgcccgtgtgctctacctggatgccccactgctggggatatcaccaagacggtcagatttgggctccttatccctggagctcctgagtgaggcctctctaagatgtagccctactcttcctaagtctctttgggggtcttcagcagtcattgcagccctccaggccacccccacctctgttctgatcaccccccagccccagtccccctgcacccttctacccaccaggaagcaagtgtcacgggcccagcatacatgggctgacatttcccaaagggaactggagagaggctgaaggaagagaaagttggaatcaacagaaaatgctaaaactggggcagggggccaaactggcacaggtcactgtcctaagacaccaaggggtgggtgaagtgaagtaggttccaggccccatttctttgcaaggctccagggactcctcctagcctggtctctggggcactgagtcttaggggacagtggctgagtggtaataatcatcattattttggtgggtatccatctcgcaatggctcaccctccggctccatgccagggacttttccatatgcatcctcatccccagtgccctgggtattccagcagggtattcctgctggcatatggagaaactggagcccagagacaaaacmctttctcttttttttttttttttttttttgacagagtctcctctgtcacccaggctggagtgcagtggcgtgatctcagctcactgcaacctctgccttccggattcaagtgattctcctgcctcagcctccggagtagctgggattacaggcgcccaccaccacacctgactaatttttgaatttttagtagagatggggtttcaccatgttggccaggctggtctcgaactcctgacctcaggtgatctgcccaccccttagcctcccaaagtgctgggattacaggcatgagccactgcacccagctaaaccttttctctttctcacccaaactcacacaaccaggagatgggggagctggaattgcaacgcaggtccgcccaattcctgtgcatctttgtataagtgtcttgccctctctgagccttaattttccagtctgtagagtggggcttttgttggcactgccatgtgggggtcactttgagggttctgtgagcttggagatgtgtgtaaaggacttaacataatcagtagatctccattcagggacctggactaaggaggggggacctgggtggatcccatttctccagggtgagtagaaaaaaacaggaaccttaaccacatccccacgtagactcgggtttctgtttcactgtgggcctgtgcacccttcagtgtctgtgctgaggtccaaagctgggactgatgggtgggctgtagctggcatcagtgccagggtcctcccccattcccagggaaaaggaggaaggtgtctgatggcaacctcaatgcttagaacaggcatttcttcaaaaagggggtttttaccagggcacatacaggattcagtgctccccacactggagttcatccagctaccgcaaaaggagtccagcgagctcccccgatttgggtcaaaggaatccccagagagagggcactgcccacccccaaccggagatgtcatccaaacctcccctccagacctgaagatgtatgagacggctgagtcacggcacagccacgatctgtcaagaggcagatggagagggaggaagaggaggactttggtggtgggggtggggagctgtctgaactggggacggggccaacatacggaccctgcgtcccccctccctgggccctaaaacttccccatcgaggtgggggcacagtgtggccccaggagcaggtggaggcagccgagctggggtatccgtctggtcgctggtctctgtctccacttgggtcctcgcctcccccttgtccctggcgctcccaagtccctggatgtgggttgggagcgggtctccccgcgcgccctctgctggacgacgaggaaggcacagcctgggtgtgcgctccgagcgcggacctgctccagggacgccgccagtcccggagcaaagcaaagtcgccgccaccgtcgcggcgcccggtattattattttatgcttattgagcgtcctggagagcgggcgccaggccggctgaccgcaggctgcgtgtggggtcctcgccctcccgggcttgggaccaggccgctttccccatgcgccagcccctgccacacgctgcggggactgtcgtctggaggacagggaggaacctggccgaaaagttgcagccgtggagttcccgtcccgcctctgcgcgcttgcccggcaggccggtgaaccccagcatccttggctctgcgcttcctgcccgggaaacagagaccatgggacttgcccaaggtcacacagcgaggaaggtgagaataggagttaaaaaccagatctcggccaggcgcggtggctctgtaatctgagcactttgggagaccgaggtgggcggatcacgaatgaggtcaggagttcaagatcatcctggccaacatggtgaaaccccgtttctactaaaaatacaaaaattagccgggtatggtggcacacgtctgtaatcctagctactcgggaggctgaggcaggagaatcgcttgaacccgggaggcagaggttgcagtgagtcgagatggcaccactgcactccagcctggcagcagagcgagaccctgtctcaaaaaaaaaaacaaaaaacaaaaaacagatctgctccactgcagaccgctgggtaacattcacatggcagccctgcccgctgactcgctgtgtgacttggggtcagtgcttgtgcctctcggagcctcagtttcctcatcagtcaaacggggctgaaaaataagaactgtccacccccagggctgtggtgaggctgatatgtttgacgtaggtgctgggcagccaggagctggtgttctgagaaagtacttcctcaaatgacatcagcagagagaaagggggcgtcccccaaaccgcaaacccggctggtggggaaggtgccccatatttcattggtaacagattgactgcaggctcttatgactttaggaaaactggggctttggacctgggagagccacagtctggcagggtgagaacagaattgtgagggcatctgagcccactcttttcattgtggagtatgaaagagttcaaatctggctgggcgcggtggctcatgcctgtaatcccagcactttgggaggctgaggcgggtggattatttgaggtcaggaaattgagaccagtctggccaacatggtgaaaccccgtctctactaaaaatacaaaaattagccaggtggtagtggtgcatgcctgtaatcccagctactggtgaggctgaggcaggagaattggttgagcctggaaggcggaggttgcggtgagccgagattgggccactgcactccagtctgggcgagagactgagaccctgtcaaaaaaaaaaaaaaaaaaaaaaaaaaaaaggaaggagggaaggaaggaaagaaaagagttcaaatccacttttggccaggcgaggtggctcacacccagcactttgggaggctgatgtgggaggattgcctgaggctggagtttgagaccagcctgggcagcatggtgagaccctatctctacaaaaagaaaaaaataaaagaagtaaatccagcttttgtcctggactcgctgtgtgaccttcacctgtcagagcctcagtctcctcatttctagcagattcgttcattccacaaacactgagcgccttcagaactgtggctgagaatgctgtagaccaagtttgtccaacccgtggcccaggatggcattgaattcggcccaacacaaattcgtaaactttcttaaaacaatgagattcttttttttttccctctcattagctattgttagtgttagtgtattttatgtgtggcccaagacaattcttcgcctttcagtgtggcccagggatgccaaaagattgcacacccttgccatagacacattccctgctgccctgaaattgtcagactagagggtgaagcagaaatagcaagtaaagggcygggtgcggtggctcaggcctgtaatcccagcactttgggaggccaaggcaggtggattacttgaggccaggagttcgagaccagcctggccaaaacctggcaaaaccctgtctctactaaaaatacaaaaattagctgggcgcacgcctgcaatcccagctacttgggaggctgaggtgggaggaggattgcatgaacccaggaggcggaggttgcrgtgagccragattgcgccacttcactccagcctgggtgacaaagccagactccgtctcaaaaaaaaaaaaagaaatagcaagtaaagctgtatgataattcaagatggtcacacataggatatgaaaaaaagagggatcctgaggtcagggaaggcctctctgaggaggtgacatttgaacaaagacccaaataaaatgagggaggtaagggccgggcgcagtggctcacacctgtaatcccagcactttgggaggccgaggcaggtggatcacgaggtcacgagttcaagaccagtctggccaggatgttgaaactccatctctactaaaaatacaaaaattagctgggcgcagtggcaagtgcctgtaatcccagctactcaggaggctgaggcaggagaactgcttgaacccaggaagtggaggttgcagtgagccaagaccgtgccagtgcacttcagcctgggtgacagagcaagactccgtctaacaaaaaacaaaagagggaggttgctacatgggtgtctgatggaagagggtgccaaccagagggaagagccagtgcagaggtcctgtggtgggagtgtgtctgatacgttggaggcaagtgtgtctgaggcagagtgagcgaggaggcagtggaaaaaaaggagggagcgaggtgacaggcagctcatgtaagggctcatagaccattaggccatgatcaaggttggctttaggcctcagtttacatctggcttcctaggacgggacaagcatcattgggctggaaggaaactcatccataaagggcttgtgtagcctcatggctaaaattcctgtctctgaagccagacagctgggtccataatccagctctgatctttctagattgggagaccctagccaagtcactcctctctgggccttggcttccccgtctctgaaatgggcctagtaaaaaccgtattcccaagggctgatctgacgaactggcaaaacaattcagggaagctaagggcattgaaaccttggtcggtgaacaaaaatgcatttctgggacaggtatagtggctcatgcccaacacactttgggaggctgagagggaggcggatcacttgagcctgggaggtggaggttgcagtgagccaatatcatgtcacttgcactgcagtctgggtgacagagtgagaccctgtcaaaaaaaaaaaaaaaaaaagaatatcacctggtgggtgtctggtgggtactttgtgaggattaaatgagatcataagaccaagtgtggtggctcacgcctgtaatcccagcactttgggaggccaaggcgggcagatcacttgagtccaggagctcaagaccagcctgggcaacataggaaaaccccatctctagaaaaagtacaaaaaattagtcaggcatggtggcgcacatgctactcagctacttagctgctcaggaagctgaggttgaaggatcacttgaccgcaggaagttgagactgcagtgagctatgatcgtgccactgtactccagcctcgatgacagagtgagatcctgtctcgagagagagagagagagagagagagagagagagagatattgagagagagagagagagagagatcatagctagaggcactggatgcacaggaagctttctaaagggttagttgctatcatcaccatcatcgtcattatcatcatcatctataccctctagctagtatagtgatttgcatattataagccttcagtaaatatttgtcaaatactgataataactgtagctcatattgagtgcttactaggttcagacacttttctgagctttttatgtgtccatccatggggtgagtggtagtattatacccattttacaactggggaaactgaggctcaatgaaatgaagtgactagcccgagatcaaatggctaagaagtgccagaggccacacgcaagcccaggcttcctcactctgggccccatggcatcagagccaacactagagaaggaaggatatttcacagaggtggactcgaaaatagagattcactgttgggcgcrgtggctcacacgggtggatcacttgaggccaggaattcgagaccaacctggccaacatggtgaaaccccatttctactaaaaatacaagaaaaatttgccaggtattgtggcacatgcctgtaatcccagctacttgggaggctgaggcacgagaatcctttgaacctagcaagcagaggttgcggtgagccaagatcgtgccactgcactccagtctgggtgacagtgagagactgatgaaaaagaaagaaagaaagagagaaagggggaaagggaggaaggagaaaggaaaggaaaggaaaggaaggaagaaatgaaggaaggaaggaaggaaaataaggaaaggaaggagaaaaggaaaagaaagaaagagagggacggaggggaaaggaaaggaaaggaaagaaggaaggaaggaagaaagaaagaaagaaagaaagagaggaaggaaagaaagaaaagaaaatagagattcaccctcttttctcttttttttcgtgagacagggtctcactgtctcaagatggtttagtggcaccttcataactcactgcaacctcaacctcttggctcaggtgatcttcccacctcagcctccaaagtagctgggaccacaggctcatcccactatgccctgctaatttttgtcatcttttgtagagatgggatctcgccatgtcacctgggctggtctcgaactcctgggctcaagtgatccgcccaccttcacctcccaaagtgctgggattacaggcatgagccaccacacctgccttctaggggtgtcttaagagttgtaagacacatctcagaagctgtgggtggcattctaggttgtccccaaggactgtggggtgcatcttgggattctgttctagggtgtgagactgtcttaggagctggagaggaatctagttgtgtccctggggtctattggggcaccccagattttgctggcatctccatggttactagggcatcccctgagtctgaaggcattcccgaggttgtcttggggtctcagcacttgtgggggcatctcagagatgctgtagaaccattcagggattaagggacatctgagggactgtggaggtgttcctggggtctgtggagaactctaggatttggtgggaacctatattcggtctatgaaaatggctctgtgggtgtgggggattctgggggtactgagggagggtctatgcatgatgggatgatgagagttggggatgatggggagctctggaggaattttgggacatctgaggaactgtggtgggggttctgggatctgaagggttttccctgggctctcagagcaccactggcagggagtttgtgggagtgcccccagagatttgggggcatccctggcatttgtggatgcaccctgggattctcagggcactcctggggcttgtggcatgtcccagaaacagtgagaatactgctaggattatgggggcatctggagagctatgagagtgccctagggtttatgagggtgtctcagaacacctctaagttgtgctgagaagccccgggatttgggggggtacccctggacttcttgtgtggggttgtctcagggacaatgagggtgctccttgggattctgagagactgtggggtggctcctggggcttgtggggcctgtcaacaccacggggagtttgcaggagtgtccccacagatttgggggtgtccctggtgtttgtggggacgcgtccggcgattgtgaggacattagagccaacgcgggcggctttggggtctgcgggagagtccccaccagagccgtgcgggcgccccagacccgccccgccctgggggcggctccagcgcgaasscggaagggccgaggcgacagggcggggtggggcccgcgggcccggggctgggcaggcggcctgcgtgggcctggcggggtgggcggcgcagctccccagcgcccgccgaggcggggccgccccgcggccatggcgcggccgcgcggcctaggccgcatcccggagctgcaactggtggccttcccggtggcggtggcggctgaggacgaggcgttcctgcccgagcccctggccccgcgcgcgccccgccgcccgcgttcgccgccctcctcgcccgtcttcttcgccagcccgtccccaactttccgcagacgccttcggcttctccgcagctgccaggatttgggccgccaggcttgggctggggctgggtaagtgcagcgctggtggccgtgggttcaagtcgcccctggccacctggcgcactccagggtctagggttcgtggctcactctctccagcctcactttcctcttctgtcacatagcagcgatcaaaatcatccctgaccgccagggttgccctggagacctctgatagggcatgcagtagacgtttaataaatgttgcatccttcccacttcctgtgcaaacctgaagctgcggtcacgctttggaggartgagggcgacctgccatccaggtcatgtgttcatcctggggtatgtgttcagttctgtcagcctcagtctactggcctgtgaaatggggccagtcatgccttctgkgggtggccttgcggtgaggcttggtgtcactcctagtaccgggccacagagggcaaatggaagttccctttctggccagacggggtgggctgcgggggcttgaagtctgggagtgacaggccccgaggccacatccagtctggctttctaatgtccttatatcctggaggcagaagttggcagcccggagttgggcactggctggccctgggggcttctccgggtcctcagcctccccctcttccacctactttccacgtgcaattgaggcacagactgaaggagggcacggcggggcaggaccgggcccagcgactggccccaggaacgaaatggggcggggacagaagaggaagaggggccagggcctttgggagccccgcgtggggtccgcagggtgtgtgtagggaaatcgttgcttctctccgggtctctctctctgcgtcctgcgtctctgtctccacttctgtctcttctgtctctgttttgtttctccttcccaccgctgagctgcaccttcccctcccctgggtttatgtcacccggccccacactcgagtcccgtttccccgggggcgcacggcgatcagcgatcagagacctcgagcgggcccagctcgacgtcagggcggggaggggggaaaggcggggccggaggcggtggcaggagggcgggcccggagccgggaaaccggagccccggggcaccccagaggcctaggagggaggagacgggggggggggggggaagtgtgcgtccgactccgcaggacccctgcagggggaggcagacagagcgcccgtgcgctcccctcccccgtgcagacccgggaacgctcgaccgcccggggctgtccctgggggggtcaccagaggcgtggaggcggtgccggcagtggaggccgcagacaccttgggcctggccagcagcgcgcgccacaccgccctgccgccgtccccatgcgcgccccgacgacggcgcttggctcccatgcgctccggtgcagcgccccgggcccggccccggccccctgccctggcactgccccccacgggccccgagtccctgacccacttccccttcagcgatgaggacacccgtcggcaccctccgggcagatctgtcaggtgggtggcccgtggccagtcagtcctctcttttaatactgaagggcactggctgtgctgggggggtgggggtgctgagtctacctgggtgagtcccctaagtggcttccaggatctggctggggccccaccccctttcctggctctaaaggcctggggtgctgctgagggcttcttgaaggtggcagccctcaaagtgggtgctgggtccattcctgcctatccaaggtaggacccgtcaccctctttgtgtccttaaacctgagcttctggcattcactttggctgcaaatatgggtgtccagcgtcacctgggctccactcccaggccactggcctagaaccagatccctaagtccctgcctggctcagtgtctccagccttaccttccccaccccctctcatgctggagctgccaggctgaaaaccaagctgggttgggggtggggaggggagattctgggtctcatggagggtgtttagaataggctggactgagctggggctgtgagtggcctttaagttctcagaattctcaggggtttctagccttgttcttgctttcctgctccatggtctctaacacagacacacacacagggccgcacacagggcaatccgggtcacctggtgtttaccgtactaggtatgggtctcctggctgcaccaagaggaccctgcagttgactcatggccacacacaggtgacacacagaccacagcaaccctggcccagccctcgcacatcctcgtctacactgcgttcctccacagtgggggacaytgtattttggtgagacacattctcacaaaaatacacacccagggcccacacatgttcctgtatgctgtactcccacctgcaccagatacacacaggaacgcaccccgtgcccacacaggggtcagggactgtcacagtatcagtgcgacacggtctcataaagtcacccagactcagaaatacacagataaagacacagagatgcacacaggcacccatgagcacccagcccctgctcacacaggcagatgtgcgatgccacagagatgtctatgtgygatgcccgggggcacacagacctccctctcccccagtctcttacatactcagccccccaaagagctgtgtcacctggcactacgcgcctgcctgggagacacacaccagcacccgccttcaacctccatgtgaccttcacaaagcaaatgccaggcctttccataaaggctgcctggcaccacctacaagtgagtcaggtggaaaagcacggggagccgggggagacaccaggcctgcctgccctgtgcgccccgggggaagacactcgtcgcagctttgtagctcagctgcctgggttcaaatccacattctaggccgggcgtggtggctcatgcctgtaatcccagcactttgggaggctgaggtgggaggatggcttgagcccaggagtttgagaccagcctgggcaacatagtaaaacctcatctctacaaaataaataaattttaaaagaaatccatgctctgctactaataaccatagtatttatcctttatgtgcctcagtttctttctttcttccttccttccttcctttctttcttcctttccttctttccttctttctctctttcttcctttttttttttttcagggtctcgctctgtcacccaggctggagtgcagtggagtgatcttggctcaatgcaacctctgcctcccgggttcaagcaattcttgtgcctcagcctcccaagtagctggcattacaggtgtatgccaccatagcccagctaatttttttgtatttttagtttagatggggtttctctatggtggccaggctgatctcaaactcctggccctaagtgatccatccaccttggcctcccaaagtgctgggattacagacgtgagccaccgtgcctggcctcagtttctttgtctggaaaatggagcattaatgcatgttacagtatagcacaatgcctagcatgtggtcttcacataagtttgttttttttttctttcttgagatggagtctcactctgtcacccaggctggagtgcagtggtgcgatcttgcctcactgcaatctgtgcctcctgggttcaaccaattctcctgcctcagactcccaagtagctaggattacaagcgccccgccaccacgcctggctaatttttatatttttagtagagacaggtttccccatgttggccaggctggtctcgaactgctgacctcaagtgatctgcccgccttggcctcccaaagtgctgggattacaggcatgagccactgtgcccagctttttttttttttttttttttttgagacagcatctctatcatccaggctgggatgcagtggtatcatctctgctctctgcaacctctgcttcccaggctcaagcgatgctccaacaggcatgagccacggcgcctggccatagttcttgttattataatctttaccaatgtgttcgtttcccccgcccccgctccctagcttgtttgtgtcccgtcagtccctgcagtagtcatcccccaaggcctagactctccctgggctgcatagccctcaacaagcccaatttcatgctcccaaaagccctggtgggaaggcctaggggccacgtggagggggaaacaggtagcaacttcatctgaaagtgtcaccaaatgatcagcctgaggccagatgcagtggtcatgcctataaacccagcattttgagagggcgagactttgggaagcagattgcttgagtctaggagttcaagaccagcctgggcaacatggtgaaaccccatttctgcttaaaaaaaaaaattagctgggtgtggtggtgtgcgcctgtggttccagctactcaggaggctgaggtgggaggatcgcttgagcctgggaggctgaggctgcagtgaaccatgatcgccccactgcactgcagtctgggtgacagagcaagaccctgtatcaacacacacacacacacacacacacacacacacaaacaaacaaacaaaaaacaatgattagcctgcctaagagggagtcttgggcgggtcacttcacctccaatggagcgtctgggcatgtggctgtgatgtaaggctggcagctacccctgtgtctgggttgcaaccttgggtcccatggggatgttgctggagtggcctctggcctaactttgggccaccctgagcagtcagtggcaagccagggaggggtgactctccatggctcagggatctgattctggggcatcactggccctgactctcccctatccccaccagctcccaggcagcagttctatagccctgtcccctcccctctgtcctccctcagcccaggggacatcgggtcttgaaacagaaacagcagggccccagggagtgtcctcttcccatccaggcctctgggctcctgctgacgtgagctgagtcccttggggctggtggatgtgccaggatgtgctagctgggcacctgcttgggaacagagtctcaccrtcctaaactgcagcttaaatcctaggccggggagttggaggtgtgtagctatgttcctctcgccttctctggagctgaaaaaaaatccaccttaggagacaggacacagttctcagacaatgaagccaccaaccccttgtctccttatgccatgggaatgttaacaggacttatatgttgccaggcgcagtagctcacacctgtaatcccagcactttgggaggccgaggcaggtggatcacctgagatcgggagttcaagaccagcctgaccaacatggagaaaccccgtctctactaaaaatacaaaattagccgggcatggtgatacatgcctgtaatcccagctactcgggaggctgaggcaagagaatctcttgaacctgagaggcggaggttgcagtgagccgagatggcgccactgcactacagcctaggcaataagagcgaaactcygtctcaaaaaaacaacaaaaaccaggacctatatgttaacttatagagtgggttggagccctctgtcggttaatgtgtataaagcactttcataatgccaggcacacagcaagcattcaataaatgtcttgttattattactgtatgcctgaaaggatctaacctggcacccaggacacagcaggtgctcaacaaatggacactattggctgggtgcagtggctcacgcctgtaatcccagcacactgggaggctgaggcgggtggatcacctgaggtcaggagttcgagactggcctggccaacatggtgaaacccgtctctactaaaaatacaaaaattagccaggtgtagtggcgcacacctgtagtcccagctactcgagagactgagtcaggagaattgcttgagcccggcagcagaggttgcagtgagctgagatcacatcactacactccagcctgggtgacagagtgagactccatctcaaaaataaataaataaataaataaatggacattatcatcaaaggtccaagctgatgatctatgattatctcaccttaagaaccttaagagtggctttttttgtttgtttgttttttgagactatcccctaggctgcagtgcagtggctcgatcttggctcactgcaatctccacctcccaggatcaagtgattctcctgcctcagcctcctgagtagctgagatcacaggcgcacaccagcacgccaagctaatttttgtatttttagtagagacggggtttcaccatgttggtcaggctggtctcgaactcctgatctcatgatctgcccgccttggcctcccaaagtgttgggattacaggcgtaagccaccgtgcccggcctttttcttttttttttgagatagggtctcactgtatcayccagtctggagtgcagtggcatgatcacagctcactgcagcctccaaatcctggtctcaagcaatcatcttgcatcagcctcttgagtagctgggactatacacatgcaccaccatgctcagctaacttaaattttttgtagagacagggtcttgctatgttgcccaggctggtctcaaactcctggacttaagtgatcctcccacctcagcttctcaaagtgctgtgattataggaatgagccattctgcttggcccattttatccattttcgagtgtatagttcagtggcattaagtacattcacattgttgtgcaaccatcaccaccatccatctccaggactgtttttttttttttttgagacagggtctcactctatcacccaggctggagtgcagtggcatcatcactgctcactgcagtctatacctccagggctcaggtgatcctcccacctcagcctcctgagtagctgggaccacaggcgcacaccatcatcatgccttgctaatttttttcattttttgtagagatagggccttgccatgtttcccaggctggtgttgaactcctgggctcaagcaatcctcccgcgtgggcctcccaaagtgctgggattacagatgtgagccacttcacccagcctccaagactttttttttttttttgagacggagtctcgctctgtcgccaggctggagtgcagtggcgcaatctcggctcactgcaaccttcgcctccygggttcaagcgattctcgtgcctcagcctcctgagtagcttggattacaggcacgcaccaccacacccagctaatttttgtatttttattagagacggggtttcatcatgttggccgggatggtctcgctctcctgaccttgtgatccgcccgcctccgcctgccaaagtgctgggattacaggcgtgagccaccacacctggccaggactttttaatgttctcagactgaaactttaagcacaaacacaccatttccctatctcccccagccgctggcacccactcttctactttctgtctctgagtttgagtactccagggacctcatgtaagtggaatttcctgtgcactatttgtctttttctgactggcttattttactgagcataatgtttttttgtttgtttgtttgtttttgagacagagtttcactcttattgcccaagctggaatgcaatgtcccaatctcggctcactgcaacctccacctcccaggttcaagtgattctcctgcctcagcctccgagtagctgggattacaggcatgtgccaccacgcccggctaattttgtatttttagtagagacagggtttctccatgttggtcaggctggtctcgaactcccaacctcaggtgatccgcccacctcatcctaccaaagtgctgggtcactgagcataatgttttcagggttcatccatgttgtagcctgtgtcagaattcctttcctttttaaggctgaattctattccattcaatggatataacacattttgttgatccattcatctgttgatggacacgtcagtcacttctaccttttggccatcgtgaattacgctgctgtgaacatgggtgtacatgtatctgtttgagatccccactttcaattcttttggggatagacctaggagtgggattgcgcggttgtgtggtgattctacgtgtttgtttgttttgagggttttttgtttgtttgtttggttggtttctgacagagtctcattctgtcggccaggctggagtacagtggtgtgatctcggttcactgcaacctccgtctcccgggttcaagcaattatcyggctgcagcctcccgagtagctgggactacaggtgcctgccaccacgcccacctgatttttgtatttttagtagagattgggtttcaccgtgttggccaggctggtctcgaactctggacctcaggtaatctgcccgcctcggcctcccaaaatgctgggattacaggcgtgagccaccgcacctggcctacaaacatttttgattggggttacagtggttctctcaacagcaggtaggaatggattgtttgtgagtggggaggaatcggagcagcagagagacctggttggaatggagagtgcagcaggtgagagaggaggtgttgtgacctcagggatgcgaagagtccaggccttcaataaggtctgtctctggaactcaaatctgaggcccaggaggcgggtcagaggctgagagacggggtggatggaggtaggagtgcctcctggctccacagtcccttctcttggagtgaagagaccagctgtctggaggggagagcaactgggaaacaggacacgggtaaaggccagttacaagtggcatcctggagagaaggtggctcaggacacagctgtccccaaaataccctccttggcattgcatgcaggggatggaggaaccctaagatcttcaaaagtaaaaggcccttcaggaaccatcctaataggcgtgacatggtatctccttttttttttttttttttttkagacggagtcttgctttgtcacccaggctggagtgcagtggcgtgatcttggttcactgcagcctctgccacccgggttcaagcaattctcctgcctcagcctcccaagtacctgggattataggcacccaccaccacacctagctaatttttgtatttctagtagagacagggtttcggtatgttggccaggctggtctcaaactcctgacctcaagtgattcacccaccttgcctcccaaagcgctgggawtacaggcatgagccacctcaccagacctgtatctctttcttttgatttgcgtttccctgatgagtgatgttaaggattttttttcatatgtttattggctgttttaatatcttttctgcagatatgcctattcaagtcatttgcctattaagtcaaattatttacaatttattatttattattttgagacagggtctcactctgttgcccaggctggtgtgcagtggcacgatgtcagctcactgcaatctctgcctcccgggtttaagtgattctcccacctcagtctctctagtagctgggattacaggtgagagccgccatgcctggctaattattttatttatttatgtattttttgagacagagtctcgctctgtcatccaggctgaagtgcaatgtcgcgatctcagctcactgcaacctccaccttccgggttcaagcagttctcgtgttttagcctccccagtagctgggattacaggcacatggcaccacgcccggctaatttttgtatgtttagtagagacagggttttcactgtgttagccaggatgggctcgatctcctgacctcgtgatccacccacctcggcctcccaaagtgctgggattacaggcgtgagccaccacgcccagccaattttttttttttttttttggttgagacggggtttcaccatgctgccctggctggtttcaaactcctagactcaagtgatccgcccacctcggcctcccaaagtgctgggattactggtctgagccaccaggcctggcctatttatttttgaaacaaagtctccctctgtcgtccaggctggagtgcagtggtgcgatcacagctcactcactacagcctcaaacatcccaggctcaagtgatcctccagtcttagcctcccagtagctgggactgcaggcacacactgccatgcctggctaattaaacaagttttgtttttttgtgttttttgtttctttgtttctttgtttttgagtagctgggactataggtgcacaccaccatgcccggctaatttttgtatttttagtagagacggtttcgccatgttgtctgggctggtctcgaactcctgacctcaagtgatctgcccgcctaggcctcccagagtgctgggattacaggcgtgagccaccgtgcccagccctttttttttttaagagatggggtctcactatattgcccaggctggccacaagctcctggtctcaagccatccttccacctcagcctctgttgatacacaaaagtctttcattttgttgaagtccacttgtttgttattgttgttgcctgtgctttggtgtcaaattcaagaaatcattgccagatctaatgtcatgaagctgctaagagttttatagttttggctcttatgtttaggtatttggtcattttgagttatttttttttttttttttttttttgagatggagtctcgctctgtcatccaggctggagtgcagtagtgtgatctcggctcactgcaacctccgcctcctgggttcaagggattcttctgcctcagcctccggaatagctgggattacaggcacccaccactacgcccggctaatttttgaatttttagtagagacggggtttcaccatgttggccaggctggtctcgaactcccgacctcaggtgatctgcccgcttcaggcctcccaaagtgctgggattacaggcatgagccaccacgccctgccttgagttaatttctgtatgtggtccacctcttcagttttcccagcaccatcgttttgaaaagacagttctttccccattgagtagtctctggggttagactagtaggtagatttcaggctatgctctgagtgggtgcaagtggagagggagagaggataggaaccccccgcttcccctttctaggtcagcctatagagagtcaccataagactttactggaatggtctctctactaagaaataagtttgaaatctcctaggcctgccaggcacctataatcccagcactttgggaggctgaggtgggcagatcacttgaggccaggtgtttgaaaccagcctggccaacgtggtgaaaccctgactgtactaaaaattcaaaaattagccagatgtgctggtgcatgcctgtaatcccagctatccgggaggctgaggcaggagaattgcttgaacccgggaggcagaggttgcagtgaaccgagatcgcgccactgcactccagactgggcgacagagtgaaatcctgtctcaaaaacaaaacaaagcaaaacaaaaatgtataagaagacacgctttaggcatagcgtttcatgtctgtaatcccagcactgtgggaggccaaagcgggaggatctcttgagcccaggagttacagactatcctgggcaacatattactattactattattaccttattattataattacttattacatattaccttattactattattacatattaccttattactattattacatattaccatattactattatcacatactactaatatatgtaatattactaatattacatatataatatcagtaatattatatatagtaatattatatacatgcatgtaatattagtaatagtgcatatacatgtatgcaatattagcaatattgcatatgcatatataatactagcaatattgyatatgcatgtgtatgtaatattagtaatattacatattacatattaccaatattacatattacctattactacaaaaaattcaaaaattatctgggtgtggtggcacgtgcctatagtcccagccactcccgaggcttaggtggggggatcgctagagtccaggaggctgcagtgagctatgatggttccactgcactccagcctgggcaacagagtgagaccccatcactaaatgataagctgcaaacttggagaaaaatacatgataagggatttgtatccagaatatataatgggccagccatggtggctcacgcctgtaatcccagtgttttgggagcccaaggcaggtggatcacttgaggccaaggtgagggcattgcttgagcccaggtgttccagaccaacctggacaacatggcgagaccccatctctacaaaaaatacaaaatttatctgggggtggtggcatgtgcctgtagacccagctgcttgggaggctgaggtgggaggatttcttaagccagggaggtggaggttgcattgagctgagattgtgccattgcacttcagtctgggtaagagagtgagaccctgtctcaaaaaaaaaaaaaaaaaaaattagctgagcttgctggcgtacacctgtagtcccacctacttgggaggtggaggtggaggatagcttgagcccaggaagttgaggctgcagtgagctgggattgccctacaggactccagcctgggcgatagagcgagatttcatctcaaaaaaacaccaggccaggcgcagtggctcatgcctgtaatcccagcactttgggaggcygaggtgggtggattacttgaggtctggagttcgaaaccagcctggccaacatggtaaaatcccatctctactaaaaatacaaaaattagccaggtgtggtggcaggtgcctgtaatcccagctactcgggaggctgaggcaggagaattgattgagcccaggaggcagaggttgcaatgagccaagatcgcatcactggactccagtctaggtgacagagcaagactgtctcaaaaaaaaaaaaaaaagataaatatagattatgtcaagtaagtagtgggattttagtttgtgtgtgtgtgttttaaggaagagaaatagtattgggctgggcacggtggctcacgcctgtaatcacagcactttgggaggtagaggtgggcagatcacctgaggctgggagtttgagaccagcctgaccaacatggagaaaccccatctctactaaaaatacaaaatgggctgggcatggtggcccacacctgtaatcccagcactttgggagcctgaggcaggtggatcacctgaggttggaagttccagaccagcctgactgtgtctactgaaaatacaaaatttgccaggcgtggtggtgcatgcctgtaatcccagctactcgggagactaaggcaggaaaatcgcttgaacccaggaggcggaggttgcggtgagctgagatcgcgccattgcattccagcctgggcaacaagagtgaaactccatctcaaaaaaaaaaaaaaagtattatggttgaaattttagctgggttggtcaggggaggcttctttgtggcagtgacatttgagcagaggcctgaaggagggaaagaggagccgctgcaaatctgggctggagaaacagcctgtgcaaaggccctgaggcaggactgtgtctgagattttttttttttttttttgagatggagtcttgctctgttgcccagactggagcgcagtggcaagatcttggccctcactgcaacctccgtttcctgggttcaagtgattctcctgcctcagcctcccaagtagctgggattacaggcatccaccaccacgcctggctaatttttgtatttttattagagatggggttttgccatgttggccaggctggtagagaactcctgaccttcagtgatctgcccaccttggcctcccaaagtgctgggattacaggcatgagccacctcaccccggcctgtgtctgagatttttagggaacagtgaggaggccattgtggctggagcagaatgagtgaggggggaagggaaagtcgtgggacaggacctgtgagctgcagtgaggactttggattttgcccagagtaaggtgggatccatcgaaggttctgagcagagggaggacttgacctcattcaggtgtttccaagctcgccctggtggccactgaagaaagactgggggttgaaaacaggaggtgggtactagggcagaggtgaatgcaaccagtcctggctgagggaagctgaccaaggagtgggtgagaagtagacagattctggatagattttggcaccaaggctgatttgaggtacgaaggaaagagtgaatgatcccataaattttggccttggggtgtccccagcacagcagtggggatggatgcacaccggtgctcaagttccatctttgcaattctgtgtctcccgtctcttttagggcatctgtctttctttaacatcctccacttggttgggcgcagtggctcaggcctgtaatcccagcactttgggaggccaaagagggaggatcacatgaggccaggtgtttgagaccagcctggccaacatggtggaaccccatctctactaaaaatacaaaaattagccaggtgcggtggtgcatgtctgtaatcccagctacgcaggaggctgaggcagaaaaatcacttgaatccgggaggtggaggttgcagtgagccaagatcacaccactgcactactccagcctgggccacagagcgagaccatacctcaaaaaaaaaaaaaaaaaattctccacctgaatgtctgccaggaattcccttaggctcctcatcccacccccacctttttttttttgagacattgtcttgctctgtcacccaggctggagtgcagtggcacgatcttggctcactgcaacctccgcttcctgggttcaagtgattctcatgcctcagcctcccgaatagctgggattacagacacctgccaccatgcccggctaatttttgtatttttagtggagacagggtttcatcatgttggccaggctggtctcgaactcctgacctcaagtgattcacccccacttggcctcccaaagtgctgggattacaggcattacaggcgtgagccaccgcacccggcctcctcattcctcttgacctccctaatagcgtttcagcctcctgacccctcttmtcgcccatcccctgcagcttygaggcagagaatgggccgacaccatctcctggccgcagccccctggactcgcaggcgagcccaggactcgtgctgcacgccggggcggccaccagccagcgccgggagtccttcctgtaccgctcagacagcgactatgacatgtcacccaagaccatgtcccggaactcatcggtcaccagcgaggcgtgagcatccttctccccacatgccagttcccccaggcctggtcctgctggaagctgcccttcccagcagggagtcggggggcacccacccctatcctcctcagcactcccaacctgtcctccccagtgaagggtaagcagcaccctgcccctcctataaagggctcagttcctttttttttttttttctttttttcttttttgagacggagtctcgctctgtcgtccaggctggagtgtagaggtgccatctcagctcactgcaacctccgcctcctgggttcaagcaattctcctgcctcagcctcccgagtagctgggactacaggcaccagccatcatgcctggctaattgtgtatttttagtagagacagggtttcaccatgttggccaggctggtctcaaactcctgacctcaggtgatccgcctgccttggcctcccagagtgctgggattacaggcgtgagccaccgcgcctggcctcagttccttttttttttgagacggagtgtctctctgttgtgttgcccaggctggagtgcagtggtgcgatcgcggctcactgcaagctcctcctcccaggttcacgccattctcctacctcagcttcccgagtarttgggactacaggcacccgccaccatgcctggctaatttttttgcattttttagtggagacggggtttcaccgtgttagccaggatggtctygatctcctgacctcatgatctgcccacctcagcctcccagattgctgggattacaggcatgagccaccgcgcctggcctcagttcctttttttctcytttttttttttttttttttttttttgagacagaatctcacactgtcgcccaggctggagtgcaatggtgcaatctcggctcactgcaagctccacctcccgggttcatgccattctcctgcctcagcctcctgagtagctgggactacaggtgcctgccaccacacccggctaattttttctatttttagtagagacggggtttcaccttgttagccaggatggtctcgatctcctgacctcatgatccgcctacctcggcctcccaaagtgctgggattacaggtgtgagccaccgcgcccggccctcagttccttttttaaaaaatataatagtgatcgggtctcactatgttgcctagactggtctcaaactcctgggctcaagcgatcctcccacctcagcctcccaaagtgctgggattgcaggcatgagccaccctgcccgccctcagttactttatagcatgtccagccagaaaggtgtgagtgcccacccactgtatcctcccacagtgtgtacatctcacctgacccaccctctgcccttcctccaggttttcctaagctaacctcccttatcgtgacacttgttgaggtgtgagttccccctgaacctgctcagcctcttcctctctcactgggttcctccaggcctttccaccagccattgctgtacacacctcaacccacttggtccccttcctgttcactgctcccctcatcaagccccgcccttgcaacatattcacctcgggtcaggcttggaagctcacactcataatcctagcacatttggaggctgaggcagaaggattgcttgagctcaggattctgagaccagcctggccaacatagcaagacttcatctcttttttatctctctcttttttttttttttgagatggaatcttgctctgtcaccaggctggagtgcagtggcgcgatcttggctcactgcaacctctgcctcccgggttcaagggattctcctgcctcagcctcccaagtagctgagactacaggcgtgcgtcaccacacccagctaatttttgtatttttagtagagacaaggtttcaccatgctggccaggataagatgtcatctctttaaaagaaaaaataaataaataaaaaggtcaggcacggtggctcacgcctataatcccagcactttgagaggccaaagtgggtagattgttccaggccaggagtttgagaccatcctggccaacatgatgaaacccagtctctactaaaaatacaaaaattagtggggcgagaggcacatgcctgtaatcccagcttcttgggaggctgagacaggagaatcgcttgaacctgggaggcggaggttgcagtgagctgagatcatgccaccacactccagcctgggtgacagagtgagactctgtctaaaaaaaaaaaaaacacccaaccatattcacctctcccctctccccttttccactttgtctcttctccccggacctacctgagccacactccttgactgccatttcttccacgatcagccctggacacatatccacccttatgcagtacaagtgttctttccctaggtcccacagagtcccctccctccctctcagcctccctgggtccagcctcacagggcatctaccccagacagttgcttctctgcggacccctgacctgcctctgtcctcaatcacaggcacgctgaagacctcatcgtaacaccatttgctcaggtgagacctcttcccaaatggttaaggagagaaggggctccaatgctccgccacacttggggacagggcccagccccgctgcctctctaggggaaccccactcctcactgccgctccccatcccaggtgctggccagcctccggagcgtccgtagcaacttctcactcctgaccaatgtgcccgttcccagtaacaagtaagtgaaggctgggctgcaacasctgtgatcataaggtgaagcatatgcgggttctgctctcagccctgctgtgtgacctctggcaggcaggtgacctctctgaacctctgttcagacaacagctcccagaaagccagagagccattgcaggtcaagtgcctaagacacagaggtgttttttgtttgtttgtttgttttttgttttttgtttgtttgtttgttttgagatcaagtctcactctgtcacacaggctggagtgcagtagtgcgatcttggctcactgcaacctctgcctcccgggttcaagcaattctcctgcctcagcctcccgggtagctgggattacaggcatgcaccaccacaccgggctaatttttgtatttttagtagagatggggtttcaccatgttggccaggctggtctcaaactcctgacctttggtgatccacccgcctcagcctcccaaagtgctaggattacaggtgtgagcctctgcgcccggcccagaggtttttataaataaagatttaggggtctggatgcatggtggtgaggccacagccacagtccccaggcccaccctgggtcttgacaccaagttgctgggcaaatggcattccatggtgcttctgttgcccttctgcaaagtgatgatcacagccaagcgtgctggctcatgcctgtaatccagcactttgggaggccaaggcaggaggtcacttgaattcaggagttcaggaccagcccaggggaaacaaaatgagaccctgtctctaaaaaaaaaaaaaattagcccagcatggtggcatgtgtctgtggttcccacctacacagaaggctaaggcaggaggatagttttgagcccaggaggttgaggctgcagtgagctgtgttcccaccactgcactccagcctgggtgacagagcaagaccctggttcaaaaaataaatagataaataaagtgaggattacaataatgcctcccttagataactgctgtgaggagaggagatgatgtctagaaagtgctagaatattgccctgcgtacataggagtggatcttaattgtttyagkgcaagagatgtggctgagagctgccagtccttctgggggtgggggatagagacatccttaggggcttggaggatttgtggagagttaggcaagagagcagagatcttggaagcccaggacctgaccttaaggcggatcagccatgtggtcttgaagaagctgtttcacctccttgagcctcagtttccacatctataaaatggatttttctgggactcattgaggctgcaggcagagtacatggcagcgtccttaggacacggtgagttttcagacaaatgaaaattggcactgttcatgaaagcgggaggcagggacctggtggggggacccaggctgacattgcagccccatttttttttttctgcaggcggtccccgctgggcggccccacccctgtctgcaaggccacgctgtcaggtagctaagcccagaggggtgggaaggggccccccttgctgccccagtgggggtccctcagccccttccccacccagcagtccactcacctggcgaaccccgtcacggcggtctggagcctctgggcttctgcctacagaccttctcagtcactaccctggctgccccttccttagaagaaacgtgtcagcagttggcccgggagactctggaggagctggactggtgtctggagcagctggagaccatgcagacctatcgctctgtcagcgagatggcctcgcacaaggtgtgcaggtggtgggcagaacccctgggcggggcaggcggrrgcggggccagtgggtagagccaaccgctggatgggaccagtgggcgcggcctgcggatggagccasccattaggttgttcctgtgggsggaratarctactgggtgtggctgattasggcagggccaatccctgggcgggggctggtggagctgggccctatggatggagccaaccactakgttaggcctgtagccgaggccaactattgggcgtggctcatgagggtggggccaatctctgggtagggtctatggtatggggtcagtccctgggtggggccaacccctgggcggcagcttcaaggcttgaagctcctgtagattatgactttccccagggctggaggarcctggtgtgtgttgtggggtggggtgtgtctgtctggttgtacatgtgtcaataggtgaccgtttccgttggggggttttatgcttttatggtctgcgggggtgtatctgcsgctatasgtctgcgtakccgctggtttattggctacgcatttgcagcgctggggtgttgggaatagattctgaagagtggcacgccagtgtgtacttgtgtaggtgtataggtttgcacgggtaattatgcagggttataggtgtgtggggctgtgccagaggggtgcgcatgtctgcaggggagagttggaccagatgggaaactgaatgtgtagctctatgtgtttgtgaatgtgtgtgtttgcagggccgtaggggtgactgcaatgctcccatgtacagttgtgcagacggtgcactgcacaactccaggggacaccattcaggaagcaggcagtatgtgtgaatgatgcttcctggagttggagagagtggtaacagcccttgtgggcgggtgcctatcaagaaatgatctgtaggtgggagtgtctttgttggggggtgcttacagcagtgggtggaggcttgtataggaacatagcagtctgagggcgattgtgtccctgagggtggatcaagcatctgaaatgtagctgtgtctttggatatgggtctgaggatgtttctgcaatggtgtgtgtgtgtgtgtgtgtgtgtgtgtgtgtgtgtgtgtgtatttttgcatctgtgagtatatttccttatggatttgtcgggatatgtttgtgtccaagggcagtggatatttgcaatggttggaaagtgtgtctgtgggtgtgtttagtgtgtgtctgtaagtgtggctggctggggaggccaaggcgggcggatcacctgaggtcgggagttcgagcagcctgaccagcatggagaaaccccgtctctactaaacatacaaaattagtcgggtgtgctggagggtgcctgtaatcccaactactckggaggctgaggcgggagaattgcttgaacctggaaggcggaggttgtggtgagccgagatcgtgccattgcactccagcctgggcgacaagagtgaaaactccgtctcaaaaaaaaaaaaagaaatgtggctggtatctcggtgtctgtctataggtgtgggtctggatgtgggtctggatgtgggtctgtgcccttggatggggcgtgtctgaaggcatttgctatatgctcagctgtggacctataagtgtgttggacatcagagttgtgactgtctccgggtgtgtgtgtgtgtgtgtgtgctgtaagtgtacaacagaaagcatttgagtatctgtgtatattcaagtgtcaagtgcctggatgtgtgtgggtgtccctggaaggtgtgtctcagggtgtttgtacatctgtgagtgtaaagtggatgtgtgtttctgtctctgggtgtgtccatggaggggatgggtcctgatggggacagcccacctaggttctggctgaggcccatgggctctgatgcccctttaatacccccccacccccagcaccacctgacatcccatgcagcctgccagtgctgcagtgagcacacacgcacacacacgggtgcacacacagagctccgcagcctcctcctgggacccttgccctgcccccctcccatgggcacggaccccccaccgcctccacccactgccgcgggggggcccgttggggcccagggctggcgggccatgtaaccagggctgctgctgggagcgcggaggggaagggagcccccagccctgctgggccggcccaggcccctccgcggctcccccttccactacccacctgcccggcaccccctccccagtggttgttaaccccgggactccccaagcccagcctctgtgtgcagcagccccaggcgggctaagtctccaagatgcccttggtggatttcttctgcgagacctgctctaagccttggctggtgggctggtgggaccaggtaggagagtgcagggtagggggtgggcgggcatcctggtgagctgggcccccggtgtgggcttgtgtgtgcagctgtgcacgtgtgtggcctggagatgaagccttgtgactgtctctgtgtgtggcccagggctgggcgtggatggcgggcagctgggggtgtgtgactctccctgggggtggactgcgggtccctcactgggtgtgactgtgtcagtgcctggatgtgtgtgtgtgtgtctgcgatggtgtgtgtctgcctgagtataggcttgtttgcctgggtcactgtgtggccctgtctgagatcatctggctctgaccatggtgttgtgtgttgggttgtgtgtctgagcccagagctgcctgatattttggggacatgtgaccccaaatgtcagtgaccgccttattttgcatgccctttgatctgtgtgtctgggctgtgtgacgctgtgtaggactgagagcctgtgattgtgtgtgtggttgtgtgagattttgtgggtccatcttgtgtggatgtgtgtgtctctgtacccagggtctctgggtggcaccgggaggagggagcaccccgtccaagcctgggccatgcaggctcacccctcctgccaagtgtccctcctgcttccctggacagagtctgctcctgcttttggggtgctgtggcagagcttgggggtggggasccaatgccctttctcctctgtgtacaatgtcacagcagaggcctgtgcagagtggcatggggggaccaggaggggcctccaagcccggttttgggtatactctgttcatctgtgcatctgtccacccttctggggttgggggagagtgggctatgatgagaacccccctccccctcccctgggtgatcaaactgggatttcctcagctcaccattctcccctaccccggccaaacctttttgtcccccagagcttggctaccacgttccctttttccaaactgagctggaggccaggagccaggacccccaggattggggtccatgtctgggaacacttgggtcaggggcagctctaggaaggcaagggttaaggggcctccggcttgccccccttttccccagctcagcagctggttggagggggagttgctaaggagactcccatcgccatggcgacgggattctcctgcttccctattggctccctgttaggcaggagcccctcccttccacaggtgcccctctagctcctccttgggggagatgaggagggaagcccctctttcctcaggcagggagggttatgctgaccatgactccccaaacctggggacctccatccagagctgggaggacaggaaaggctgaccccaaccccccagcagtcttataggggctctgttggctgagcagaaaaataggagggactcatggggtcttcaggcgttcttgggaaggactgasaccctcctcaccactgtgcttcccccatcatttcttccttgttgactcctttaccttagttcaaaaggatgttgaaccgtgagctcacacacctgtcagaaatgagcaggtcyggaaaccaggtctcagagtacatttccacaacattcctgggtgagtgaggggaagcacgtgggattggaggggggacatttggggtagagagggggctgcccctgaccgtgggtcctgttgctcacatcttcccagggactctgactctcaactccccaaaggtcacagtcaccctatccaggaaccctcatgttcctgatgcctccaaactctgtgggacccccagcttctatagagcccaacatctgaaatcatctgtgagcttaaaacccttctaaactttaaaaagcctccaagcgccgggcgcggtggctcacgcctgtaatcccaacactttgggaggctgaggcaggcggatcacttgacatcagcagtttgagacctgcctggccaacatggtgaaaccccatctctactaaaaatacaaaaaattagccaggcatggtggtgggtgcctgtaatcccagcaactcaggaggctcaggcaggagaatcgcttgaacccagggggtggaggttgcagtgagccgagatcgctccattgcactccagcctaggcaacaagagtgaaactcttgtctcaaaaaaaaaaaaaaaaatattagccgggcatggtggtgtgtgcttgtaatctcagctacttgggaggctgaggcaagagaatctcttgaactcaggagacagaggttgcagtgagccaagatcacaccactgcgttccagcctgggcaatagagtgagactccgtctcaaaacaaacaaacaaacaaacacctctttgttttagcactcacttgaacccgggaggcagaggttgcagtgagctgagatcacgccactgctgcactccagcctgggcaacagagtgagactctgtctcaaaaaataaacaaaaaaaaaaagcctccaagctgaaaagcctcctgaactgagtagaaccccaaattcaatagaatttccaaacttggattgactcccttccaaactcagtagacacacccaaactcaagagagatgcccaaactcagtagagttctcaaacttaagggaagttctgtgcttccgagtccacaaaaggccccccaactttagcaacctccaaactgaaaaacccccaaattcaataggatctccaaacttggtatgacccccccccaattcagtagactcccaaaatgttagaaccctaatctctagaagattatcaagcttaagaacctgtaagaggcaggaagaggcagctcttgcctataatcccaggactttgggaggctgagaaaagaggatcgcttgagcccaggagttcaagaccagcctgggcaacatagtgagaatctgtctctacaaaaaaaattaaaaactaggccgggcgcagtggctcacgcctgtaatcccagcattttggaaggccgaggtgggcagatcatgaggtcaggagttcaagaccagcctgaccaacatggtgaaacgccatctctactaaaaatacaaaaattagctgcgcgtgttggcacacacctgtaatctcagctactcaggaggctgaggcaggagaattgcttcaacctgggagatggaggttgcagtgagctgagatagcgtcactgcactccagcctgggtgacagagtgagactccatctcaaaaaaawaaawaaataaataaataaataaatagaataaaaaactagtcgggcatggtggcgtgtgcctgtggtcccagctacctgggaggctgaggcaggaggatcacttgagcccaggagttcgaggctgcagtgagacatgattgcgccactgcactccagcttgtctcaaaaaaactaacacctgtaagattcctaattcaatggaaccccaaatgcaccagaataccccgatttcactggaacccttaagttcatgggtacctcaaaaccctcaagctagagatattcccccaaactcaggataatttaatcctcgcagtttatcactacactccaaaggcccccaaattcgggaaccgcccagacaagctcaagaaaagtgttggggctgggtgcggtggctcacgcctgtaatcccagcactttgggaggccgaggcaggcggatcacttgaggtcaggagttcaagaccagcctggccaacatgatgaaactccatctctactaaaaatgtaaaaattagccgggcgcggtggcgggtgcctgtaatctcagctactcgggaggctgaggtaggaaaatcgcttgaacccgggaggtggaggctacagtgagccagagatcgtgccactgcactccagcctgggcracagagcragactctgtctcaagaaaaaaagtgttcggtgtttccagtactcccaccagtgagggtgtgtctctgagttctgaggatccacccaatgggagcatrrcatgtaaatgacccgtattaggccttttcattgactagctagctccaggtcacaatgggtgaccttggctcagctctggaagcccctgaaagctcaggaaaagggttcctggggctgtcccccaggcaggctggtgccaaggtgggcggggggggggggggcagggacatggagccagagaccacccttccctctctcttcccagtgatgccaccccccacaccagcactcttggcccccatgctgggatcttccccacccagaaaggttccctgggtgttcggggtaggcagcggctctccctggcatccccacctcgctttctgacttcccacaccactctccatccatatctgatgatcagaccggggccatcccagagccctgggcccccactccagcccaccacctcctggaagatttcccacatcccctctggtttcctgactctgagtagccagcggcatcacagctgaaagggttctgccgtttcgggtgagccttccccgtacgtggtagtgggctgaagaataagggagcctccaggggtggaagggktgttcacacttgttcctgctccccatcttctgcagacaaacagaatgaagtggagatcccatcacccacgatgaaggaacgagaaaaacagcaagcgccgcgaccaagaccctcccagccgcccccgccccctgtaccacacttacagcccatgtcccaaatcacagggttgaaaaagttgatgcatagtaacagcctgaacaactctaacattccccgatttggggtgaagaccgatcaagaagagctcctggcccaagtgggtgggggctcagtaggggcagggctggagggggtggtctcctgggaccctgagaaggactgggcattgggttatgtcttaggccaggtttcccagaagcagagcttgagatgagggtttgagcccatcttgaggcaagcatgctggctctttgtacctctgtatcattcattgcttgggggccgtccccagggctggacgtatcacctcttgcatgtagctcctgttgggactagtcttctggaaatgcaggcagctgtgagccttagcaggcaacactcccagctgcagagggattggtgtacacagcagtgacgctaatccagactgtgcccccatagtgtccccaacagtccagaccggtgtttcactcctagctcttccaggggacagcggcagtggaagtgatccatctttggtggctcactcagctgaggcttattgtaaccctctttgagccacctcctccagtgaatcttccattcagtcacctggcctttagttatttatttttatttatttatttattttgagatggagactcgctctgttgcccaggttggagtgcagtagtgtgatctcggctcaaggcaacctccacctcctgggttcaagcaatactcctgcctcaccctcctgactagccgggactaaaggcctgtgccagcacacctggctaatttttgtatttttagtagaaatggggtttyaccatgttgaccaggctggtctcgaactcctggcctcaagtgatccacccgccttagcctcacaaagtgctgggattgcaggcgtgagccactgcacctggccaactggtgtttattaagcagctactatgtgctggcccttttctgaattytggagagacatggaaaataagcccttcttcctttctcccctggggctcgtgaacagcttagctaagaggctgagctgtgctggggccagtcgtgctgggttcctatcctagctttgccacttatgagctgcatgatcttggagaagtcacatcgcctctctgagccttggtgccttcacctgccaaacgagatcaagtgcttagagcaatacttggcagatcataagtactcaaaagacagtggctgtgattgctttcgctattttgcagcccagtaggacgagggcagtacattctgtgctgttgaacctgtcacccactgggtgagcaataatggtgcttccttcagaccaaggcttcaaactcctaggaaatgttctccagggccctgagccttacaggcttctgacctctggcctccgtctccaccaggaactggagaacctgaacaagtggggcctgaacatcttttgcgtgtcggattacgctggaggccgctcactcacctgcatcatgtacatgatattccaggtgatggggacagctgggagtgggcccgggtgaggggctcatagcggggcgctggaggccggtggaggtcaccaccctgcccctgcctgctctcaggagcgggacctgctgaagaaattccgcatccctgtggacacgatggtgacatacatgctgacgctggaggatcactaccacgctgacgtggcctaccataacagcctgcacgcagctgacgtgctgcagtccacccacgtactgctggccacgcctgcactagatgtgagtgactgccctgtgagtgaccgtccccrtctctctttstgactgcctcttcrgcctcctgtgtgtctctctgaccctgtgtctctgacctccatctctctttgacgccatttctctctcttttttttttctttttgagacggagtcttgctctgccacccaggctagagtgcagtggcacgatctcagctcactgcaacctctgcctcccgggttcaagtgattctcctgcctcagcctcctgagtagctgggactacaggtgcccaccaccacgcctggctaagtttttataatatttttagtagagatggcgtttcgccaagttggacaggctggtctcaaactcccaacctcgtgatcagcccgccttggcctcccaaagtgctgggagtagaggcgtgagccactgtgcccggtcaaaaatcttatttcttaaaaaaaaaaaagttttagtccaggtgcggtggctcacacctgtaatcccagcactttggaaggccaagatgggtggatcacctgaggtcgggagtttgagaccagcctgaccaacgtggtgaaacactgtctttactaaaaatacaaaaattagccgggcgtggtggggcacgcctgtaatcccagctactccagaggctgaggcaggagaatcgctggaacccagtaggtggaggttgcagtgagccaggattgcgccactgcactccagcctgggcaacaaagtgagacttcatctcaaaaaaaataaaataaaaattgcggggggctaggcacggtggctcacacttgtaatcccagtactttgggaggctgaggcaggtgaatcacctgaggtcagaaatggccaacatggcgaaaccctgtctctaccaaaaatattttaaaaattagccgggcgtggtggtgggagcctgtaatcccagctactagagaggctgaaccaggagagttgcttgaacccaggatggggaagttgcagtgagccaagatcgtgccactgcattccaacctgggcaacaagagcagaactctgtctcaaaaaaaaaaaaaaaaaagaaagaaaattaaatttgagacagggccttgctatgttgcccaggatggcctcgaacttctggccttgaagtcctaggctcaagtgatcctcccatctcagcctcctaagtaggtgagacaaacaggtgctcaccaccatgcatggcttcaactctgttattctaacatccgtgtctctgctcccaggcagtgttcacggacctggagattctcgccgccctcttcgcggctgccatccacgatgtggatcaccctggggtctccaaccagttcctcatcaacaccagtgagtggccctcgccaggggcggggtttgctgagttggaggcggtgttggccaggctgggggcggaactaactaggctggaggaggggctggctggcctgggggcggggctggctggcctggaaaggggatggccgggcaggaggcggggctgggggcggggctggctgggctggaaaggggatggccgggcaggaggcggggctggctgggctggaaaggggatgaacgggcaggaggcggggctgggggcggggctggctgggctggaaaggggatggccgggctggggtagagctgactgggctggaggcgaggctggccgggctggggaggggttagctagttgggggcggagctggccctcctgcggttggagctgcacacgtgggccctcccctgacctccgggctgggctgcagattcggagctggcgctcatgtacaacgatgagtcggtgctcgagaatcaccacctggccgtgggcttcaagctgctgcaggaggacaactgcgacatcttccagaacctcagcaagcgccagcggcagagcctacgcaagatggtcatcgacatggtgggcggggctggggcgggacggagcgggaaaggaagcctaggagtcgagggctttggggaggagtgggtctgagtcccagaggaaccctcaacctggacagagcgggcggcttctacctggtgaaaacttcagaggcccgggtcagtctggggggcgggtgtcagcggccccagtgacgcccccttgcccgcaggtgctggccacggacatgtccaagcacatgaccctcctggctgacctgaagaccatggtggagaccaagaaagtgaccagctcaggggtcctcctgctagataactactccgaccgcatccaggtgcccccacgccccatcatctaaggagggaggacactcccccagccacacctttaggtctgggtagctaactgccccttcctcagcctctttctcccaagtggcccatcttcctgtgtccttctttctttttttttgtttgtttgtttttgagacggagtcttgctcttgttgcccaggctggaatgcaatggcgccatcttggctcaccacaacctccgcctcccgcctcccgcctcccgcctcccgggttcaagcgattctcctgtctcagcctgccgagtagctgggatcacaggcatgcgccaccatgcccagctaattttgtacttttagtagagagggtttctccatgtctgtcaggctggtctcgaactcccgacctcaggtgatccccccccgccccccgccttggcctcccaaagtgctgggattacaggcgtgagccaccgcgctcagccctctttttttaaatttatttttatttactttgtatgtttaaaggagagttggggtctcactatgtcacccagtctggtctcaaactcctgagctgaagttatcctcctgtcttggcctgccaaagtgctgggatagctggcgtgagccaccacacctgacctctttctgtctgtccccttctccatcttcactttccaatcccatctctccttcccatctctcccaccatttcctcccatttcccccaattcctcctttcttctcatcaactccttccaggtcccctgtccctctccctaaccatcttctcttccctcaccccccttccgactcctcccatattttctccatctcccacacacctctccccgttacctcctctgttctctgttctccccaccttctctccctactccctccctccccaggtgggagataagaaagcctgaaagctgggtgtggtggctcacgcctataatctcaactactccagaggctgaggcaggaggactgtttgaggccaggagtttgagaccagccagagcaacattgcaagatcctcttttcctttcctttcctgtcctgtcctgtcctgtcctttcctttccttcttctttctctttcttcttttctgtttttggttttttttttttgagatcgggtctctctgtcacccagrctagagggcacggatcttggttccctgcaaactccgcctcctgggctgcagcaattctcctgcctcagcctctagcgtagctgggattacaggtgcctaccaccagacctggctaatttttgtatttttagtagagatggggtttcgccatcttggccaggccgatctcaaattcatgacctcaagtgatctgcccaccttggcctcccaaagtgctgtgattacagatgtgagccaccgcgcccagccccattcttttttttttttttttttttttctgagatggagtctcactctgtcgcccaggctggagggcagtggcttgatctcggctcacggcaacctccgcctcctgggttcaagcaattctcctgcctcagccccactatagctgggattacaggcatgtgccaccgtgcctggctaatttttttgtatttttagtagagacagggtttcaccatgttggccaggctggtcttgaactcctgacctcatgatccacccgcctcagcatcccaaagtactggaattacaggcgtgagccacagtgcctggcccccatttcttaaaaaagaaggaatgcctgaggtctcagactgggacacaggcatagcctctgaagtttcccctgtgccccaaccccatgcaggtcctccggaacatggtgcactgtgccgacctcagcaaccccaccaagccgctggagctgtaccgccagtggacagaccgcatcatggccgagttcttccagcagggtgaccgagagcgcgagcgtggcatggaaatcagccccatgtgtgacaagcacactgcctccgtggagaagtctcaggtacaggctcggggcattgatggacgggcacagggtgagtctccccagcccatcttggcctgaagttctgaggcccaggagctcctcccctgcctttccacaatgccaagttgtcctgtttttggttttgttttgtttttgagacggagtctcattctattgcccaggctggagtacaatggcacgatcttggctcactgcaacctccgcctcccaggttcaagtgattctcctgcctcagcctcccaagtatctgggattacaggcgtgcaccaccatgcctggctaatttttgtatttttagtagagatggggtttcaccgtgttggccaggctggtcttgaactcctgaccttgtgatctacccgccttggcctcccaaaatgccaggattacaagtgtgagccactgcgcccagcctcctgtttttcttttatttaggttttatttatttattttgagaccgggtcttgcactgttgcccagggtagcatgcagtggtgtgatcatagctcactgcagccttgaattcctgggctcaagcgatcttcctgcctcagcctccagagtagctgagaatacaggtgcacaccaccacacctagctaattttttaaaattttttgtcgagacagggatttgctatgttgccagacttgtcttgaactcctgggctcaaaccttggcctcccaaagtgctgggatatggggtgagtcaccatacccggccttgttttcatttttctttttcttttttttctgagacagggtctcattgtgccacccaggctggagtgcaggggcgtgatcttggctcactgcaacctccacctcctgggctaaaatgatcctccacccccgcctccagagtggctgggactataggcgtgcaccaccacactcggctaatttttgtatttttcatggagatggggttctgtcatgttgcccaggctggtctcgaactcctgggctcactcagtctgcctccctcagcctcccaaagtgctgggattacaggggtgagccaccctgcctggcccctccccactttatatcctccctggtgaaacccaaccatctgagtttgatgtctctacccgtccagacctgagtttctaggcctcagcactgttgacatttgggtgatcattttttgtgctaggagctgccgtgggtattacaggattcttagcagaatccctggtctctctctacccactagatgccagaagtatccccctcctcattttttttttttttgagacagagtttccttcttgtcacccaggctggagtacagtggtgcagtctcagctcactgcaacctccgcctctcgggttcaagcgattctcctgcctcagcctcccgagaagctggaattacaggcatgcgccaccacgcccagctaattttgtatttttagtaaagatggtgtttctccatgttggtcaggctggtctcgaactcccgacctcaggtgatccgcccacctcggcctcccaaagtgctgggattacaggcataagccaccgcgcccagcctccccctgctcatttgtaaagaccaaaaatgcctccagacattgccaaatgtcccctaggtgtgcaaaatcactcacacacaccccatggaaaactaattttatacactttataacgtagttatgttcataggcaacttcatagcaatagtttgtggctttagctttttttttttttttttttttttttttttttttgagatgaagtctcactctcgttccccaggctggagtgcaatggcgcgatcttggctcactgcaacctctgcctcccgggttcgagccattgtcctgcctcagcctcctgagtaggtgggattacatgtgcccaccaccatgccctgctaatttttgtatttttagtagagacrgggtttcaccatgttggccaggctggtcttgaactccagacatcaggtgatccacccacctcagcctcccaaagtgctgggattacaggcgtgagccactgcatccggcctacttttttttttttttcctgagacggagtctcgctctgatgcctaggctggagtgcaatggcacaatctcggctcactgcaacttccacctcccaggttcaagcaattctccctgcctcagcctcccgagtagctggaattgcatttagctttttaaaaaataggccaggtgcagtggctcacgcctgtaatcccagcactttgggaggccgaggtgggctgatcacaagatcaggagatctagaccatcctggctaacacagtgaaaccccgtctctactaaaaatagaaaaattagccaggcacgatggcgggcgcctgtagtcccagctactcgggaggctgaggcaggagaatggcgtgagcccgggaggcagaggttgcagtgagccgagatcgagccactgcactccagcctgggtgacagagcaagactccgtctcaaaaaaaaaaaaaaaaaagtgtgtgtgtgtgtaaactgcatcaatgtatacatttttttgtttttgtttttgagacggagtcttgctctgtcacccaggctggagtgcagtggtgcgatcgcagctcattgcaatctccgcctcccaggttcaagcgattctgtctcagcctcccaagtagctgaactacaggcatgcaccaccacaaccagctaatttttgtatttttggtagagatgcggtttcaccatgctggccaggctggtctcgaactcctgacctcaaatgatccgactgcctcagcctcccaaagtgctgggattatagacatgagccaccatgcccggcccataagcatgtttttcatttcattagctcccataatgtggtggtatcatccaccccataggccgcccatttatactttcttcccctccaccaggtgggttttattgactacattgtgcacccattgtgggagacctgggcggaccttgtccacccagatgcccaggagatcttggacactttggaggacaaccgggactggtactacagcgccatccggcagagcccatctccgccacccgaggaggagtcaagggggccaggccacccacccctgcctgacaagttccagtttgagctgacgctggaggaggaagaggaggaagaaatatcaatggcccagataccgtgcacagcccaagrggcattgactgmgcagggattgtcaggagtcgaggaagctctggatgcaaccatagcctgggaggcatccccggcccaggagtcgttggaagttatggcacaggaagcatccctggaggccgagctggaggcagtgtatttgacacagcaggcacagtccacaggcagtgcacctgtggctccggatgagttctcgtcccgggaggaattcgtggttgctgtaagcyacagcagcccctctgccctggctcttcaaagcccccttctccctgcttggaggaccctgtctgtttcagagcatgccccgggcctcccgggcctcccctccacggcggccgaggtggaggcccaacgagagcaccaggctgccaagagggcttgcagtgcctgcgcagggacatttggggaggacacatccgcactcccagctcctggtggcggggggtcaggtggagaccctacctgatccccagacctctgtccctgttcccctccactcctcccctcactcccctgctcccccgaccacctcctcctctgcctcaaagactcttgtcctcttgtccctcctgagaaaaaagaaaacgaaaagtggggtttttttctgttttctttttttcccctttccccctgcccccacccacggggcctttttttggaggtgggggctggggaatgaggggctgaggtcccggaagggattttatttttttgaattttaattgtaacatttttagaaaaagaacaaaaaaagaaaaaaaaaagaaagaaacacagcaactgtagatgctcctgttcctggttcccgctttccacttccaaatccctcccctcaccttcccccactgccccccaagttccaggctcagtcttccagccgcctggggagtctctacctgggcccaagcaggtgtggggcctccttctgggcttttcttctgaatttagaggatttctagaacgtggtcaggaatagccattctaggcggggctggggccagggtggggggcagtcactgtgggaggtcccagctccagcccccctctggtttgctgcctcctctcccctctaaaaaagtcttccgcttgattttgcacaatcccggcgatactcctggcgatactgactagaaagtcagggagctgggggagctgttcactttaggatacgggggtggtatggaagggagcrttcacaccgccagcctcgggcctgggatttgaggagggccctagacctcctccactctccatcccctttcccttccactttgggttcactttgaattttctccgttttttggggcagtggctctgatccactcacccccccgccccccgccccacttctagctgcttctcctcttgtttctgccttaataattcccacggccacaggcaagggggttgcagtggccgcctgcaccttggatgaggcagggccaggcgcccagaacccccatcctggccgcacccccctttccagggtcctccggaccccaccttccacactctgatcacagcccccctaccttttgccctaggaggaagcaataatggtgtataccctcattctcattcctgggcagcccttccttccaccctggcaccaaaataatttctcctccatccgtaccttgccgagcctctccctctcccccagctagtccctgagcaatacggcagacagatgcaagaccatttttctccaagccatgggggactgtttggaaggaaagccccctctctccctcctcccctcgccctcggcctggttctgcagctggaccgacctcattcatcgcctgccccctacccaattctgagcacacggtactgtagcccccagttcctccctagccttccatccctctgtccaccccagggggaggtaaccccgcactcacactcccttgatgctgtctgtacagggttcatattttgtagcgaaagtcgtttttgtcccagccggcgatcggagtgggccttttctttctttttgttcattctttacctttttttcttttctttctttcttttttgtacatactgtaaggttggtttgtaaattattctacggaggcaaaaagggaaaataaaaacttgcccttccctggctgacccagtcgggaaggtagggaaggaggtctcccgttgggagagtctctgttcctgctgtattatacaaactgtaccatagtcctgggaaaagggtggactcaccgctgttgttttatgggaagtcgtgtcatcctaggggttggggctgggcagagcctgtcccctccccccttctccaggagccagggggtgactggagagacagacccacccccaagcagggctcctctccccagggtgagcacaggacctctgtaagctgcttgtgtattgtccactttgacgatcagtcattcggtccgttgatcaataatccttcgatcttgtctccaattaaaccgaggctttcaccgattttcctggctgatgtggcttcattccccatgttgtttgttgaggtgtctccccgctgcaccgtctgcttgggttggggagggagtttctgtccctacttgttccccagcagacggaattgtgaagtagagcttggacagagacattccccagcctgagtcaggttataaaatggaaattcaagccatgcagggtttgttttgttttgttttgtttttgagatggagcttccctcttgttgcccaggatggagtgcaatggcgccatctcggctcactgcaacctccgcctcccgggttcaagcgattctcctggctcagcctcccgcgtagctgggattacaggcgcccgccaccatgtctggctaattctttgtatttgtcgtagagatggagtttcaccatgttggtcaggctggtctcaaactcctgactttgggagatccacccgcctcaacctcccaaagtgctgggattacaggcatgagccattgcacccagccccatgcagtatttaaaagggaaaagatgtggctgggcgcggtggctcacgcctgtaatcccagcaccttgggaggccgaggcgggcggatcatgaggtcaggagtttgagaccaacctggccaatatagtgaaaccccgtctctactgaaaaatagaaaaattagccgggcgtggtggtgtgtgcctgtagtcccagctacttgggaggctgaggcagaatagcttgaacccaggaggcggaggtttcagtgagctgagatcatgccactgcactccagcctgggtgacagaacgagactttgtctcgaaaagaaaaaaaaaaaggcaaaagactacccagtgcaaaggctcatgcctgtaatcccagtgttttgggaggccgagatcagcgcaggagttcaggacaagcctgggcaacatagtgagaccctgtctctattaaaaattttaaaaattggtcaggcacggtggctcatgcctgtaatcccggcactttgggaggctgaggcggctggatcacctgaggtcaggggttcgagaccagcctgaccaacatggtgaaaccctgtctctactaaaaatacaaaaattagctgggcatggtggcgcattcctgtaatcccagctactcaggaggctgatacaggagaattgcttgaacccgggaggcagaggttgcagtgagccgagattgtgccacttgtactccagcctgggtgacagagtgagactctgtctcaaaaaataaaaaaaaaattttaaaaagttagccagtggtggtggaccatccctgtggtcccaggtacttggaaggctgaggcaggaggattgcttgagcctgggaagtagaggttgcagtgagacgtgcccatgccactgcactccagcctggacaacaagagcaaaaactctctaccaaaaaaaaaaaaaaaaaattaatggcatggtctctctctgttttccaggctgaagtgctgtggcacaatcagctccctacagccttgaacttctgggttctagagatcctcctgcctcaccctacctagtagctgggattacaggtggatgccaccacacctggcctaacccacatacttgaatgctgttaattccactcacagagcctaattttcccacatttattaggctttttttttttttttttttttttggtggcagagtgagactctatcacccagtctatagtgcagtggtatgacatgatcatagttcactgcagcctcaacctcctggacttcagtgatcttcctgcctcagcctcccatgtaggcaggaccataggcgggtgccaccacgcccggctaatttattttttattttgtagagacagggtctcggtttgttgcccaggctggtctcaaactcctgggctcaagcaatcttcccaccttggcctcccaaagtgctgggattacaggcgtgagccaccacacccagccctgttaggctgattaacaagcccctggttttaccaataggtttctgacattcattatactaatgagcaaaacttctgaatatagataaagatatggatagtggaaatgtttgtgatttggaccttgattagaatactggctgcctcggctgggcgtggtggctcactcctgtaatcccagcactttgggaggccgaggcaggtggatcacctgaggtcaggagtttgagaccagcctgaccaacatggtgaaaccctgtctctactaaaaatacaaaaattacctgagcgtggtggcacgtgcctgtagtcccagctacctgggaagctgagacaggagaattgcttgaacctgggagctgcaggttgcagtgagcccagattataccactgcacttcagcctgggcgacagatcgagactccgtctcaaaaaaagaaggaaaaaaaaaaaagaatactggctgcctctggggcttaataaaccaggatgcacatgaatacatacagtgcttgagtaggtagacacaagggggcactagacatatatttttatacaatgcatgttctgaaacatgagagcatcttgcgtgggtccaaggaaaagtccacctgcctactctgccatttgtttctagtccagggactctgagatttttttctatttttcttttcttttcttttttttttagacgcggattggttctgtcacccaggctggagtgcagtggcatgatcagggctcactgtagcctagaccctctgggcccaagtgatactcccaccttagcctcctgagtagctggaatgataggtgtgcaccaccaagcccagctttttttttttttttttttttttggtagagatggggatctccttatgctgatcaggctggtcttgaactcctgggctcgagagggaatctgattggtgatcttgggggcgatctctctgagcttcacttgtttcttctactaaatggggatatattagctgagtgtagttgtgcgcacctgtagtcccagctactccggaggctgaggcaagaggatcacttgagcccaggaggtcgaggctacagtgaactgtgattgtgccagtgcactctagtctgggtgacagagtgagacactgcctcaaaaaaaaaaaaaaaaagtaaataaataaaatggggccaggtgtggtggctcacacctgtaatcccagcactttgggaggctgaggcaggcggatcacctgaggtcaggagttagagaccagcctggccaacttggtgaaaccttgtctgtactaaaaatacaaaaattagccaggcgtgctggcggggatctataatcccagctactggggagtctgaggcaggagaatcacttgaacctgggaggcagaggttgcagtgagccaagatcgcaacattgcactccagcctgggcaacaagagtgaaactccatctcaaaaaaaaagaattaattatttaaataaaatgggataatgacagttacagagttaaacagttgctctatagtacggtttggctagtaaaactttctttaaaaaaaaaaaggtgtagagatggggtctcaccatgttacatgcccaagctgatctcctcgaagtcctgggctcaagcaatcctcctgccccagcctcccaaagtgctaggattactagcactttgaccctaaaatcaggtgtgagccactgttcccggcctcagtaaaactttctgtggtaataggaatattctttatctgtgctatccaacaagtcagcaactagtcacatgtggctattgcgcccttgaaatgtggccagttttaatttccggccacagtggtggccagaagctactgtattggacttaaattctaaaaattcagccagagttaatggaaaatatttaggctatacaaagagttgtttgacaacagctgtaaagattcacagaagatagaacctagaaaagtgggaggagagaagcagagctcgaaaaataggtagaagttttcagggaatctgaactttgcaagaagtgaaaaggagacacagacattttccccagggactttcaaatggaggcagagtcgggaaaagggctttgggctgggggtcaggaggtgacagcactaattctagcctgcagtggactgtgggtgaccttagacgagatttctccttccaggcctcagtttccccaagtgtaaaagggtgggctgggtgcggtggctcacacctgtaatcccaacactttgggaggccgaggcaggcagatcacttgaggtcaggagttggagaccagcccaaccaacatggtgaaacccgcgtctcaactaaaaatacaaaaagattagccaaatgtggtggcacatgcctgtaccagctactcagaaggctgaggcaggagaattgcttgaacctgggaggtggagcttgcagtgagctgaggtcaagccactgcactccagcctgggcgaaagagcgagactccgtctaaaaaaaaaaaaaaaaaagaccaggtgtggtggctcacacctgtaatcccagcactgtgggaggccgaggcgggtggatcacctgaggtcaggagatcaagaccagcctgaccaatatggtgaaaccccgtctctactgaaaatacaaaaattagctggacgtggcggagggcacctgtaatcccagctactcgggaggctgaggcaggagaatcgcttgaacccgggaggtggaggttgcaatgagctgatatcatgcccctgtacttcagcctgggtgacagagtgagactttgtctcaagaaaataaaaaaatttttttaggccgggcgcggtggctcacacctgtaatcccagcactttgggaggccgaggcgggcggatcacaaggtcaggagatcgagaccatcctggctaacacggtgaaaccccatctctactaaaaatacaaaaaattagccaggcaaggtggcgggcgcctgtagtcccagctacgcgggaggctgaggcaggagagtggcgtgaaccccggggggtggagcctgcagtgagccgagatcatgccactgcactccagcctgggcgacagcaagactccgtctcaaaaaaaaaaaatttttttttaaaaaaagggcagatgtgatgttcggaacacctcctgtattgggacagactgaaaatatgggtcaaaaatggcagtgatggccgggtgcggtggcccacgcctgtaatcccagcactttggaaggccgaggccggtggatcacctgaggtcaggagttcgagaccaacctggccaacatggagaaaccccgtctctctaaaaccccaaaacttatccaggcatggtggcacacacctgtagtcccagctactcaggaagctgaggcaggagaatcgcttgaacctgggaggcagaggttgcagtgagtggagattgtgccattgcactcaagcctgggcaacaagagtgaaactctgtctcaaaaaaaaaaaaaaaaaaaaaatggcaatgacacatgaccatcagctggctctccagggtggggaattcaccttttttccagcaaaggtgaacaagggcagtggggcacagcagggaggccacgtaatctgaaggaggccaggggaacctggggaaggagtggagtcggttcattatctgaaattgacatcaaggcttgcaggcttcctggtactggtcttgagcaaatggctccgcctctcccagactttagagggctctatcctgtgctaaactttttaagattatctcattgactctccagctgttcttgagatatggactagcattggttccattttgcaattgaagaaactgagggctgggatgagatcgcacaatatggagaaaattcgaggaaataagacgaggacctcgcttcacccagtgcctgttcaacagtgatagctgtccccatacttttatgttatttcaggtgcacgaaatcttgagatgtaggtagtatttctccctctctaacagcataaaaacgtgtcagtgccggccaggtgtggtggctcacg

SEQ ID NO: 95427 - DNA, 52398 bp, Homo sapiens
  misc_feature (1)...(52398): n = A,T,C or G
atcctcacttccccctttcccctccctcagtcaatttgcaataataataatttaaaaaaggtaaagtggtgatgtcgtggaacaaattactttgcttgaaagacacaactgcaggttggtgtttacgggaggactcagacttggcatggtattgtgaggcaaagaggacgcttgttaggaacttgtgatcattattgaaccaggcaggggaacctgggcccctgaactctgtctctttatactgcattttgaaagcagcacttggctctctaattgccccatatgctggttttattcggtggctcagctgggtggagtgaactctgggaagagatgcattcatttttagttacctcaccagattgctaattttcactctggaggcataaatcaccataattactgtaatcccaagacgaagggacttgctattctggcacaagggcagcagctatttgtaccgccaaagctgttctacctgagagctggggaaagagttgcatatggctggttctgccaggacactcttagatttggggtggagggtgtgctcggagcccattatcctttacttgggagaaatggagatcctggaggagcagtttcttctgtgttagtggcaagcctgtggcttaagacagagctttggccctcggctcactgcacagcccacactgcccagctgttgacatgtttgacttgcaaacagaacatcaacagaacttcagaacttcagttcctcttctctcatcttttcccatcaactcattccttggtttgtcttggtttttgtttttgcatttctcctgaggaaatccttattaatttctgaagaaattacctcaaatagaaaccagatactacaaaaatccctagtaccctggagcagaggctaaatatcattagggagggggaaaacagaaaaagcccagtgtaacttgtcactttgtcattcatacttataatatggattaaaattgttttcttgttctttattatttttaatagagatggagccttgctttattgtcgaggctggtctccaactcctggccccaagcaatcctcccactttggcctcccaaagtgctgggattgcaggtgtgagccaccatgcctggccattttttttttttttttttttgagacagagtctcattctgtcgcccaggctggagtgcaatggcacgatctcggctcactgcaaactccacctctcaggttccagcgattctcctacctcagcctcccgagtagctgggattccaggcgcccaccatcatgcctggctaattttggtatttttaaagtagagacttggtttcaccatgttggccaggttggtctcgaactcctgacctcaggtgatctgcctgccctggcctcctaaagtgctgggattataggggtgagccaccgtgcccagcccagtgtttttctttttaaataaaatcaacctaaactaagtctaaaaaataccaactagatcctgaatcaaggtcgcttaaaagatgagtaactggcgcagtggctcatggctgtaatcccagcactttgggagtctgaggcgggcagatcacgaggtcaggagatcgagaccatcctggctaacacgggaaaccccgtctctactaaaaatacaaaaagttagctgggcgtggtggcaggcgcctgtagtcccagctactcaggaggctgaggcaggagaatggtgtgaacccgggatgcagagcttgcagtgagccgagattgtgccactgcactctagcctgggcaacagagcaagacaccatctcaaaaaaaaaaaaaaaaaaaaaaaaaaaaaggaaaagaaaaaagaaaaaaagaaaaaagatgaaaaactgataaataaatatgaaaaaattccttgccatttccacagaaggtggagaggccgagatgggggaataccattttcttgacaagttcatatcataatggtgtctgggtgcctggctttgtgtttgtttttgcctgacattttgaagagtcttaaaatgcaagagaaatgggaaacttgactataccaaaaaaaaaatctgcttaggaagaacatttttttttttttttttttgcctaatactataaagccttggagaatttagaatctaaagcatctgttattgctgatggcaggttgatggcctaaaaagagagggaactgtaggtcaggaatgttttgcgcaaaaatgaggctgcgcttgggtattagaaaataaggcaaacaaataacagattgcaacaggataaactgccctgtgaagtagacttgccctccaaccccaatctgcctgccctcagatgacggtaaacagaccagcttttttttttttttttctgtcttccaatcacctgccctcatgtttaggcagcagagatctaagttataaacacagctctgccaggagaccccttggctgagaatggcattcagagtattctagttcttccttgatgtttttccactttcagacctcctatcctttttagaacctgccacagtgcctggtcacaaggttgaagtttaatacaaatttaataagttggtccaaatttggagatgaattctggggaaaagtcaaacagtgaaaaataaggaattttactttctctgggggctcccaggctctctggttgggtcagggcccaagtggagcagggaagaaggggccactctttctgaagtctccctgcatgaatgacagtaacagttgagtggtagtcatatgcttagaagcaaaccattctgattttgcctcctagagcagagatgtctcccctaagatccattttaccccagcagaaaaggccagggttgtctgggttgtggcaacactgttttgacagaaagccctatgatttttctcacaaacttccctaaggatgctgtctttcagctacacgtacttagataatttcttctcccttaccaactcaacctgatgttgctaagaggttcagtactttctctctgctttctacctcatcccaacccccaagttctttcccaaattccagcagctgggaccagtctctgggacagagcagaaataacatggaaatcgggggtagggttaaacacatctataagtctaggaacaggcagaaaagtaacatccctgttactacaagtttggtatcaggaaataatttcttatccatcatgagtggtgatatgggtagtatgagcataagttatatgtagaggtaaattatttactgggctattaaagggccacatggaggctgtccaaggaaagtcatacaataataatggaaatttattattattattttattttttgaaacagagtatcactgtcgcccaggctagagtacattggcgtgatcttggctcactgcaacctccgcctcctgggttcaagcaattctcctgactcagcctcccgaatagctgggactacaagtgtatgccaccacgcccgactaatttttgtagttttagtagagtcggggtttcaccatgttggccgggctggtctcgaactcctgacctcaggcgatctgcctgcttcagcctcccaaagtgctgggattacaggtgtgagccactgcacccgacctaataatgaaaattaattatatctgatattatgttgaaaaatattctatccagaggacagttcggaaacatttacttttgcactgcgttcgattcacggtctcttatggggaggaagagtaggaggattccatgtgcatctgtgtttgggctgtcaagttatctgtatctacataactatttgttttcctttggcttcaaagaaatttttggtgttgcaagaaatatgtatattgcagaaaaactgtcacttcttaaaatgtgcagttaatggcatatctaaataaaatgtaatgttttgctgttaatatttactattgatatatatgttcaataattcccaaacaattctaacatttagtatttattaattctagtatttattgctactactgctgctacatgttatggttccatagcccctattctgacagagctttgaaaacaaaacaaactccctatctgttcctccttccggttaaatattggaggaaagcagaatagtaatattaatttttaaagagaaagaagcacagagaatgaacatcagatagaataagcccttgaaatcgtaactccaagctggcaaattgagcacattggatcaagtgcagagttttccattctattcatggggagaaagaggaagcgaaatggggaggggtaggaagaactcagagggtttagtagtgattccttaggaacctggaaacctggagcttctggagacagtgagaacaatggctgggtttttctctgcctgtcatttttcagtccatgatgagatgttgaagaaacagagtccaaaggtacaccagtgtaaaaatgttgccaaagtgaaaagtgggagactgatttcctccttccgattgattggagagccattcactttagggtgcttctgtttccttactcatcacacagagcactggagtgtgggaaaaatccccatcccacattaaggttgccacaaaggtaaaaaagacctgaagcagaagttgggagacctgagcttatgaccttggacttacagcacagctgatatttgggggaataaggtttgttgttgtttttgtgtgtgtgttttgtttgtttgagacggagtctcactctgtcgcacaggctagagtgcagtggcgagatctcagctcactgcaacatccacctcccaggttcaagcaattctcccgcctcagcctccctagtagctgggactacaggcacataccatcacgcccagctaatttttgtatttttagtacagacgaggtttcaccatgttggccagagtggtcttgaactcctgacctcaagtgatccgcccgtctcggcctcccaaagtgctgggattacaggggtgagccacagtgcccagcccctgggggaataagttctgagaggacacaggaaaactggggattgaaaagcaggttttcacaagagtggaggcagctggctctgtgggttcccagactaaggggatctgtgcttgacagaccagaggccagttctgtgaccatcatctcagccttgaatttttttttttttttttttgagacaaagtctcactctgtcgcccatgctggagtgtagtggtgtgaactcaggtcactccaacctctgcctcctgggttcaagcgattcttgtgcctcagcctcccgagtagctgggactacaggcgcccaccaccaccacgcccggctaagttttctatttttagtagagatggagtttcgccacgttggccaggctggtctggaactcctgacctcaagtgatccaccagcctcggcctcccaaagtgctggcattacaggcgtgagccactgcacccggcctagccttgtgatattaacagtaactgtcatttgcggtgtgcctactctgtgtcacactccttgcagttattccatttagggtagagcaacattattctagtttacagatgagaaaactaaggccccagagattgatttgcccaagcagccagctggcagtggaagtgccagtttcttcgtgtgtaaaacaagagaaggcaatctactgcctactggcttgtcaagggtcacttgagatcggacgacaggaaccacaaagaagtgaggccgggaatttgcggatccacagtaaagcaagtttgtctttttccagacgtgcattaagattcctttttcaagtgttctaaagcgcaggcgcaggctgttttgcggttgcctcccggcgcctcttgtgcaggccggggtcgccctctgccgacccagggcgggagcgcgctgagtgaacgtttccaggcctgagggcgggcggagatttttctcgcctgtagagggcgcagatcggcgtgcagagtaacccactctagttgtcccttccttaagcacttcctgtttgatctctatgatccatcctgttgggacttgattcgttcctcaaattttcaatttaccgtaaacaaaggggacgcgcgctgacccggaagtgaaagctggaacccggccggagtagctctgagcgccggctgtgaggaaggaggttctgggcaagctatagccatggctgtggctgtagccatggcgggagccttaatcgggtcggagccaggccccgcggaagaacttgccaaactcgagtacctgtctttggtgtcaaaggtttgcactgagctggacaatcacttggggatcaacgacaaggaccttggtgagctcggggaggtccctgggacctcagtttgggattgagggaagcggaaggaggaaggaggaaggagaaaggtggttgatggaccgaaagtatgttcgtgtgaatctgtctctctctgtcgcagacaccggtgcccagggtacacgctgccgtggcctcggcttgagagccctcgagaaactttagaaactttcccagagctgtcagtgaagcccggggcggtcatctctgcttgattgttttttgtttgttttttcagcctcaattaaacatgtttaacaacaacagcagcagatgctgcgatgacgacgatgatggctgacgtttattgggtgctcactatgtgctagatgcgatgctcagctctttattgacattattttatttggtcttcacgccactctgtgacatagtagttagcgtctgtgcttttaactgtgttctttgaccgttcatcctgtactcttttttgaggcagggcctcgctctgtttcccgggctggagtgcagtggcacgatctcggctcactgcagcctccacctcctgggctcaagcagtcctcccacctcagcctcccgagtagctgggactacaggcgggcgccaccaagctcgactcatttttaaattttttgtagagacgggggtctcactgtattgcccaggctggtctcgaacttctgggctcaagcagtcctcttccctcggcctcccaaagtgttgggattacaggcgtgagccattgcgtcctgtactatgtcttaaacaccagtcactagatgttttggggcaaactacatctggggarccgaaactgaggaattagaaaaggctagggtcctaaagctaaagccatagacagatggagcctttatgaaggtacagaggatggatgggatcaagggcaaccaatggatggattgacctttggtacgtacagcaaggcttcttcagttgtaacaggagcgaggacagagaatacagttgcagattcagatgagtttagagattggtggtgggaagatgagtgagagagttccagcccactcttcagtttcctaaatgaagataaagtcatcaaccggagggatggaagggaaggggcaggtgacaggaggggttagggaagttagacgagtgacctttggtaagattcatagtttctctgaagctgtttttctcatctgtgaagtgggacgatgtcttcacagggtcaccatatagcatttaggaagatgccctgcagccagtatattttagtttacttttttctcttgcctcccagccaagatgtgtctgtcctatataacttttcccgcaggattcttctcttttagttgataatgaggtgataatttcgtcggttttgctatctcgttaatatgtttcctttattcagcaaatattgagctgggggctaggcataccacagagaacaagacagatttctgctttcagggagcttacctttctctctgttttcattttaactcctaataccttggccttttagaagaaacaaaaaagttattgacattaacccccagtgtttaattgttttgatgttaacttcatttgtgtacaaaaatagagcraagtataaacttcataatcttttagtttatttatagctaaagatctcaattaatttgcagaaaacccacaaatrtgctttttctgttacatacagaattataaaaccagtaacattaaaagtactaacattggctgggtttggtggctcacgcctgtaatcccagcactttggaaggccaagacaggccgatcccctgaggtcaggagtttgagaccagcctggccaacatggcgaaacgccatttctactaaaaaaaaaaaatacaaaaattagctggccatggtgactggtgctatgcaggaggctgaggcaggagaatcgcttgaactcaggagacggaggtttcagtgagctgaaatcacatcactgcactccagcctggacgaaaagagcaagactttatttcaaaaaaaaaaaaaaaaagtactaatattggtttaatgcaatagacagtgtcttttgttgaaactaaattggcagagttgggtttaataacagaaaggcatatatttgcttcttttatgttttgtttgctgacttgattcttttgcttttgaccctgatggatgacttattaatttatgtatttaatttttgggagagttgagatagtagagtttccgatgaaaactggaaaacctgctagacaaattctaaaagaactgtaatactggattatcatttaaattagtgttatttttactgttttcaccaatgaatttttttaaactataaattaattttttataatggattcagttaatttaacaattcccctgtataattgtgaaaattaaaaatactgattaatgggaccaggcgcagtggctcacacatgtaatcccagcactttgggaggccaaggcgggtggatcacgaggtcaggagttcgagaccagcctgaccaacatggtgaaaccctgtcttactaaaaatacaaaaattagcagggcgtggtggtgcacgcctgtaatcctagctactcaggaggctgaggcaggagaatcacttgaacctgggatggggaggttgcagtgagaggatcgtgccactgccctccagccttagtgacagagcaagactccgtctcaaaaaaaaaaaaaaaaaagattactgatggctggcagtgagaatgtgctkcagactgctttgggaggggctcttttgagcatgacatgcctagcaccatgggacttagttctccctccacatttcttgaaagaatgtagcctctgaagttagattgcctgggttttattcctagctccccccagttattattgggtaggtcagtgtctcaaaccgtcagcttcctcattgtaaaacatgacaataatagcacctacttatgagggttgttttggggatcatgaagtaacccataaaaagcacttagcatagtgcctggcacgtagtaatgttcaaaaagtattaaccattgacattatcgttactaacttattatgcataagatgtgttcgtgtagcctgatggcatttggctttcactttatcagaaagataaaggcacattccaggatggaaattgtatggtagtactactttatgagttagtcatctagatctttcatgttatttattcatttacttttctaggattagcattcaaatgaaagcattacagtttttttgtgggtctcatagtatgaggcttattatctcagtctactcccgagtagctaggactacagatgcataccaccacccccggctgatttttgtattttttgtagagatggtgttttgccatgttgcccaggctggtctttaactcctgggctcgagcartctgcccaccacaacctcccaaagtgctggcattacaggcgtgagccactgtctgaaagtagcttaataaatagctctaatattagaagtttcaagaactaggccgggcacagtggctcatgcctgtaatcccagcacttcgggaggctgaggcagtaggattacctgaggtcaggagttcaagaccagcctggccaatgtggcaaaaccccgtctctactaaaactacaaaaattagccaggcgtggtggagggcacctgtaatcccagctacttaggaggctgagacaagagaattgcttgaacccgagaggcggaggttgcaatgagccaagatcgtaccactgtactccagcctgagagacagagtgagactgttaaaaaaaaatgaaaaaataaaaaaagtccaggtgcggtggctcatgactgtaatcccagaactttgggaggccgaggcaggcaaatcacaaggtcgtgggttcgagaccagcctggccaatatggtgaaatcctgtctgtactaaaaatataaaaattagccggtcatggtggcatgcgcctgtagccccagctacttgggaggctgaggcagaagaatcgcttaaactcagggggcagaggtggcagtgagccaagatcccgccactgcactccagcctgggcgacagagcgagactccgtctcaaaaaaaagaaaaaaaaaaaaaaaaagaaagtttcaagaactaggcaggtgtgccgggcacagtggcttatgcctgtaatcccagcactttgggaagctgaggcgggtggatcacaaggtcaggagatcaagaccatcctggctaacatggtgaaaccctgtctctgctaaaaatacaaaaaattagccaggcgtggtggtgggcgcctgtagtcccagctactcgggaggctgaggcaggagaatggcgtgaacccgggaggtggaggttgcagtgagccgatatcgcaccgctgcactccagcctgggcgacagagccagactctgtcttaaaaaaaaaaaaaagaagaactaggcaggtttgtggagaaaaatttggcaaaaaagtctttcatcaatgtggagattgcaccacccagcagctgcctggccctcatatacagattgggtctgtccttctgttgtgtgcctctgtgtgtctacatgggctcatgctttttattgtcacctttacagtctagtctaggtggcagcgtgcccaggtagtggttttgtgagaagagggtaccatgatgtgggtcaaataggtcttcctagtttaaatgcactcaagggctacattgagccattttgtagtaatatcttcctttcatttgtataaattctctagaatatgtgtggataatttcagcagtctagattttctctcttgttttcttgttttgttttttttgtttttttttgagacggagtctcactctgttgcccaggctggagtgcagtggcgcaatgccggcttactgcaacctctgcctcccgggttcaagtkattctcctgcctcagtctcccaagtagctgggattacaggtgcctgccaccacacccagctaatttttgtatttttaatagagacggggtttcactgtgttagccaggctcatcttgaactcctaacctcaagtgatccgcctgccttggcctcccagastgttgggattacaggcatgagccaccacacctggccagattttctctctttacccttaccagatggtggtctttgttttttattactgttggataacctaattagttttgttttcaccatacttgaaactgatttcttgttcatgtctcttcttttctgaattctgtttcttatttgcagctgaatttgtgatcagtcttgctgagaaaaataccacctttgatacttttaaggcttctctcgtcaaaaatggtgcagaatttacggtatgtatatgtggagaagataatctgtagatattaatgttttaatttatgtttgtttgtttgtttktttttttgagacagagttttgctctgtcgcctgggctggagtgcagtggcgccacctcagctcactgcaagctccgcctcccgggttcacgccattctcttgcctcagtctcccaagtagctgggactacaggtgcctgccaccatgcccggctaattttttgtatttttagtagagayggggtttcaccgtgttagccaggatggtctcgatctcctgacctcgtgatccacccgcctcrgccttccaaagtgctgggattacataatttatgttttaatgtcactattgattttaaattttgatagggtttaatataggattttgatataggaaggagacaattttatacatatcaattaaataagccattaagtgtgtaatgttttcatgccattaagtagtgatgatttaaccagattttctgtgatacctctaggaaaacagggcaggattttcatcattaagtctttgtaggtatttacattcttgttctgtgagtcaggaagttggaaacaagttttgggggtagttctaaaccttgggaaataaaatggttgcagggagcctaataacttttctccccaaagagtcctaaatatcggctttctctgaagctattatactaggttcatgctacaccaggttgacacactatgtttcatgtattccaattagctaaattcaagtgcgtaaccacccttccctacaggacattctttgccttttaagtgtatttaagcactgatatgggagctgacaattttcgttctatgtttcttttcaaaggattctcttattagtaacttgctgcgtctcatacaaaccatgcggcctccagcgaagccttccactagcaaaggtaagcagagcttccagctgagcttagcttctagaatggtgtaggttttgaacatcctgtaaattgcatttgttttcctctcagcagttgctgagcaagtaaatgttccagtaagatttttcaaatgggctgggcctagcggctcactgctggaatcccagcactttgggaggccaaggtgggagtatcacttgagcccaggagttttagaccagcctgggcaacatagagagacctcatctctacaaaaaaataaaaaaattagccaggcatgatggcgtgcctccgtagttccagctacttgggaggctaaggaaggagtgttgcttgagtccaaaagggtgaagctgcagtgagccatagttgcaccaatgtactttagcctgagtgacagaggtttttttccccgtttcaaggggaaaaaaaatttcaaacgacttaagacaaaataaaaaagataagacataacccaatgagtattgctacactcctctttctgctacatttcgagatagtttgtgatcaatgtatttagaaaattaaattacatttatagtaacaggtatgattaatatatagcaaaatgccatgttctgtttcagtttgatacaaatctattgttgaagttattttgttaatcattaataatattaaatatatatctctttttttaaccccttcatgctctttaatgaaacaagatccagttgttaaacctaaaacagaaaaagaaaagctgaaggaactcttcccagtcctttgccaaccggacaacccttctgttcgggtactgataccattttaagagtgtctactataaatatatattctcaaccccttttctttgtctcatagtaattttattaattttaagtttgcctttgttgtaacttatttttaagaatgaaagtgtttgatcactccctgagcatgtactatgtattgaatttgttaaggggttctgagaatgatattcaagggaaatgagattgggaatttggggaagtagtgattaggaatatgaaataaggttctggaacagatgcctaaggtgtgaaattagattttttttttttgctctgttacttgttaaaggtctaatttttaaagcattttgatttttaaatttcattttaataaatatttattgagtacttactgtatgccaaacactgttctaagtacctggataayagcagtgaacagaacagacaagagtttcagcctttggagattatatcctaattttggggtagggagcaggaaataaacatgtaaacattctggtggggaggagataggcaataaacaaacaaataggtatgtaacatagcagatagcaataagggctatttaaaaaaataaagctggagtgggggtagggaggaagagtgcagagggagagttgctttttaaaatttttaacacctgttttctattaatataatcatcacttgcattctttcatggcagggatgattaatatctaactgcctttcatagaattctrttaaggacagaggggatttgtcaaatgtagcagkaattctcaagagccttttttccatttcttctgcatctatcctgaatcaagtttgaaatctctgcccctcttctatttccctcacatagtgattagtgatttatagatgtacctgaggtacatacagattcttgagtagttttttttcctaactttgcyggcctctacctctgcagaccatgttggatgaagatgatgtgaaagttgctgtggatgtcctgaaagaactggaagctttaatgcccagcgcagcaggccaggagaagcaaagagatgctgaacaccggtttgtccttagtgtcctgtcctttggaagtttagggtactgtgacagttgaatattatggaccagccaagcaaaattttgggcaagtttacagaatctggactggtcatatatcatattgttggatctgttttcattgcttcctgctaagtgtatgtagcaaatgctaggttgttcagaatatagaagtcagggttgaaagaggctgaatatgtttgtggctcaattctttattggcttatagggatgtcgtagttattgaaactctaattyagttcaaaacctagtgggtacctaccatgtgcatggcactgtactgggtgcttggggatgcgaagatgaaatcggattggtttcttttttaaacaggtgcttattgatttgttagggacaggacaaagaagaagaagcggagtcgaagccgagatcgaaaccgagatcgagacagagatagggaacgaaaccgagatagagaccacaagcggagacaccgatcccgctctcgatcacgttccaggacccgggagaggaataaagtgaagtctagatatcggtccaggagcaggagtcagagtccccccaaagaccggaaggaccgggacaaatatggagagcggaatctggatagatggcgggataagcatgtggaccgccctcctccagaagagcccaccattggtgacatttataatggcaaagttaccagcatcatgcagtttggttgctttgtgcagctggaaggactaaggtaatgactggtgctcttytgttcacaccagtgatgggcagaatttcttttatcactgaggatgttcacattctaaaaagttactttgattaatgacactttagtcaaatcagccatacatggttcttagaaattgactcttttgaaatgttacagagccatttattcctttctctgtcttcaggagatctgtcctttgcttgttgggacagatagaatttgcttccccaccccatgtctccccatgaggagagtgttaatactattttattgtttgaccaccttcatggtacttttctcttgagtttaagaccattttcttttgttagttccagtaagggtagaaattggttgggggaaaaatattttttggcatgttccagatgtgtctggctctccctcaggaagcggtgggaaggcctggtgcacatctctgagctccggcgggagggtcgtgtggccaatgtagctgatgtcgtgagcaaaggccagagggtcaaagtcaaagtgctgtccttcactgggaccaagaccagcctgagcatgaaggtaggtgagatggtcagcctgttcttacatgtgatggccaagggaatggaagaggacagcaagtgagacagctcccttgtttttgtgccttaggatgtggatcaagagactggagaagatctaaacccaaatagacggcgaaatcttgtcggggagaccaatgaggagacctcaatgcggaatcctgatagacccactcacttgtcccttgtcagtgctcctgaagtagaggacgactcactggaacgcaagcgcctcacccgaatctctgacccagagaagtgggagatcaaacaggttggggcctttagttttcatgaccagatagtcattcagcatgtagcatggtgcttaggggtgtgccctggagcacgatggcctgggataacttttggccactgtattagtctgttttcacactcctgataaagacgtacctgagactgggcaatttactaaagaaagaggtttattggacttagaattccacttggttggggaggcctcacaattatggaggaaggtgaaaggcatatctcacatggcagtagacaagagagcttgtgcagggaaatgccctttttaaaaccatcagatctcatgagacttactcactatcgtgacaacagcgtgggaaagagctgcctccatgattcagttaccgtccactgggtccctcccacacacgtggaaattcaagatgagatttgggtggggacacagccaaaccatatcagccacttattagccgtgtaatccttagctaagctactctacctcatgcctcagtacccttttctataaaacaggaccagtgttggtggtgtgaggattaattaaaggtgaaagtcgttgggcgtgatggctcacacgtgtaatcccagcactttgggaagctgaggcgggcgggtcacgagctcaggagttcgagaccagcctgaccggtatggtgaaaccccatctccactaaaaatacaaaaaattagccgggcgtcatggtgcgcgcctataatcccagctactcacgacgctgaggcaggagaatcgcttgaacccgggaggcggaggttacagtgagctgaagtttctgccactgcactccagcctggggcttcgctcaagactctgtctcaaaaaaaaaaaaaaaaaagtgaaactcttaggttagtgtttagcatatggtaattgctatgtaagtcttcattcttttgttttctttccttttttttttttttttaattgagacggagtctcgctctgtcacccaggctggagtacagtggtgcgatctcagctcactgcaacctctgcctcccgggttcaagcgattgtcgtgcctcagcctcccgagtagctgggattacaggcgcccaccaccacgcccggctaatttttttgaatttttagtagagacggggtttcaccatgttggccaggctagtcttgaactcctggcctcaggtgattctcccacctcggcctcccaaagtgctgggattacaggcgtgagccactgtgcccagcctattgttttcatccttcttcactaaataacataaccgtggtgtgtcaagcaccatgcagggctagggctataaacgcgaatatatcatggttgctatgcttaaggaactcaaagtccagcagaggagacagatctaaacaaataattgtgaggggttacatattttttcctttatttttgaggcaagttcttacttgcactattgcccaggcaagagtgcagtggcatgaccatggctcactgcagcctcaacctttcaggctcaagccatcctctcatctcagcttcccaattagctgtgacctcaggcacatgccaccatgcctggctaattttttaattttttgtagagacagtcttgccgtgttaccagtgctcatctcaaactcctgggctccaagtgattctcttgtctcagcctcccaaagtgttgagattacaggcatgagctgccgtgtctggcctacgtattatataataaatgtaccagagtgctgtggaaacaagggaaagagcagataacttttcctggggataatacttttgagcttatactttacagcaccatgttggagaaccacctctgcaaccctggaatgggatatatgacatttgagctcccgatatcgtgggtcagaggagaaaaaaactgggtttcctacatgaaacctctgtaattaactctcctagaaaagaagagttttggctgggcatgtcgctgacacatgtaatctcagcactttgggaggccaaggcaggaggattgcttgaggccaggagtttgagaccagcctggacaagtagtgagaccctgtttctagaaaaaatttaaaaattagccaggtattatggtgtgcgccactagtgtcagctattcaggaggctgaggtaggaggattggttgagcccaggagtttgaggttgcagtgagctttgatcaggtcactgcacttcagcctgggtgacagagcaagatcctgtctcaaaaaaacaaaacaaaaccaaaaaacaaaaaaaaagttttgatcttagcaggttacaaatgctgccttctcttctttggctagatgattgctgccaatgtcctttccaaagaagaatttccagactttgatgaagagactggcattctccctaaggtggatgatgaagaaggtaactagtcagttggatcgagaagggtaattggcaagttgagccattgaattgggtgatttgcctgtagtttaacccagtggctattaatcayttgttctttggatctcactactcatctctcaaaaaaaaaaggatctcaccatgatggaagcaagaagttcatttttctgacaagtgcttatgtattattattattatacctgttgcttataataagctctcagggccaggcatggtggctcacgcctgtaatcccagcactttgggaggccgaggccagcagatcacctgaggttaggagtttgaaaccagcctggccaacatggtgaaaccgtgtctctactaaaaaaatacaaagattagctgggtgtggtggcgcatgcctatcgtcccagctactcgggagtctgaggcaggagaattgcttgaacccaggagacggaggttgccgtgagccgagatcgcgccactgtactccagcctgagtgacagagtgagactctatcaaaaaaaaaaagctttcaggatataaaaagttataattgtatttttgggagtaaatttgatctcatattcttagtaattattctgaaaaccctggatccacctagattacctctgagttgccctggaaacaacttttaactcagcccataatgacttttttgaaattatgaaatcttatgatagaattctctaacttatattgtagtagtaagtgagcacctacgtactcaccacccagcttaagaagtagaattttacaagcacctctgaagcccctacatgctcccctctgcttagatcttctttcttccttctaggagtaaccaccgtcccacatttgtgttaattactccctggcttttctttagttttaccatctacgtatctatccctaaacattatattgtgttgtctatttttgaacttaactcatttttctttttttttgacttacatatttttgatatttatgttgatatttatattggtatttcactcacttttattgctatagagtgtttatatataaattgtctataatttatccattttacttttgatggacatatgagttgtttcttggtttttggttaatctttgtgaataatagtattttgaaattgctatattgtctcttagtgcttatgtgcaaaatgttcttttttccctaaatgcatagaattactgggtaggccaagtgtcatggctcagccctgtaatcccagcactttgggaggctggctgagatggtaggattgcatgagcctaggagtttgagaccagccctggcaacatagctaggccctgtctttacaaaagaaaaaaaattagccaggtgtagtgatgtgtgcctgtactcccagccactggggaggctgaagtgggagaattgcttgagcctgggaggtcgagggtgcagtgagccatggtcatgccactgtgctgtagcctgggcaacagagcaacaccctgtcttaaaaaaaaaaaattactgggtagtaagaaatgtgtgtgtttgactttgctgggcagttccaaattgttttctgttggtttctgtaccgtttatacttctgccataagtgtaagcaagttccgcttggtgttgttcaattgtcgaactaattttttacaaatttattttgggttaagaattattccacaatgaagttggatggcaaatgccctagtaccatttagaatgtcaggagagcattttctcacaggcttaacttcttttcaaagtaggtctgatcagttcttgggctggagcacaaatgctctagaaatggctggtgatgggggaatagtcacctgggttagagttttacttgcattgctgtcctttgacctgggaaggtgttttttttttttttttaatttgagacggggtttcgttcttgttgcccaggctggagtgcagtggcacggtcttggctcactgaaacctctgcctcccgggttcaagcgatcctcctgcctcagcctcccaagtagctgggattacaggtctgtaccaccaagcccagctaatttttttgtatttttagtaaagatggggtttcaccatgttgaccaggctggtctggaactcttgacctcaggtgatcagcccgccttagcctcccaaagtgctgggattacaggtaagagccactgcacccggccttttttttcttttttttttttaagacagagtctcactctgtcacccaggctggagtgcaatggcttgatctcagctcactgcaacctctgcctcctgggtgcaagctattctcctgtctcagcctcttgagtagctgggactacaggtgcccaccaccaagcctggataatttttggatttttaatgagatggggtttcactgtgttgaccagtctgatctcaaactcttgacctcaagtgatcctcctgcctcagcctgccaaagtgctgagattacaggcgtgagccaccatgccccaccaggggaagctgtttttgataaagattgttggtacctatggaaattaattgtcttggtgaaaattgttattttttcttgtttatggctaattcttcttttggggggacttttagatgaggaccttgagattgaattggttgaggaagagcctccattcctgagagggcacactaagcaaagcatggacatgagccccattaaaattgtcaaggtgagaattactggacctttaacctggaaatgtcaagtggacttctttttctaaagtaatgggtcaggttattagatctgcgtaagtagaacttgggccacagaaagtattactggctgttagccagggtctataatagttttattttaaatggaggttgggttggctttattgcttttgcctgttgaattcttttgtgctccttttgtgtattttgggtggaagcagagatagataggaatgcttaatctgccatcattgcctttgcctggattccttagggcttgaatcttgcagattcaaaggcaattttgaaggatttacttgagcacttggggctggccaccatagaaagctgtagcactgggtgctggagagggcagagctgtaaggggaatccaaaccagaattcatagaacaataaacattttaggtatggaaaagggtatatttaaaggtctcccagcccagcacatatgaaatgcttataatccacgcatatcattcttctgcggtgttcttctcatatggtcatctcatagctgcatgacattgttagtgacagggaattcaccagcccttaaggaggtacatttcatcatgagatggatctgatcgctagttcttctttaggcatacctgaaacctcgctcactgaagtgtccacattggtcttgattttggttcccagggtcatacagaaaaattcttatacctttcttatgtccttcatacgtttaaaggtagcacatcattcctatctcttttggggttctcatattcaaactaaacatccagttccttcaatgatgtaacattgtccttgttcattttatctgaatatgctacggtttatccatttctttcatatagtctgttacattgataagaactttattccagatgtagtctcatgttttagattacaggagcttaacttctacatattatttcccggacatttaatccatgttgttttttcttctgttgcaccagaacccagacggctccctctcccaagcagcaatgatgcagagtgccttggccaaagaaaggcgggaactcaaacaggcccagcgggaagctgagatggattctattcccatgggactcaacaaacactgggttgaccctctgcctgatggtaggacccttggaggggtgtatggaccttgtttaaaaatctgagcctttcagaacacagggaggggtcactcccggcacacactaaaaatttacccttgggccggggcggtggctcatgcctgtaatcccagcactttgggaggccaaggcaggtggatcacctgaggtcaggagttcgagaccgacctggccaacatggtgaaaccaagtctctactaaaaaaatacaaaagttagccaggcatggtggcacacacctgtaatcccagctactcgggaggctgaggcaggagaatcgcttaaacccaggaggtggaagttgcagtgagctgagatcaggcaagtgtactccagcctgggtgatagaatgacactccatctcgaaaaaaaaatttacccttggtttttcacttcagttagagcatgtttggttttttcttaaacacatgtttaaaaccaaaaatgttttaatagccatggtcaaatcattagactgagtttttcttctgaatcactttaaaaatgttattctagcgcggtgtctcatgctgtaatcycagcactttgggaggctgaggcgggcggatcacaaggtcaggagatcgagaccatcctggccaacatggtgaaaccccgtctttactaaaaatacaaaaaatagccaggtgtggtggtgcgcgcctgtagtcccagctactcgagagactgaggcaggggaatcgcttgaaccctggaggcggaggttgcagtgagccaagatcgcgccactgcactccagcctggctacagagtgagactccgtctcaaaaaaaaaatttttattctaaaggtaatacagctttgaagcttcctttttcatataattctttgtgcagtaaatattagctactagatatagtcataacaaatacttattaatttaatttgtgtttggcaactggggatacgatttgaattaaacagatatgatccctgcttttatgcgctacaacttagtcggggatatggatattaattaaataatyaccaaataattaaattatgatcagtgccatgtgaagaagtacaggcagtgtaattgactgtggtgggtcacttccctggggaaatcgagacccaaaggataaattggactcagtctgtcaagtggagatgggatggaggttggggagtatgttccagcctgaggagtagcccgtgttgggtttgtggggtgggaaagaaggaactgaaagaaggcttgtgtggatggaatagagagagcagtgggcagtggtaggggatgagataagaacatcaggccagggctttgtaggtggcattaggaagctgggctcaattctaatagcactgggagatgttgaaaagttcttttgttgttgttgtttttgtttctgagacrgagttttgctcttgttgcctaggctggagtgcaacaccatgatcttgactcactgcaacctccacctccctggttcaagtgattctcctgcctcagactcccaggtagctgggattacaggcatgcgccaccacgcctagctaattttttgtatttttagtagagacgaggttcctccatgttggtcaggctggtctcgaactcgcgacctcaggtgatcccccccccatctcagcctcccaaagtgccgggattacaagtgtgagccaccgtgcccagccagatgttgaaagtttgcagctggcacatggcatgaccagagttgcatttccaaaggatgattgagggtgccctgcagaatgagttggatggggcacatgtgatgatttagaaagcttttatgaagagagagaatggtggcttgaacatggaggtagcaaagaggagggatgtacttgagaaaagtaatttgttgaatgtggggcaacaggaatggtcaaagatgacttccaggtttctggtatgagcactaggatgaatgatgggaacactggaggagaaatgggtttgtggggaaagatggtcaaattccgttttggacttgtgtccgaggcaactagaggacatcttaggttgaggtatccagtgtagaattgagtataagagctcagaagagaggtctgggctggagacagaagtttgggaattgtgttaatttagatatcagtttggctgcatgtaatagagattcaaatattagattaggttcggcatgatggctcacgcctgtaatcccaacactttgggaggccgaggcaggagaattgcttgaggccaggagttcaagaccagtctgggcaacatagtaagaccttatctgtattttattttattttgttttgttttgttattttagtttagtttagtttagtttttgagatggagtctcactatgttgccccagctggagtgcagtggtgcagtcttggctcactgcaacctctgcctcctgggttcaagcgattctcctgcctcagcctcaagtagctgggactacaggtgaccgccaccacgcacgagtaattattttgcatttttggtagagacagcgtttcaccatgttggtcaggctggtctcgaacttctgacctcaaatgatcttgcccaccttggcctcccaaagtgctgggattactggtgagccaccgtgcctagcccttgtctctattttaaaattaaatttttaaaaacgacaaaaataaaaaccaaaatattagatttacagtagaaggttggacatattcgttcattgtttaacaatatcatcttccatttcctcagaataaacccattcattcccttttaccctttagtgaaatgttctccatgaccctcctttggcctctgcctaagctcacttatttggttagtaggcataagtattttttcgtagccagcttttggcatcaaatttgtaaaatgtttgcatatgctagagagccactaaaattctgctcatttttttttgctcctcaagccacaattccaaggtgaatcttgaaaatataagctaggtctgggcaaggtggctcacacctgtaatcccagcactttgggaggctgaggcagacagatcacttgagttggggaatttgaaaccaagctgggcaatgtggtgaaaccctgtctctaaaaaaatacaaaaattagtccaggcatggtggctcatgcctgtaatcccagcagtttgggaggctgaggcgggtggatcacctgaggtcaggagtttgagaccagcctagccaacatagtgaaaccccatctgtgctaaaaacagaaaaattaacagatgtggtggcacgcacctgtaatcccagctgctagggaggctgaggcaagagaatcacttgaacctgggaggcggaggttgcagtgagccgagatcacgccattgcactccagcctggacaacaattgcgaaactccatctaaaaaaaaaaaaaaaaagtttagccgtgtgtaatcacgtgcacctgtattcccagctactcaggaggctaacgtgggaggattgcttgagcccaggaggtggaggttgctgagctgagatctcgccactgcactccagcctgctgggcgtctgagccagaccctgtctcagaaaaagaaaaaaattaatctgagagaaaccaggcacaacagaccacatattgtatgaagtatccagaatagaacccgtagacatagaaagtagactaatggttgccaagggaaaggaaaagggaggaatggggagtaactgctaatgggtacagggtttctttctgatatgatgaaaatactctaaatagtggggatagttgcacaacttaatgaatatacagtaaaacactgagttaaacacttaaaaagagtaacacggagacctggcttggtggctcatacctgtaatcccagcactttgggaggccaaggagagaggattccttgaacccaggaatttgaggctgcagtgagccgtgattgcgtcactgcactccagcctgggaaacagagcaagaccctgtctcaaaaaaataaaataaaataaaaaaagtgtaacatggtttgtgaattacatctcgatatagcagttatttaaaaaggggagagtgctgcgcatggtggccatacctgtaattccattactttgggagggtgagatgggtggattgctttagcccaggagttcgagaccagcctggcaacatagagtgacctcttctcgcttgagcccagaaggtcggggctgcagtgagccaggattgcaccactgcactcccacttggatgacagagcaagaccctacctaaaaaaaaataattccagtgtcaagcagtcaggtcttcacttctctcaactaaccttttttctgacatcacaggtgtgtagcaccacttgttacagtctctttcccattccctgctgccccttctatattcttttctycacattaatttgtttctttgagtacttttgatcacgggtcgctgaattgagatgctgcatgtgcagtgcccgcatgccattttatttttttcctggtacatcttgaggtagcttgaggacaatactaagttgcctgttttcctttccagcggaaggcagacagattgctgccaacatgaggggtattgggatgatgcccaatgatattcctgagtggaagaagcatgcctttgggggcaacaaagcctcttacggaaaaaagacccagatgtcaatccttgagcagagggagagcctgcccatctacaaactgaaggagcaattggtccaggtgagaagacttttatgatgtattggtggggagtagggttattgtctaaaagaggggtgatatttttaaactgaaactaacgggacaagtatgtgcctacttgaagtggctcatccaaaagagttaagaaagaaggataaaactttctaaatactttttttttaaatggggctgggcgcggtagtggatgcctataatcccagcacatcagaggccaaggcaggaggatcacttgagcctaggagtttgaaaccagcctgaggcaacatagggaatcttgtctctacaaaaaataaaaaatttggtggggcgtggtggcccacacctgtaatccggcactttgggaggcaaaggtgggcggatcacaagttcaggagttcgagaccatcctggccaacacggtgaaaccttgtctctactaaaaatacaaaaaattagctgggcgtggtggcgcatgcctataatcccagctactctggagtctgaggcaggagaatcgcttgaatcagggagtcggaggttgcagtgagtcaagatcacgccgctgcactccagcctggctacagagagagactctgtctaaaaaaaaaaaaattacctgggtgtggtggtccatgcctgtaatcccagctactcgggaggctgagataagaggattgcttgagcctgagaggtcgcggctacagtgaactgcaatcacaccactgcactccagcctgggcgaccaagtgagaccccatatcacaaatgtttgtgtgtgcgtgtacagacacacatacttatgtatgtgtctgtatatcttctttttcctggggcccctagaacagtttccaagtgggcagagtattgtgttgcatggaccaacagctctgttcagtaattaaaaatgaggatactcagtcaataaactcatatgggcaactcatagagtgcttcggtactctatattctggagttctgattttaagaccaccgagtcttccttgaggtaatcaggtttactagtttctagtgaatcctttcaacaatatcttatatgtatacaagcaagtacaaatatatgcacacacacgcacacacattttatatgagtactgtgtgtgtttacaggtggcagtgatattatatacactgttctacatctttttccacttaatgatatatctcagagatttgtgtgtgtgtgtgtgtatgtgtgtgtgacagagtctcgctttgtgcaggctggagtacagtggcttgatctcagctcactgcaacctctacctcctgggctcaagtgatcttcccacctcagactcccaagtagatgggactacaaggcatacaccatcatgctcagctagttttttgtattttttgtagagatgcggtctcactatattgtccaggctggtcttgaactcctggactcaagcaatcctccctccttggcctcccaaagtgctaggattacaggcatgagccactgtgcctggccttcttaaacaaacaaacaaaaaaaattgccaggccaggcacagtggctcacacctgtgatcccatcactttgggagggccaaggcgggcggatcacctgaggtcaggagttcgagaccagcctggccaacatggtgaaaccctgtctctactaaaagtacaaaaattagccgggcgtgctggcgggcacttgcagtcccagctacttgggaggctgaggcaggagaatcacttgaatccggaaggtggaggttgcaatgagctgagatcatgccactgcactccagcatgggcgacagagtgagacttcatctcaaaaaaaaaaaaaaagcctttttttatgggctgtattatttggataggctctggtttatttaactagtcctatatccatagaaacatcgttgattgtaatccttggctgttacaaacaacgtagaaataagaaataacttttggggaaagatatagaaatttgggagttacagtgggaaggaacattttttatgtatcttttaaattcattgttgacttctttaactatatgtgtatattcctcttttctttggtgttagaatatagtaattattttattccagagtaatgtagattttaatgaccatatttatattctgtttaatgaccatatttatattctggcagattttaatgaccatatttatattctgttgctttcaggccgtccatgacaatcagatcctgattgtcattggtgagacaggatctggaaagacaacacagatcacccagtacctggcggaggcaggctacacttccaggggcaagattgggtgtacccagcccagaagagtggcagctatgtcggtggccaaaagagtgtcagaggagtttggttgttgcttaggccaagaggtaagtagatagtggagtcgctcgaaaaataccagaagcaaaggcccaggtctcttaatctatcaaatggaaatattaataatactgccttttttcaggtttctcctgagggagagagggttcccattgtcataatcagtctgttcagagtatagtctaagacataccttactatgaggaaattactgtacatcttgatcagattcttaagattatgagtgagagtgactgggctgaaatcttgcctggtgattgggaaaaggagacatttgtatcctaggttttccccttctcttctgctttaggtgggctacaccattcgatttgaggactgcactagccctgaaacagtcatcaagtacatgacagatgggatgttgcttagagagtgcttgattgaccctgacctcactcagtacgcgatcatcatgttggacgaggcacatgagaggacaattcacactgatgtgctctttggattgttgaaaaaggtaactagatgctctttaatgacccctctacctgttggaagctgaattctggcagttggatttgagtacctgtgtctttgggtagtccttttcagtaagccacataatatttctcttcagacagttcagaaacggcaggacatgaagctgattgtcacctcagccaccttggatgcagtgaagttttctcaatacttctatgaagctcccattttcaccatcccaggtcgaacatatccagtggaaatactgtacacaaaggaacctgagacagattatctggatgccagcctgattactgttatgcagattcatttaacagaaccaccaggtaaggggaaaaagcaattttcctttttgggaggcctaattttccctcttaggccaaaagtcctcatatgggtatcttttttgctaatctttttaaaaacaacttctaaatattcatctctctgcaagcctcaggcttgtatgtttgaaatgatggtggttataatgtcatatataaacaaacttgtattgtttacttactggtcagaatatgaatgcatatgttctgttatttgaagttttattaatatcaccatagcccttgtatagracacacatacacacacagaaagtagatgaatgttctattctgctcgtaggtgatatcctggtcttcctgactggtcaggaagaaattgatactgcttgtgagatcctgtatgaaagaatgaaatccctgggacctgatgttccagagttaattatcctcccagtgtactctgctcttcccagtgagatgcagacccgaatctttgacccagctccaccaggcagcagaaaggtaacatgggcaaaaatgaagcttccatgtgccctgaaaccatgtgttgtgtgcagcctgtcagccatagtagggattgcttagggtgtatgcaagtctttttttttttttttttcctcgaggcagagtctcgctctcacccaggcaggagtgcaatggcaccatctcagctcactgcaagctccgcctcccgggttcacgccattctcctgcctcagcctcctgagtagctgggactacaggcacctgccaccacgcctggctaattttttgtatttttagtagagacgggrtttcaccgtgttagccagtatggtctcgatctcctgacctcgtgatccgcccgcctcagcctcccaaagtgctgggattataggtgtgagccaccgcgcccggccaggtgtatgcaagtcttgtttgttaggtttcagagactggtccaaccaatttgtttaggaatgaggtccaaccaatttgtttagtatgtgacctctcctcttcttcctcttcttcatttgacaaatattttttgagcatctaccaggctttgggctacacatgggagctgcattgtgagaacaagcctctatctgctgtggggcatcccccagtcaacagactttcagcatttagtgtgaaaatgccactcatgcttggatacccaggcgggagcacccaaccctgtcttcctagaggaaataaggatctaaggtagtcctggagaactcttgaaaggcaaggggacaagcattctaaggacacagaactatctgtgatggcctggagacgagcaagtrgggccagttcagggaatggcatagttccagtggctggaaccaagtatatgactgtgtgtatgagacaacaggaaaggagacagatggatgtaggtatttttttagtaacagttttattgagatataatttacatacctttcaattaactccctccacctcccacttatttttttttttttttttgagatggggtctcagtctgtcacccaaggtggagtgcagtgatgtgatctcagctcactgcaacctctgcctttcaggctcaagtgatcctcctgcctcagccgcctaagcagctgggactacaggtgcatgccaccattcttggctaattttggtttttgtttttgtttttgtgtttttttttgagacagagtttcactcttgttgcccaggctggagtgcaacggcacaatctcggctcactgcaaccttcacctcccaggttcaagcgattcccccgcctcagcctcccgagtagctgggactataagcacccactaccacgcctggcttatttttgtatttttagtagagatggggtttccccacgttggccgggctggtctcgaactcctgacctcatgtgatctgccggtctcggcctcccaaagtgctgggattaccggcgtgagccactgcgcccagccaatttttgtattttttttgtagaaacacagtttcgccatgttgcccagattggaatttactgttttttgtttgtttgtttgtttgtttgtttkttttgagatggagtttcgctcttgttgccgaggctggagtgcaatggtgcgatcttggctcaccgcaacctccgcctcccagattcaagtgattctcctgcctcagcctcccgagtagctgtgattacaggcatgtgccaccacacccggctaattttgtatttttagtagagacagggtttctccatkctggtcaggctggtctcgaactcctgacctcagatgatctgcccccctcggcctcccaaagcgccgggattccaggtgtgagccaccgtgcccagccagaatttacccttttaaagtgtacagttcaaaggcttttacccatggtatgtggggattggttccaggacccccgaggataccaaaatccaagtatgctcaagtctcttatgtaaaatgccatagtatttgcatgtaaactatgcacatcttcctgtgtgatactttatctctagattacctataatacctcatacagtgtaaatgctatataagcagttgttttactgtattttttatttgtatttttttattgttgaatttttttcctcaaatatttttaatctgctgttggttgaatccatagatggggaaccagcagatacagagggctaaccatattcacagaattgtgcagccatcaccacaattatatttagaacaattttatctccctaaaaagaaatgctgtaccctttagcagtcatctacccccatttactcctctgctcagcctctggaaaccactaacctatatcttccatctctgtggatttgcctattctagacatttcatataaatgaaatcacatatttgtggctggcttatttccagtgatttttccagacttagcatgttttcagagttcatcaacattgtagtatgtatcaatacttcatttctttttcttgctgaatactgttgtgttgtatgggcacaacacattttgtttatccatttatcagttgatggacattggagctgagcgcagtggctcacacctgtaatttcatcactttgggaggctgaggcagatggatcacctgaggtcaggagttcaagaccagcctggctgatatggtgaaaccctgtctctactaaaaatacaaaaattagccaggcgtggtggcgggtgcctgtaatcccagctacctgggaggctgggacaggagaatcacctgaacccaagaggcagaggtttcagtgagccgagatcgtgccattgcactccagcctgggcaatgagcaaaactatctcaaaaggaagataaagatagacataggagtcattttcacttttgggctttcttgaataatgctgctgtgaacatttgtttacacatttttgtgtgagccaggcgcagtggcttatgcctgtgatcccagcattttttttttttttttttttttttttttttgagacannnnnnnnnnnnnnnnnnnnnnnnnnnnnnnnnnnnnnnnnnnnnnnnnnnnnnnnnnnnnnnnnnnnnnnnngcagatggggggtggaatacgtctttttagtagagacagggttttgacatgttggcctggctggtctcgaactcctgatctcagatgatccatccgcctcagcctcccaaagtgctaggattacaggcatgagccaccacgcctggcagatcccagcatttttggagaccaaggtgggaggatcccttgagcccagaagttcaagatcagcctgggcaacatggtgagacccctatctctacaaaaaaaaaaaaaaaaaaaaatcagccaggcgtggtggcacatgcatagtcccagctactcaagagattgaggtgggaggatcacttgagcctgggagggtgaggctgctatgagccatgatcacaccactatactccagccarggctacagagcaaaccagaccctgtctcaaaaaagaaaaccaagtttttgtgtggacgtatgttttcatttctcttggacatatacctaagagtagaaggcagatggacttggccrggtgtggtggctcacacctgtaatcccagcactttgggaggctgaagcggatggatcatgaggtcaggagttcgagaccagcctggccaacataatgaaacccagtctgtactaaaaatacaaaaattagccaggcatggtgacacgtgcctgtaatctcagctactcgggaggctgaggcaggagaatcgcttgaacccgggaggtggaggttgcagtaagccgagattgcaccactgcactccagcttgggcaacagagtgagactctgtctcaaaaaaaaaaaaaaaaggcagatggacttgagtaatgttaaagagttaaaatggacaagacttggtgggtactagcaggtaaagggaagaagggtgagggaagtcaggcatgactgtcaggtttctggcttgggcagctggatggaagatggcactgaggagggaaacatgggaggaggcttgagtggaaagatggtgaatttctcccctattctattcctaataatgagagttctttctaagcagggcttctgtagttctgtagcaggtagaagcctttcaggaccagtaagatgctggcatgatgcgtgatattccggtgcccccagtgatgatttttccaagcaattgtgttttattagctgaacctttgggtggaagaacagtgacagtgccaagctgagactaataatcctccagatcacatagactgctacacacacgcaaactgtgaaattcctgtgtcatctcatggttcattttatgatcagtaaaaagaagcaatctccctcttgttccacatacatattccgcaaaatacaagcagctcattttttagtccagatgtctcggtaggggaaagaaaaatctcattttgcattggcacatgtgatgccaggaaatctctgctttcccagggtgctagaaaattaaaattgtagtaatcaacattggatctagaaaatgagatacacagtagctatttgcaccaaatgaaattggcttttattggctgtagctttttcctattccactcacctctcaggtaccatcccttttccaacttaaccattaagcagaaggtacctcccttctgctgttggaggctgagctgggattaagtgtcattttaaccgtctagagagagagatagccacatattcctttgggaagatatctgggttcagaagaccttttcacacctcagggctgagcctgggcacctcactccagctttgcccctcttgcctgcaggttgtgattgccaccaatatcgcagagacatcgctgactattgatggtatctactatgtggtggacccaggattcgtgaaacagaaagtttacaattccaagacagggattgaccagctcgtggtgacgcctatttctcaggtatgacggcttgtatcaacagttttcctgataatcctgattagggcctttctgaaacttttttatggttatatatttcaaacttgttttcaaagatgaacttttatgatactgggtactataatgacatgagggaaggattttttgttatttgtttttaatctttttttatccctgaagtctgattgatccttgaagtttttaatctttttttttttttttttttttgagactaagtttcactcttgttgcccaggctggagtgcagtggcrcaatctcggctcactgcaacctctgcctcctgggttcaagcgattctcctgccttagcctcccaagtagctgggattacaggcatgtgccaccacacctagctaattttctatttttagtagagacggggtttcatcatgttggtcaggctggtcttgaactcgcaacctcagatgatccacccgtcttggcctcccaaagtgctgggattacaggtgtgagccaccacgcccggccctttttaatctttagaatagtatttcactattaaaatgcccccgtaaggccagacaccttggctcacacctgtaatcccagcactttggaatgctgaagtgggaggattgcttgaggccaagagttctaaactagcctgggcaacatagcaagactctgtcactataaaaaatttaaaaaaaattagcctggtatgggggcatgtgccaccagtcccagctgcttaagagtctgaggtgggaggatcacttgagcccaggagtctgaggctgcagtgagctaagatagcatcactgcactctagctggggcaacagagcagactgtgtctctaaaataataatttgtttaaatgccccataaaactagaacataaaaaaagtttgaatcctagtaccctatattacctattttagatggaaagatcagtactttattttctagtaccttgcttagctacgagatagatatctgagataataataaattatatgattttctggttttttggtaattatggaataatttcctgcctaaatgacatttaaaaatgaattacccgatcacttttttgagagaagtttggcaacagtatatccaaaacttaaatgttcatctctttaacctaactgttctgcttatagaaatttatctgaaagttagaaatgattaaatacatgtccaaaggtaatagaaaaggatgttcatcgaaggattggtttatatcagaggaaacctggaaaaaattctaaatgtattccaaaagggaagtagtttaataaattatggtatattcatgccatagaatgttggtggcattaacatggtggtgtgtatctatatttaatgacataaacatgtaactataatattttctttgaaaaagtgagcctacaaaacagcatgaatggtataatccaatttttgtttaaaaatagatggtgagcatttcttcagagtatgtgtgagtgagctgtgcccaagattgaaagcatgtagtctaaatgttagccaagattatttatgggtggtgctactagatgatgtgcattttcttttatacttttatatgttgtcttaatcttttacagtgggtatgtattactttcataatttgtgaaagccttaaggctatttttattttgaaacttaagtaataataatagctaacactttttgttttgttttgttttttgagatggggccttgctctgtcgcccagtttggagtgcagtggtgcaatctcagctcactgcaacctcggcctcctgggttcaagtgattcctctgcctcagcctcccaagtagctgggactacaggcgcatgccrccatgaccacctaatttttgtatttttggtagagatggggtttcactgtcttagccaggatggtctccatctcctgaccacatgatccacccgcctcagccttccaaagtgctgggattacaggcataagccaccgcgcctggcccaataatagctaacacttacagtgtacttaacgtcctagatacatgcattgacttggtgcattctcgcattgatcctatgtggtagatattattttcacagatgaggaacctgaggcacagaggggttaggtgatttgcctaacatcacagagctagtggagccaagatttgaacctgggtagcctggctccagcttgtatgctctatactacttgtcagggtggcggtgatcaaaaaattagttacacatgcctgtcctgatttggagagagacatgtgtagaatgctgtagagtccagccactgtgtgtgattgctgcctggatttgtgtggttagttgtcctttcataacctatcctttggtttggagctggcatagtaatttgtaaatcctggtactgtttgtaacaacagatggttttgtcagaaaatggccctcttcagattgctattcattgtttcctagcaacctatggctaaactacattttttttaattaaaaaaaaatcagtgtttttgaagtagtgttttattatttttgaaaaacagaagaaaaaaatttacccaccatcctactacctccactgttattattttgctgtttttcattccagtcttttttcatgtttatttctttcatggttgcaattttagtagtcaagtaagtatgcagttttgtatatttttttgagtatttaattttcctattagaataatacatgttcaatatttggtaaaatctaaagaaaatagacctcatctgcaagcctactatcagagttagccactgttaacattttagggtttttttcgcctagtcatttccttctagtagttgatatataaagacttttactaaaattattttacattgtttcgtaacttgcattttgcatttaatgcgaatgaacattttcttctgtcatttaacattgcaaacatgatttttatttttattttttattttattttgagtcaggatcagtctttgttgttgcccaggctgtagtgcagtggtgtgattacggcttactgcagccagcctcgacctccccaggctcaggtgatcgtcccatctgagcctcctgaatactgggactacaggcgtgagccaccacaccaagctaatttttgtattttttgtagagatgaagtttcaacatattgccctggctgatctcgaactcctgggctcatgcaatctgcccaccttggcctcccaaagtgctgggattataggcataagccacgacgcttggcctgcaaacataatttttaaaatgactgcagagtcatcattgggatgattgacgtaatatgtttatttcacttacatttttggtcataactgtggggatggtgttctgtcatcttgttttatgctttctcttttatattgcgccacactattttgaagatatatgtctcagatctgtataatatttcttccattaaccctgcttgtattgcctccctcgaacaaacttccccgaagtgctgagtatggagaggggaagataagagcattggtagtcttggaaatggtcccaaaggaagtgaaatcaaccccatttctgattttgccagttgttaattgtcccccttttaacagatatcctgggtaaagctgttaagcagtgtttaacagatatgttgcttttatatgcccacccctctaggctcaggcaaagcaacgagctggcagagctgggagaacaggcccagggaagtgttacaggttgtacacagaacgtgcctaccgagatgaaatgctgaccaccaacgtgccggaaatccagagaaccaacttagcaagcacagtgctgtcactcaaggtagaaatcactgtcttgttaaaatgggttggtggaacagtccaatcctggccttcataaatgaatttcagttttatgaaccttgttaaatactttagtaacctcatgaaagcagtccctttgagtgaaatgcaaatggctgtgataacagcctctcacggcaggtctggggctaagttggcatgtctgctgtgaacacacattttttcttaccataacaaccagcaggatattaggttgtaaaaggttctagttaggagcattttctaaaaggaaattagaaaaatataatcaatgccaaactgtggacacacacacctaacctcaaccactttagcgctcagatccaattctgttcttttagaacgagagaaaaccccctgttcaaaaactttgcaagggaactgtcagtacagatttcagactggctctcaggggcttggttttcattctgaatcattgttcttcctctctcagtccccagtgaggacttcattctcttttggcaggaggagctgtatgagtaatttcccagctgatggcgtttcccccgacactgatgctaccctggagccctggtactttctggtgcagagtgctctgttgtcatttattatttattccctgtcaaagaggctaaaacagagctttggaaagaaaaaagaaacctactccagtctctgaagtgccaacagagaggcatctgtggcttggacttcagctccaaactgcgactttgggcaagtttatttactttgccctctgctctgtgttctgctctgaaaaaggggctgttaatagtatttgttggaaagataagtgagataatgtaggtaaaggcacttggcacagtgcttgatgattgctaacataattcatcatagttattattcacacaataaacatttattgaacacctgctgtgtttatggtcacaatcactttatgagaaagaaatagaaagcttaggtcctaccacatcacactttatatacacttgaatcgtgcatcattcagtcgtttcttttattcatcgaattagctaatgtattgaacacatgctacatgccaggcatgtagattgcactgtggtggttttgtgaacatagtttttacccagtgtgaactctctgaaagcaggggccatatcctggccatctttatatccctcccacctaacatggtatgagatccctcatagatatatagtagaaatgatgtatgcaagagacaggacaagttggtagactatattattattattattattgtaaaatacataacaacatttactattgtaagctttttaaagtatacaattcagtggcattaaatacattcaagatgttgtacaaccatcaccaacatccatttccagaactttttcattgtcccaaacagaaactctgtacccattaaacagtaactcccctttcccccttcctctatcccttggtaactactcttctactttttacctctctgaatttgtctattctagatagcctcatttaagtggaatcatacaatattcttttgtatctgacctgtttctcttagaataatgttttcaagatttattcatgttattttcaaggtttatccatttatttcattcctttctaagggtgaatagtattctgttgtatgtatataccacattttgtttatccattcatcagcagatggacatttggattgtttctaccttttggctattatcaataatgctgctgtgaacattagtgtgcaggtatctgtttgagtctgctttcagttcttttggatatatacctagaagtgtaattgctgggtcatgtgctaattctgtatttagcctattaaggaaccaccaaacttttctacagtggctgcaacatcttacattcccaccagcaatgcatgaggtttctgatacctcccgtcctcactgacatttgttagtttctgttttttaaaaaaattatagccatcctagtgggtatgaagtgatatttcattgtagttttgatttgcatttccctaattactactgatgttgtgcatctgtgcatctttttatgtgcttgttggccatttgtatatcttctttgaagaaatgtctattcaagctctgtgcctattttttaaattgagttgtttgtccttttgctgttgagttgtacatattgtcattttgagagagtgttagggttttttgttttttttttttcttggaagacgttttatcatgttgcctaggctggtctcaactcccggactcaagcgattctccctccttggcctcccaaactgctgagattayaggtgtgagccaccatgcccaactgagagaatattttcaaaaagtttcctgagaaattatgtgctttcctttgggaggccgaggcaggcggatcacttgaggtcaggagttcaagaccagcccagccaacatggtaaaacgccatctctactgaaaatacaaaaattagctgggcatgatggcgggtgcctataatcccagctacttgggatgctgaggcagragaatcgcttgaacgtaggaggtggaggttgcagtgagctgagattgggccactgcactccagcctgggtgacagagtgagactctgtctcaagtatgtgctttctattataatagtctgagttttatgtggcccagccctggaagttaccgccagtctcaccggtggcttcctaattgcaattgaagaaatgggaaataaagtaacamgtagcttccccacatgctgacactggctagactgaccctcttatcacatgccttcttcctttctgttmtaggccatgggtatcaatgatctgctgtcctttgatttcatggatgccccacctatggaaactttgatcacagccatggagcagctgtacacactgggggccctggatgacgagggcctgctcactcgcttgggccgccgggtaagggacagactcaacttcctgtgcttttgggaagattccctggtcagcctttcacatccttcggtctgtacaaaatcaggctgaggccrtggataagctttgagtaaaattctaaatgtttgtttttaacctgaatttctccactgtcactttaaactgtttcttctttatacaaaaaggtgttctgttcataattttgcctgaggatgtattactgaatgtagccttaattagaaacggcatctgcaaaattctcatctaccccaacagtagttatatgcttggtcacatacatcccgttggagtttatttgggaaaagaataaacaacagcattcttctgatagagaaaggcatcccaaggcatcattatgctttgggaaaatctgtgttgttacccactctgaccaaggtcttgctctggtgaatccaaatgtgtcttccacagggaagcagttgtagtctttttttgtccctctagatggcagagttccctctggagccaatgctatgcaaaatgctcatcatgtctgtgcatctgggctgcagtgaggaaatgctgaccattgtatccatgctgtctgtgcagaacrtcttctataggcccaaggtaggaagttcagatccaagtttagatgggggtgccatgaagttggggtagttggcctgttgccattccaatgcttgatgtggactttttttttttttttttttttttttgagatggagtctcactctgttgcccaggctggagtgcagtggaatgatcttgcaatctctacctcccgggttcaagcagttctcctgcctcagcctccagagcagctgggattacaggcgtgcgccaccgtgtgctgctaatttttgtatttttagtagagacagggttgcaccatgttggccaggctggtctcaaactcctggcctcaagtgatcctcttgcctcagtttcccaaaatgctgggattacaggcctgagccatcatgcctagcctgatgtggacacttttgatagggtcttgtagggctccctagaattgctccatgttcagttagtagctgttgagtcggaaatgttcctctgtcccactgcttggcaggataaacaagcccttgcagatcagaagaaggccaaattccaccagactgaaggggaccacctcaccctgctagctgtgtacaactcctggaagaacaacaagttctccaacccatggtgctatgagaactttatccaggstcgttccctgcgccgggcccaggacattcgcaagcagatgttaggcataatggacaggtaagcyrgaatctgatgactctgcatgtttgagttgaaccaccttgagtatcatgtcttttcatctctgtgtgtacctataaagctataggcaccttttctcttgctcctcacataacccttttcctccagcttttccatctttgttatattccttctccccaagtaagggtatgcctgagaattacctcagatacctaagaggaagattatctgttagttgttgaaaaaaatgctctttgtttgcaaccctctggaacattattactgtggaattgaatacctgtctaaacaaagtgtctgtctctgagtgcctccgtctgcccactgtgtagagctgcctctgtagtacacttagggctggaaggaaggtcctggtgactactctgggcaccccaagatggatgtgttgggcactgtcattgtgaaaatagacctgtgaaagctgartgggctcatatcttttgtcctatcttgatagacacaagctggatgttgtttcctgtggcaagtccacagtccgagtgcagaaggccatctgcagtgggttcttccgtaatgctgccaagaaagacccgcaggagggttaccggacactgatcgaccagcaggtggtctatatccatccttccagtgccctcttcaacagacagccagaatggtaggtggacatgtcccagggtctaggggcttttctgggcagagaaaaacctgtaaatttcctggtattttgtgattgtgtcttcactactcccartatgtcctagtataacactgcttgcctttctagagcagcagaaacctgaattaggcacaatgtatcaaaccctatgagagaattaaaatcataggggtgagacctagttgaaaaaaaaaattgtggtttaaaaaactacgtagtggccaggcacagtggctcatgcctgtaatcccagcactttgggaggctgaggtgggcagatcagccgaggtcgggagttcaagaccagcctgaccaacatggagaaaccctgtctctactaaaaatacaaaattagccaggtatggtggcgcatgcctgtaatcccagctacttgggaggctgagacaggacaatcgcttgaacccaggaggtggaggttgcagtgagccgaaatcacccattgcactccagcctgggcaacaagagcgaaactccatctcaaaaaaaaaaaaaaaaaaaaaaccaactacctaggggctaggcatggtggctcacgtctgtaatcccagcactttgggaggccgaggcaggtggatcaccagaggtcaggaattccaggccaacctgaccaacatagtgaaaccatgtctctactaaaaatacaaagttagccaggcgtggtggcaggcacctgtaatcccagctacttgggaggctgagacatgagaatagcttgaacccgggaggcagaggttgcagtgagctgagattgtgccattgtactccagcctgggagacagagtgagactccgtcccaaaaaaaaaaaaaaaagaaagaaaaaaacaactacctagtgatgtagtttaaaaaaaaaaacttgttttaaagtagcatttttaaaaaattggactctatctaraaccctaatataaaactgatttaaaaccaccatgttatcacagtaraagggttagaaatgtggctccttgcatgtttggccttctccatcccttgtggcagtgtgaggcccctcttcagagccctagaattctgtggaaacattctaataaacatcctcacattttatagagcaagaaacagattagagaagggatgtgattggctccatgtcacttaactagttagagccagagccaggactagaatacattctcctgagacctttcttgtggttagaggtgtgcgggtgcttcagtattggggtgtggctgtcataaacagactgcagtcttataggtgtcaggcaggagaggtaatagtataaaatgtaagctcagctgaggcctactagggaccaggttgactgtagagtggggcctatatccagaggcttgagtactatctctgtcccccctcagggtggtgtaccatgagctggtgctcaccaccaaggaatacatgcgtgaagttaccaccatcgaccctcggtggcttgtggagtttgccccagccttcttcaaggtctcagacccaactaagctaagcaaacagaagaagcaacagcgtcttgaacccttgtacaaccgctatgaggaacccaatgcctggagaatatctcgagctttccgacggcgctgaaaggcaagattgttcctttgcctctccagcagcagtagccagggcttggacttatcgatgacaggctggtcctgaggatacagctgtcccgtgactgactgtcttaactgagcattttctcaactcgactctcatttcttccctgctggtaaaatagaaacagggatttaaacctggctttggcaagagcctgcagcctccatcaccccaagtccttgggcccagttgggagctcatatctaacacagagacacattgcatcaacttcaagaaagggacaatttgtgcagctccaggatgggaaggtggagtgggtgagcatcttgtgcagggacatggtgagtgccctgatgycccagctagcaggagctactgtgctcatctaaagtgtttgccccacttcccaccccgtctccagcccctgtactttggcttgacctcgtggaaatatttattttcttaaggaaacaaaaatggttttctgtgactgttttcttttagccgaaaggttaggatattggcctgggctcagggtgagggagatttagtatctgtgctctggcacacatgatgagaatcccctgaatcccctgaaaccagaacgcagggcctctttgcgctcggaaacgacgtacaacccagacttccagccttgtctttcagcatcagcactagccgggccgtgctgggggatcacccgatgatcaaccatgtcctctccacagagcacttcagtctggaggcctgagtggctacagatggcacatattaaatacagaaggtttccccttgctccctccacctcccacattcgcaatgtgcagcatgtcccatttccttttgaaacatactaagtaacaacacagcttttattttattttgtttttatttttttcccctgaggtcctggatggactttaacaaagggattttatggtcaaaacctccctttccccactccaaacagaaaacaaacataacacctctcctctcagctggtttgtgctgccagtatctgtgctgcagggcttgttcttagtggttttttcctagcacttgcttggagaatagccacctccttgtgccctcctcacagctcctgaggagggttttttttttttcttcccatagagatgggttcccactgtgctgcccaggctgctctccaatccctggcgtcaagcaatcctcctgcctctgcctcccaaagcgctgggattacagttgagagccactgtcctctgcactgaggaggctccttacctggcggaacatcaggcaggtcttgccaggccaggtttcggaacttacggaaagctggtctggatgtagtgcttgtagagaagcttctgagagattgggcacatcctgttacgttgctgcttctcctgtccttatgttattagtaagttctgaagtgatgtaaatgctagaactactgtagaactgtatgccagacactaagagagactatgtaacattccaggatataaaggaatgtatgttgtcactgggcagcaaaccacaccctaaagacaattcagaaagagtccgagggagaggaatataggccaggcaatctgctggctgcagatccctgccccttcattaagctgagtgcctcctgattctgtctgagtattcgcctttgtaagcccaggccagtaatcaaggggcagggcattgttgtgtgttaaccttgaaggccttctggggagagacagtacagggacctcaaatgaaaccaaaggggaaacggggactgggcacccacctccccaatctcgttttgtttttgtttttgttaagacaggatcttgccatcttgcctaggctggcatcaaactcctgagctcaagtgatcttcctgcctcagcctcctgagtagctgggactacaggtgcatgccaccacacctggctcccagtcctaattccagcctaaattttccccattcagaaacactcctggatatagtggcccagcctgtcctgactgagtgcccagcactgacaatgttgacacctggggagggagggttgggtttcaagctgaggttgaaaagggatgttgaatgggctaaggataagagacagcagggttcgttatcttttctggctcaggtggaggaaaaagaaggatccccattctgtgggtgttccttgaccatctctctacgctagagctgaggtcacttctctgctatgacaacatagctgggttctgaccttttgaccatcaggaaagcaatgtcagcagctgagctgagcctgctctgagggagaaggggggggtcctgtccagatgcagaaggggagcttgcctgctgctctcacacaatggagcccttgtttctcttccttgaaccagtatttcccaagattgagtgacagcccaggagaggatgtgggtctcatgcagagagctgggatcttcttggccattaaagtatattgttcacccccaccccgcgagaaccaagctcaggagttgcctgcctctgcacacatgctgagtgtgctgtttgtgtatatggcaggaccgtccctatggggcatgtgtgagctccgcagctgggtcaggctcctcggtccaggtttacttcatcccgcctggacgtgatttggctttgactgtctctcctgcagcccaaagcacttcctcccygtggttgctgtagctgtctcattggagcagtgcctctccaagtttgaggatttgaacaaagaactgggactggtgacttgttaatgaacagttcagagggcagagggccatcatctcagcttgtggagacctttctttccctggatgctgcttctcagctaactccctctctcttcgtgtgtgtactcggccttcagggtttccaccgatttttacaccttcttcccaccacgatagcttggctttaatgtggaattaaattatatatttttaaaacctgtttttaaaattttgtttcttgcactaaattatgtcagtacattgatattttgtgtttctaggaagaagtaatgttgccttttatttgtgggtagtagtcgaggggcatcccttcctgcaagggatggtctcaggttggtgctgggccaacctgagacatgaacagagttgggctggcccaacctcagcacagctgcagtttctatttaacaggagagcaccggtttttacctgagcatgtctcctgggcagcggtttacatagcagctggctctagaaccacccattctgcccctcccacctgttgtcacatctcagtcatacgtcctccataggtgtcaccatgttgtccactttgccatttctacctacccccaaaaaactcagcctcaggactctgatctctcccaaatttgggcaaggagaatctaggtgtttcccactccccggaagatctaatctccactggccagaatccagggcctgctctagcctctctctgtaccatctggcctgggagcctttctcctttgccccattctccagacaaacacttgtccccaaccccagcaaaagtagcaacctagagctgaggtaggagggaggacatgcaattggggtctatgtgggacagcagggtcatgggaacaactgggatcacagaaaccaaagaccaaaaccctgtctgaggaagtcccaggagggagacccttgccactcagtagcccacctgacccgcccacaggggcagggagactgctgctggaagcaggcccaaagtgcacaaggggcgcctgtccaggttatcaagtaccccctgtccattatttctggatcctcacacagtaatgctgggaagggggaagggcaggtatcattaagcccatttttcagaagagaaacagtcaggtgaactgccttttttcaaatctacatgaggatttaagcgccagggcctggccccaaaccagtcagctctgcttcaagaccagagctctttctacccccaggtctgttcccacatggcagcaaagaggacacaggagaactaatgggagaagtgggggcctttattaaggtctggcagatgtggtggaggtggaagtacaaacccaggcctgggcctaggaaagggcagaagaaaggcaaagggtcccttggagcaggaacccatccctctctgcttatacccagcacccctcatcccaggttcctttcttcaacctccgcctgcctctgggaacacagagcaccaagaactgacaaaccgggaccctccagggccacagcgtggggcagagtccaggcttctgtctccccgcagtgggagatctggggagctcagtgaacctcctcaccctcctgccagtatgaagttgggaagcgccttctctgtcccccagaacagaacaaactcttgttctctgtggttggggaaaaggtgtggggggcttggacctaggaagaagctgagctgaattcctccagggcccaggtgaaacccccaggggagtttctgagactctagacttgccatttctccacttttccttcccaatgactccggtgagcagctcagagtctgggctagggcaactggtaggacagtggggatctgccccagagacatctgtgggtttcagatgaaggtttccccaacaccagattcatttatatgtacacagggcagcacccacctgcggcagggggaacagccgctgggggctagtaagagtagccacccttggggccaaatggctgggcggggccagccagctctgggaggtaggcggggctctcatccaagtgggacaaagggactgtgtcctcctcactgacaggccggtcaaactcagccttgagagctggacrctgattgtccgggaaggccaaagagaagagggcctcgggctcacacacaaacttgtacacgtaacgctcaccagccacctatggggagagagaaggtctggtcagcctggctagccgcccagcctttgtatggggtaaggtgggggagtggggaatgtggcccttctaccagtacaggcagatgctcggggcatttctctcccatgctggttcctgagaagctgactctcccttcacagttcttactcctttttcatctcaacttctccatgcttgggcttctcagttacagtgttgcacttttttgggggaggagaaccttgggattctccacaatttcttgtctctctgactgattcattatctgatcctacaaagttgctgagaactgccctgctgaccctctccccagtcagcttctcacagccactgccccccaccaccttgtccctagacccacagcccccaccttctgcatgatgcctttctcataatagtatcggagcgagcggctcagcttgtcgtaattcatggctggccggttcttctggatgccccagagcctggcgacctgggaacaaaacagttttggggtagagatgctaccttggcagaggaaaaaatgggggtaaggtcagaaagagcacttgagattcttggtgcaaagtgccaagctagctctgcaacaaagcatcagcccacagacttaggcttggcaagaattcaggttaggtaaagcaagaatcatgatggaggcacgtgccaccatttcccaggttctcccacctccaggctgtaaactttggaaaggagggctgggaacatccgagaggcccacctcctcaggctcaatgagcttgaactccattccccggcccgtccaggcaatgaaatgggcatttgttgggtcatccagcaaggccaccagaaattgccacagctgcagggcaccccggcgctggtagggcggcccctctcgaaatgcaccgaccccttcctgcttgatgtctcctggggaacacgaaaataggaggtgtggggtttgtgtcttttggtcccccaagcaaccgcctcccacccgagggatttctcgaaggggtctccccaggtacttttctatgggtcccaccctcttgcaacaatgaaacgtgatgtgactcctgcagggacacagcgtgataagaccttgaccctcccatcaacagtcacttctctgaccttcaaatttctcagggacaacgcagacatcatctgggaatggtcgcagaggtttctcatagccatagccttgtggaggaaattgggggttgctcagatctgggggttcaccgatgagaccccagagagtccagagggactcctggccagggagaccctcccccatggcagcgctccctcccccaacatggagggcttggcaggggaaggggggctgccttacccatggccccgtcacctggagagggcccagagaagccctctgtgtggaggtacattgatgcgcacccggtgacatctgtgggggaagaaggggtgatgtgagaagtggcttggggtggagctcgagggcaggggaggaggaagtcctatccacattcaagaatttcttccttccagcctgcttcctggtgactgttctttgcccaggttgcct

SEQ ID NO: 95428 - DNA, 18635 bp, Homo sapiens
tattataataaacttgaattatgagtgtataatgaattggaaatattattacagtcttcatgaaggcacccaataaaattttcttaaggaagccagctaatgccgtgtgatctgaaaggagttctattctgctttttctgcttttgccagcaacttgagaccaatactaaggtttggcagtaatggtctggtcataattgttaggtgacagttctgtggtcagtggtgggttgtgtacattaagtaaggactatgttctcggacttgttattgccacatttgttccaaggtctggaactccttcctgtacatttagaaacaattctattcccttaagaatgagcaggctttagtgagcagattttaccaggaagaaactaaaatgccagtttaccataatgcgagaaaactggtataataagtggatccaggtttctttagagggtctctttatggagagtaggttcactaagaaaactaaagtacacattttcaataggaatgtacttactgcctccttatgcaaaccatagtgcagacacagaaatgagcagggtcagggggtgggcttggggtcatagcacagggagtgacagtggacactgacgtgtgagcctccatcgtaagaacgctgtttttctgtctggagaatgaagctgaggtgccccctcccttgggctgttctaggaagatactgacagatgcctttgagttctcctttttctagctgccatgttgccccaaacctgatttccatatctcagcctcagcgctccaccgtcgcaccgcggcagattcagcgtgctgcctcacgttgcagacgttctcagtgggctggtttctaattgcctccgggaaaagtttttgtgtctggcagtctcctctcatccatgatatgtgaataggcctcctttctgacctttgcttgtttcctctggtttttagaaaacagatttttggttcaaaatattgtaacacattttttccttcaaataaaatattgatacacttggtaagaaattcttcctcctctgattcctagttctgaatgttttacttagcttattggtgcagcaagaacgaaaacatatgtgcaagaacattctgtagttgatcctgtagagaaaacaatggaacttaaatctactaatgtaagtcttggctcccttttgtttcatttcgaactgtctggctgagttctttgtccctctcctagttgccgtagaagtgagtgcgtgttcatgatgtggttcagagaatccctgcttatgtgctggcctaacttggccctggatgttgcttccttacccttcctgctctcatgatcttgcctatctctaaggggatagcactcaataaaatgagtttgggattatgtgtattatcattattatactttatttcctcaactttgctttttaaataaaaagtaggcagtgaatagtttatgcaataatagcagcggtttatttgttgttttgtatgtttagtaagattttggcttgtgtgttgattttagcaacattttgaatcttcagttccaaaatgatttgatcttttttttttttcttcattctgtagatttcatttacaaacatggtttcagtagatgagagacttatatacaaaccacatcctcaggatccagaaaagtgagtaaaaaatattttaacaaatgtatcgtaaagggtgtttaaggtttttttatcaagttttttgaaaatgaaagctgggtcatctgaacctgtgtgaatatgttttgttccagaactgttttgacacaagaagccataattaccgtgaaaggagttagcctcagcagttaccttgaaggactgatggcaagtacgatatcctcaaatgctagtaaagtaagtgaggctgcttcttggttattattccctggttcatttcctgggaatggaatggggtgctgactgcatgtgtgtccttgtaagctgacccttgcccattctaccataggaaactgcagcacgttgggcagttacttacaaaggctctgggttcacatccaagctctaacttttagccttttaaccttgggcaactaagttaacctttctatgcctcagtttcccgtttttaaagtggagattacccgttttacagggttggcgtggagtgaatgagataacatatggaaagtgtgtagcctgaggcccagcactgaggaagtgctcgatgatgtgtagctgcgtgtcatttaaggcactgtttctcaaccttttttcactgttgtctcccccacaactcgttttagacattttttccctaattgccacctccattaagtcatatatcatatacatatgtgtgggctttatacataaaagagggagattttttccatccccccaagaaccaatttttgcttattgagaatgcatgatctgaaacagtaagtttagagaaagatgccatgcactgttacataacacatggtgaatgtggttatcaagagatactcatggatgccttctctgtgccatgcagagtgctaggctagacagggtatacagcagggagcaaaacaaatgtggtccctgcccccgtggaactaagaggcaggtgacattaatcatacagcatgtaattaggaaagaaaaggtacagaaaggtatgagagtgcttattgagtgttcagtaactgatgtttctgctgactgccaaatgggggcaggtggattgcgaggggtattccaagaagagtgttctaggtggaggagctgcgtgtgcaaaggccctgagacaggaagtagggaatgctctgtttttcaaggaactatatagaacactaggagagaaggggtgaggagtgagttgaggaccagatcctgcaggaccttgcacaggattttggtttaaaatgtaaagaaaagggatttgaccttcttgcccctaaaaaggggaccactataatcatgaaacaaataagacattctgtcatttaattgtagattcatttgagaacatcttttgcatacaaagtaaaagtcagtttatggatcaagccagttgctcaaggcatttgatgtttgctaaataacattagaaaaagccaggacaaaaacgatctgtcatcctgagattgagttaaacttgtcacgccccttgttacttcctggtgtgtcattagttcgatatatgcctttgctctccctcagtaacaataaatgtattggattttttttaagggccgagaagcaatggaatgggtaatacataaattaaatgctgagattgaagaactgacagcctcagcaagaggaaccataaggactccaatggcagcagcagcgtttgcagagaagtgatcgtgacagttggtagacaacatcgggtactccaggtctctccaaactgactatatatttatttgttattttaaaaatacaactatattttgggtagttttttttttttttttttttgataagttggtgtaaggctatgtgacttgatcaaaacagatgcagggcctctaaataaaagggatcatctgaaattaatgttgtttgaaattactatctgattttgagggttccagtatttctgtgaaaattcaacaagaactccttggaaactggtattgatattcagtctccttaaggtagatttttcaagcttttcatacattggaactccacctgactttggaccaaccccagaacagagcagagccacctcctatagacgcccattgccctgctgctgtacacttcagcagcttgcacaagggagctcacttaaaaggagaaattgtgtagttttaaaatatattttgtgtaaaataccttactatgctataaaccaccattaaaaaccagtgttttgatttggtacttaaatatttttggagtgaaaattatcactaaagtaacatgactccaacaaaagtatggtttcattataaaagagtactgtattgatttgcccaagttttgtaacttagtaaaggtattaacttccttggatttgtactttgtgatttagtatgctgtatcgtgggctggttatgttaactgaaaaaaataaagtcattacctgagttttgcagtgctctaacttaaacagaagaacagctgttcacatcttttagcattttacatttgcctaacttaaaaattgccatgtgtcaaaatcatggttttgtaattgctaaggcatgatatgtcaggttatttgaatataattactttttgaagtaattgtgaccacaaaacatcttttttacatgaaggagctgtgtatcatttgaaattactcaaatgatgtcttgctctgaggcataaatcccaggtacttagtgtttttaataatatggtgccactgcaggatttgggggcggtggggaagaacaagcataatggtagggggaggcttggcctgaaactaaccactgagtgaattgcactgcaggttttacttaacgggaattccttatttgggatgtcaagagggcagctgcaaactgaaaaacaatccagtaaatgtactttgttttatgtattgtagcaggcaattaactactaaataatagctttgacatttgcaattgttgcatagagactatttttgctagaagatgattagctcttgcctttattttacagtgcttagtgtgataaacttctagtcatgtttcctatccaagagaccagttaatatatgtacataaaccacagaaatagtataacacactatttttaaattatcgttttcctacttaaattttgtttagcttaagacttcttaggacatttgtaaaagcaggttaaatttaataaggtttctgatttttttttgtaaccggagatagtttttacaagtgaaataacatttcagctaaataaaacatcgctaaataattgatatttgatgaaaatctgctttgtataatttctgtaaattatccttgttctgaaaaaggtgtaatgccctaatatttttaaatccttatcctttgattttttaaaaactgacctattgataaaactataaattttcattttccagtgcagttagttacctttttaaacataaatgcacaacaagcaaatgaatttaagagaactaaactggaataagtgttcataaatgaaacccttggactatttaataaagttgaaatgtgaattaaggaaaacttttgttaataaaaactttcttttaagtgatgtttttcctgattataatttctttttagtaattaaaggtgaagggcaaaggcttttttttctttatgagagaaacactttaattcctagactgtgagccttcactgcgttgggttagtttctctaaatcacaggctctgagatgagcattttcccggccgcctggcagttccctgtgcctccagtgggttttcctcacatttttcttcccatccattccgggcaacagtgacaactgttgccttaccctycgtcttgtcgcacatcggaagcaggtcctagaactacagaaaacgctagggggtcctccactgggtttccagggtttagtgtcactccgagaaagggggtgccctaagagcctttctaaatctcagctctcaggacacgcttgtctgtccacagatttaaaaaagccggcgccgtttccctgaagcgggcgcaaagccaggccctcggggcggccgtgcccgcgccgcctcgcgtcctcgcttcccgaaagcacgcggctcagtggtccttagcgagcggggacaccccggccttcttgccccsgtcgtccccgccggggtaatacggaaggtcgggggacacacgccccgggagctcttggagccaataggtgggcgcggccggccggcccgccccgggattggcacccgcagtccagaccgcgcgcgcccattggctcccggcgccggggggcttccgcggcagggcagcaggggccgtgctcaggggcggggccgggtaggaggcggtgattggcaggtccgcacgccccgcctcttccgcttctgtggtctgatcttcctgcggctgaaccgcccggctgagccgacattgccggcgtcttggcgattcggcccgacgagctccgctttcgctacagcatggtggcctactggagacaggctggactcaggtaggcccaggcctccagagggaagggcttcgcgagccggcccgcgcgcatcccggtgcccagaggtcatgcaggacacagagcagcggccccacgcgtgaccggggttgggccaagcctcgggcgtcgccgccaagatggcgtcgctgtgggcaaagcgctcaggcgggcgcggcctcgacctcgcgtgggagcgcgtctgtgtcctgcctcgcttcccgacggtgcggccyagcacccacagagtgcccctggacacctttgtgaatggcaggtttctcgagagagaggccagctcttattyagcaaacctttttcttctagaatggtgctggagccaggtggtgaaagtagtacagtcacatccacctcgggaaacaggagatttctctccacgtgaccgccgttagcagctttgacctttaatccagcatcgaggtggagccttttacaactttacacattttttttttaaacttttaaatcctgttgatttcaggtttccttatgtctaaaaggggtgaaagccataactgtcgagagcccctcacaaagatgagaggtggctcctggaaagctcaaatatggaacccacttgaggacatggtgtctcatagtggaaccgcaaaccattggtctagctgtcacatccgatttttttttacccgtgcacctgagtgagcagaagtaccttgctctaggtgacacaccttgttagttgactggatggtgtagcactttacattttgtgggtacactacagcggagcttcccgacttgctgaggtcaagccagcgaagtcttgtagaattggaaggatggaaggatgatagtcccagtagtagataccgtttattaggcaacctaccctgtgatccatactttttcacacttgtttttcctcctcccagctatcagcaggacaggtattattgtccttttattctgttgtttttttcaggtgagtgagtaaacgtgctgaaaaggttgaacagcctgaaggtcacccagttagtaagaatggaagcaggcattggaactcatacctctgagtccccaaaataaattctaaaacatgagaaaatagcacccctccccgcttcctgtttttcaaaagtgggaaaggtgatctgacatcttttggaaactacagtgttgatgggagtccatctaccaaacaggaagcaggttttacagttttgctagaattgatgatgttctctaagcacttttcagtttgatttagaaatcttcattaggaggttattttcagtggcagacttgtgagacagaattcagtattctcagagaagagtttaaataatttagaacgaattgttttaattcaaaatagttttctcttatgtatacctcattttccaagaataatataattaaagttttaaggagagaaatcgaggagagaattcatgattcatgttatagtctctaaacatttcagtctctttttttctatgctgtgggatttttaaaaacatttatgcatctttcattttgaattaatatacactaaagagaaaacacagtacaaagaagaaaaatcaaagatcatccatccaaacaccagttaatactttggtacatttttttctagttctttttctttgtatagatactttttggcattagtcatatttttaaatccaattctacaataaggtacaaccaaaccaaaataaaaagtacaggaagaaaagcgaaaacacagtaacagctgtctggctggaatattgataattaaccatataccttctctcattttctcccagctacatccgatactcccagatctgtgcaaaagcagtgagagatgcmctgaagacagaattcaaagcaaatgctgaraagacttctggcagcaacgtaaaaattgtgaaagtaaagaaggaataatctgtaagttatggatttatttagaagaacagttgcatcttaagtttttggagcaccataaagatcaaaataattttagttttgggttctattcattttttagtcagtgtatttggaagttagttattgggatggtataatttaaagcatgcaggttatagaagtcccctggcctaataaaaagaaagtcttcttgggccctgacaagcagaagtaattggcacattgattttcagttcatttagcaatgcttaggtagagagccatcgtatttgaattaaacctgtttcatttgtctgcacaaatcaaataatttggaggatgaactccccacttgtataattgcaattggagttacataacagtccaagagcatgaaaaactacagttctttacatttttatttcccccacaaccactaatgttctcacaaatcactacttcccgaacataataactacaggcacaggcaagggtcctgctgttgtatcaagcaataaaatctgcaagaccccgcagcgaatactgttttgctaatttattatgctttcagagggtttggttcattttacttttccaaagatgttggtgatgtaaagttaaattctcgtgaaataraaaggtctgtacagttgataagtgtagacttttgtgttccacattataaaagtggtttgatctctaaagtactttcttgacattgttatttcaaaagtaggcaaggcaaattatcagagagatgtttttcagatttaatttttcttgttttgcttttaaaaagcttcagacccataatagcacagaaatgtgataaatattaatcctttggcagcttatggttatgagcaattttacttattggaactgtctcccctaagcacttttcattttcattttgaattagtaaatattttattacaagtctggagatgcagtgttttgaatttagccctttttctaggggctctctgtctaatctcataattctgagtaatgagacctggttttatgttgggtkgttttgttttaacagtaagctaacagaaaatcatttagcctcactcggctcagagctgccagactgcatctaatgctgagattttgcaaagtcctgggggtcaggaagtagtgtccgatccccttaaacaaagcattagcccctctctgttatgcccttcagggttacagaccccacctcattagcacaaggagatgttagtgtcttttaaaggcaaagtagtttctttattctgggagagtgtttacttttactcagcaggaaaatgcctgcttgactaagcctgtgtacttgaaccagcactttttacatctgagccacggcaatgtgaatgatagccacagttatacagttcactataaggaagttatttcttatattcatgttgagtttttaagaaaacacagagaactagccagcaacttgcattttctttttcctcctagaccctgactaaagcttgaaatgctacatttccaaggtgaagatgtgtgggcacatgttatggcagattgaaaaggatctcattccatgggaaaaaaaaaaatcctgtcttgttcataaattgacaatgtcaataaattgaaatatggttcactgttactcttgattttagtttgtgagactttttcattttctttaaaggaactgtctgcacagctgcatgattatggccatgtgaaccagggtttcttaaaagcaggggaagccagatttaatatttagtgaccaaagggatacagaaagcattttgaaaatgtctcaaaatagttgtttcatgacattaattggtgatcaaaattatctgctgtcattgaggcttcgtagtcccttatttttgaattgttgtcatgtcagaataatgacatggttatcagtaacaaatggaaataattattaaatactaaaagtgtagattagaagaagaaatactaaattgtacttgttttgtattgtgcacttaaagcctatagataagaacggttacagaatttaagcacaaagtgtttttcacattgttttgtaaatgaatctttatactctggtagcatttctcataggaaatgaggcaaagctattgaataacttgctcattgagttgatggccaaactgaaattaaaacctaggagttttgactgcaagtctgggacacggtgaccacaacagcagtttcgtggtatttccatagtgattcattcattcattatttagggatgaaaaattgttgcaagttatgtttttatctttctttgaaacttgaaagggcttgggcaagtaaaacaccattgcaaagttaactgcctgattttaactgtttttggagactggagaaataaatttgaactggaaattttgamacaccattctaggatcagttctcacatggtacttaagctcacaatgatttatcagggccactgtcagcaatgccgaggataagccgaaaagaacatctttgttctcggcttctgggaatgacttattgtcccgacacttgacctgtaggttttactgaattctcagcacagagcgagcagggaggcagagccrattgagtggaagagggtgcctctggaaamcagcaggttaggagcccttggagtcctccgcctcggagctgtcatcctgctgttggcaagttagggcacctcagttcagtgctgtggcccccaagattaaggtactaggaagtatcctccattacagggaacaggaataaatgaatcaaaaagctatcgggcctttttgacatgggacgaataaagtaactaataggcaaaggggctaaatgatttccagtcaagtaattagagataagtcatttattaaggaggcagatggggtattattggtatatagatggcatagtagattgctagtatattggtagattattggtatatagatggtatgttaaggaggcagatggggtattactggtatatagatggtatggtagattggtagtatattggcagattattggtatatggtatgttgaggcagatggggtattactggtatatagatggcatagtagattggtagtatattggtagattattggtatagagatggtatattattaaggaggcagatggggtaattagaggtgagacttagggacagggcttgtgatatggaaaggagtgaagtcactgagtaaaagacaagtttactgtcagcagagattcttagaggctcttttctccgtgattaaaaaaaaatcctaaaccagtagtataataaacttcctgcctccagcagtgctgggtagctggcaggatgactgtgcccagtgatgaggtgaccccagtcagaccaacttaatgagtatcccactaaytagttggatgatgtttgaagctgtcagttaatctcttagttcacatcgttcttgtgagcaaagtgaaggaatcggataagctctaaatttcggtgatgctgctgctctgagagaccaaggtcgctggagcaaccgtactgctaaaggataagctcttcaaaatcaaaagggacagatttcttaagtttctagtttgttttgtgtttttacatctatttctaccatacgaaagagtaggatggtgagatgcatttctaaatatttttaactactcagtctggatggttaggcttcaagaaaaggaatttatttagtctgaaataaagcaattttgccatttaaaattgaattactttgtagtttaatgattactattgagcaaacaaatctttacagtaatataagtcagcaaaagttttttaaaaggtttaaatccctccttccttacatctatttcattgcttttttaggtttgggaagtaaagcaccagaggaagcatgtgtaaatccttgtataatcgcaggctgtaagtctttagcatctcaggaagttactaacttcaaactaagtatataggtagagtttcttactaaatctagtgcttcttgaaccacaagtagaaagcatttaaaacatgaatgttgttttgtgttttttgaagtttgtaaatagaagacttgttgatgatccgatggcaaggtatttttctcttggtatgtattttagttatttcctcgtgatgcataagtgaaaagagtgaagtttctcagaatgagcaactgtcatccatctacctgctattttattattgctgattacaaaagcaaatcaagagatgagaacccagttgcctgcaagtaaatatttactgcattgagggtcggagcattttcccattaccggttatccatggatcaaatagtgtatctcagtggtaattctagagggccattaaaaccctgatggtgctggaagagatggcagtgctgcatgtcagaaataggtaaactgtaattaagaagttacagatgatttgattacgctcttgtgtatttggtcctgttataatgtgagcagattaaaatcatgtagtgcttaaagctatgtcattatgcaaacatttatggcaacttctgcaaattaatttgaactgtaaaagttccctaatgagacgatgtcctccataactgagaaggacactgcagccattgctgcttaattcctgcatttgaatggttgccgagcgcatggtgtgccctttctcaaagagcagagaggctgcagagcattttggggggtgatgactgaatgaaagtgaaaagaccatttcaaaatagcctttaaaaggaaagccaaggatgattattaatgaattcctgggatctaacagtagtaagaaatttaaactatataaacatatatgttaaaggctagctcttcagaaataaagatcagaagactgcagttctttagttttgcttgtctttttgtttttcttgtttggaccaggtatttttgtggagaggactgtggcttttcttttttcctcttttccagttagcatgttgtatgcacaggtctacacaacatggatatttctagtggatgttgactcacattgaccttggctctgtagctccccatgtactagtcaggcacctggctcttctggaggctggcaggcactggaaagcaggatgccagtcagtgtttgctcagaggaaagaacctaaggaaagagtcttagtagccctcggataccaagtgaggattccagggtgcctatcagtgctgctaaagtataaaaatgtaacaccaactccagtggctccctgcaaatccacacgtgtagtctggatgcctggcaaacactttgaaacaaagggagcactttacaataaatttgctatttttttaagttaataagtatgcactgaacatcaaactcttcaaggttagtagatgtcagcaaagaccctaatgcctgtcagctgctccccacctgtctccctcagtccctgtgtcgaagctaatggtgagtgcatatcattcactgtgctgcagtgcagagtgggttttggagtgctgcaggagaaacactcatctaatgagaaactgttctgtaagcgactccgcggcacagcttctctcacagttaatgtcccttatcttctggctccatttctgcctcctccgtgacctcttcrtcttcctctagaactgctttggcatcttgaaattgttggtactcggataccaaatcatggatgttattttcagcttccccaaattcgtttatgtccatcccttcgctggtgtaccagtgcacaaaagctttccttttgaacatggctgagaaatgctcagagaccctattaaagatctcttggatggccgtgttgttgccaatgaaggtggcggccatgctcagcccccggggcgggatgtcgcagacagccaccttgacgttgttgggaatccactccacaaagcagctgctgttcctggtctgcacggagagcagttgctggtccacttccttggtggacatcttgccccggaaaatgcaggccactgtgaggtagcggccayrgcggaggtcacaggcagccatggtattgcgggcatcgaacatctgctgggtgagctcggccacggagagggctcggtactgctggctgccctgggccrtgagtggggcaaagccgggcataaagaagtgcaggcgggggaaggggaccatgttcaccgccagcttgcgcaggtctgcgttgagctgacccgggaaccggagggaggtggttatgccgctcatggtcaaggacactaggtggttgagatccccataggtgggtgtcgtcagcttcagggtayggaagcagatgtcatagagggcctcattgtcaatgcagaaacaggcatctgcattctcaatcagctggtggatagacagaaccgcgttgtagggctccaccacmgtgtccgacaccttgggagaaggcatgacgctgaaggaattcatgatccggtccgggtactcctctctaatcttgttcatgagcagagtgcccatcccggagcctgtgcccccgcccagggagtggaygatctggaagccctgcaggcagtcacagctctcactctcrtgcctcaccacctctaggacattctcgatcagctcggctccctccgtgtagtggcctttggcccagttgttgccagccccagagttacctgtggccaaaaagagaaaccagcaggggaagaaaggtgaaaagagaagggcaccagtaaagcatccccccctcctcctggtggaaccttctggaaaaacataccatggacaaaactgtcgggttgaaagagagctcctaatttgctagatcgaatgctgtccatcgtcccaggttctaggtccaccaagactgctckgggcacatatttcctacctgtgtagaaaaataggaaaaagtcagcctacttgtttttctaaaagttaatgttttatcaaaatagaactttgtgatactggtccaaaaaaaatcatggatattctagaaaggggcccttggtaggtcgagatttgagtatctaacatcatattttttaccccaacaacaatcccacaaatctatagaatacccagaaacaatctccatcagtctgctctgtgatattgccagtgacagagattctcttccttcatattggaaatgatcctggtttcatttgtgaaaccacaaaggaaagtgagtacttaacctgcttgtgttaaggtgtgtgccatatccagcagctccttccccattcctgcgtcttgaccagggcttggggacccaccactctaggatcctgctgccctgcctgtcgcctccctgagcatagacatcactgctttgacatttccatctcctgggcctctgcccttcctctgcttgtgttcccagttgcgggaccactgctcccagagccccgccagtcctaccgtaggcttcgttgtagtacacgctgattctctccagskgcaaggccgaggccccgcggtcgctcccagccaagtcgatcccrtgttcctcaccaatcatctcccagaactgaaagcaggaggaaggtcagagtaaacggaccccgaaaaaggctgtgttaaccacagagaaagttagcattcccaagcctgtttccctctggttgcctgaccctccccaagacattcttttagggccttttcataaataaccatggcatcattcgctttttgcctctactaagcaatgtgaagtaatatgaagattgcattttctccccacctgaactccttaaataaaatgtcaaacacaaagtactaaattggattttcctcctattaaattcatgccattatatacattaaagctgttgttttagaatttaatgtcaatatagctctaatttctccttataatgctccaagctagtaaagtgtagattccattaaaggaaaataaactgaattcttatctgatttcacagtaataactcatttcactttggggatttcttttcatgaacttttccaaacagcccataacttggacctctgtgcatgattttaagtaattagcgccttttttttttttttttttgatggagtcttatctgtgcagtggcgtgatctcggctcactgcaacctccgcctcctgggttcaagcgattctcctgcctcagcctcctgagtagctgggactacaggcacgcaccaccacgcccaactaatttttatatttttagtagacacggggtttcaccatgttggccaggatggtctctatctcttgaccttgtgatccaccctccttggccttccaaagtactggaattacaggcatgagccacagcacccggcctttctttcttttttttatttttttatgtttgtttgtttgtttgtttrtttatttattttgagacagagtttcactcttgtcacctaggctggagtgccgtagcacaatcttggctcactgcaacttccacctcctgggttcaagcaattctcctgcctcagcctctcaagtagctgggattacaggcgtccaccaccatgcccagctaatttttgcatttttagtagagacagggttttgccatgttagccaggctggtctcaaactcctgacctcaggtgatgcacctgcctcggcctcccaaagtgctaggatcacaggcgtgagccactgtgcccggccagtaatgtgcatttttgattgtcaggtatacatacaactcacaattacacatagttgtcctctggtaactatttgaaacatactgcacttccagtcacatacacagtacttattaatatagatatgtgccaagctcttaatatggaaacagttactgggaagactccttttgatcaccctgaaaggcacatattaaaatgcaatgaaaatgtattcacatatattaaaatccccaagggtatgttaaaaaccccagccatatcttctaaatgacagtgctgctctggccatggtcttaataacaaggcagttcatggtaaactgccagcactgttcagggagtggaagaataaataaattcaagttctaagataccccaaattaaatgtgtcttaaagttcttatatctctaaatgatgagtcagccaggactctcaacgctagaccatacgattccagagtgagagctaaaaccctatctaaacctaacactttctcttgagggcccctttccgtattatcttccagcttcagagcagcagggctcctgcctcccacttctctgtgtgtgagttatgaatgtcttacccctgaggcatggaggaatggtgacttcttttcaagcagtaatgttccttgcccccggtttaaaacgcctgcatttaaaagccttagttgtttcctggcagcattactcacagtagccaaaaggcagaaacaacccaagtgtcattgatggatgatgaatgtaggtgtttcaaaacctcacttttaatgcatctcatattagtaaaagtaatttcacagcagcaaagagaacacgataaattttgcacggtgcaattggtcatcttaaaatcaagattggagattgtgggttcgggcatctgtgttcttggggttggccaattaagttacgtacttgggggaaatttttaagcaggggggcaagggaaagaaaaactcatttatattccagacagtgtattttaattaattatgttactgtacacaaaaaacttttattttcaattaaatttcttaaattttcaattgcatactaataaaacagtaattgattttttttaagcgttacaataaacatgagaggggaggggaaagacaccatagtgacagggtacagaaagtttctcaaaaaacttcaaaaagctgttttgagacaaattactgtttttagatatgaaaagttcattgttaagataaaagtgggccaggtacagtggctcacgcctataatcccagcacttcgggaggcccaggcgggcacatcacctgaggtcaggagttcgagaccagcctgaccaacatggtgaaaccccatctctactaaaaatacaaaattagccagacgtggtggcgcatgcctgtaatcccagctactggggaggctgaggcaggagaatcacttgaacccaggaggtggaggttgcagtgagccaagattgcgccattgcactccagcgtgggcaacaagagtgacactccatctcaaaaaaataaaagatgataaaagtgccaggcacggtggcctacacctgtcatctcaccactttggaagcctgaggcagaaggatcacttgagcccatgagttcaagaccagcctgagcaacaaagtgagatccctgtctctcaaaaaaaaatttaaaaattagccaggcatagtggtgcatgcctgtaatcccagctactcaggaggctgaggcaggagaatagcttgagcccaggaggttgaggctatagtgagccatgattctgccactctactccagcctgggcaacagagtgggcaaagaaaaagatgataaacgtattatgtaatataatggtcggcatgtattgtacatatgtatctatggataaaattaacattaattaaattaacactctaagcacttaatgtgtgttgtagctctttagttaaagattgtttccttcttttcccatgtgaaatttttttttaagaattaaagcccaaaggcattg

SEQ ID NO: 95429 - DNA, 13621 bp, Homo sapiens
ggccaatcagaggacgtccaggagagggggcggtccgtgaggcgagagaagggtggtgcgagcccagctctagcccgccgggctcgcggcggccccggctttgtctgcccaaagagtggggcgcgggcctcgggcaccgggcgccgcggagcagacaaaggatgcgccccgcgcggcagacgccgggcctagtcatctgctccaccgggctgcgagcacgagcggggggtggaatcagcactcgggagcatccccgccctcctgaacaatggggcgccagcgccgcaccccagctcsggcggggaccgcgcgggaaccccgcgatgggagagggcrgcggcagcgacgatgtagagcttggcatgccctctgctgctccagagagcctggtcgcagccttgcgaggtctctgccgccattcccatttcagagatggggaagctgaggcccttgctgagggcctccctgaaccgagacccacgccctcaccagaaacctgctgtgggccaggtgttgtgccagactggacaagggggcgggaccgggcggtggagacccctgagggcagaaggtgcaagcttcctgcgtggaggagacaggctcgcaagcacacttacctaaaccccgggaagaataggatcagacagggttgaacctcaacttgatgtcttttgctgaatggttttgtggcctgagcgcggttttttcaccactaaaatggagatgataggacacccctcaccccccacccccctcacagagctgttgtgagaattaagtcatggacgtaaagggcttagcccagagcctggcccactgttgtaaccctcattaatgctaactattctcagcatttgcgccagggcaagcccaggattagaaagcagccccaggccacagcccttcagtgcccccagagcctccggctggttgcaggggttggggtggggctaatagycgagcttgaccctggatgacactaaaccctgaatcaagctggaattcgggcacgcagcctcgcatcatccgcccaggatccagagctaggtcaggcgctgctgcttcggctcagcagcttccagaggaagccaggcagggcgggtttgtcatctgatggggcttaattcaagccccactgctaacccaatcccggcctcccctacgtgatgtttggctttgtgcatggtttcccattagtcattggtcttcaaccagaccagcaggatgagatttatgtgtgaacccgtgtatgttaattaaagcatgcatttattttcctgcatgagtagtgggtgggggaggctgtgtatgaatgcataaacatgtttgtgagtctgtgtgtatgagtgttgtatgtatctgtgtgagtttatgagtatgggagctagtatctattttcatatattgtgtcttaataatctgtgcatgtgtactggtgtgtgtttttgtgtattttctgtgtttttgcatttgtggttatctatgggtgtgtcttgataggtctatgtatataagacagcgggaatgagggagaatgtgagtgttctgtcttcaggaccaatatttagcaagcactaaccaaggttctatttttactttgctttgggagggtggacaggtcatgccagtcccccatattcccttgctgaccctccctggcccttcaaaccccaaccaaaatgtcacattctctaaaagacattcctggatttgagtgggaattaatctctcccttctcatttccccaccaccccttgtttatgcattgattacagccctgatctaccaatctacctctccgttgcctcttcctaaaaggattaaggatggctttcagaaatatatacaacaggataaattgwattgcccacatggctttattacttctcataggcatgcatcagccttaatactagaacttgttatttatgtgtctgtctcttacgtcagatgttctccctgttctgagaacctagcaggggcaacacatgtaagtgccaacccatgctggttaaattgaattaattgaggtcttgtcgtgcttgtgggaggagcttgtgtctttagagtcagacagacttgggtcatgactgccaactctgtgaccttggaggaaacctttcacctctctgagcctcagttttcccccccacttttttttttttgagacagtgtttcacccttgtcgcccaggctggagtgcagtggggtgatcttggctcactgcaacctccgcctcccaggttcaatcgattctcctgcctcagcctcccgagtagccgggattacaggcacttgccactaggcccagttaattcttgtatttttagtacagacggggtttcaccatgttggccaggctggtctcgaactcctgagctcaagttatcctccggcctagacctcccaaagtgctgggattacagacatgagccgccgcgccaggccacttttctcatctattaaatggggccaataaatagtctctcatttgttgactaggattgaggagaatgtttttacagagcctagcacacagacggtgctcaagctgtgtaggttcatatttttgttataccattgctaactttgagacttgttggctgaaggaccagagcagaaacccctgccccataagttccccatcaggtgacatggcctgacacttgccctacctgatatttccaaatgatatctgaaaaatgctgggttgrccctgagctttgctgtatcagaggttctctggcaaggggaaaaaagctgatgcagcttcttggccaggagagccacagagcaaatgactaggagaccttgtcgagtgattcaggtcagctctctgccttaggcaaggatcatccatgccggggcttttaagatgggatattagcctgtcatatgtatagaaaatattgaatttttttgaaagataccagtaatttaaatgtgttaatgtccattcaacatttaatttttaaatttccttaatcttaaatcttccttaatctctaaactacaagatgactttcttaggaattatgtttgtgtttaaaaattggaaataccttacatatctgtcatcaaagaaaggtattattatacctgttaaatttaatcctagaaagtcattgtaagtgtagctatgaagacagtatagcaaatattaatagtaaataattgagctcatagtctatgctagacactataccaagagctacatatgaattgttttgtttaatcctaaaaaccccaggaaataggtactattatgtcttagtccatttgggctgctgcaacaaagtactgtagattgtggcttgtagacaacaaaaaatatatctctcccagctctggtgcctgggaagtccaagatcaaggcaccagcagattcagtgagctccctgggtgtcctttaaaaggacactaattccattcatgatggcgctgcccttataacctaatcatctcccaaacgcttccaaatacttttacatggggagttaggatttcaacgtgtgaattttagggggacacaaacattcagtctatagtctattattatctgcattttacagctaaggaaactaggtcacaggttaagcaacttgcccatggtcacttagtaaataatagagctagaaatcaaactgaggctggctggctcccactgacacccttaactataaatggaaaatcctcataatggtaagaagaaaagaaaaaataaaaattatagctgtgacactctgtgtaacagaacattgactggcacttttcctatttgccccagaactgtagctaaggcccatgagacctggagccaaaggcttagggaaggaccacagaacagcaggggtcagagtgggccttgttggagccaatgtgcagcctgacttttctcctaggcaaatgaggtgctctaaagggccccaactgatttctcactttattagtcagcacckagcacagtgtcaaatacacagaaatggctcaagaattgtctgtgagccaggcacggtggcttatgcctgtaatcatagcactttgggaggccgaggtgggtggatcacaaggtcaggaattcaagactagcctggccaacatggtgaaatcccgtttctactaaaaatacaaaaaagttagccaggcgtggtggcggacgcctgtaatcccagctacttgggaggctgaggcaggagaattgcttgaacctgggaagcagaggttgcagtgagccgagatcgtgccactgcactccagcctgggcgacagagcaagactccatcttgaaaaaattttttaaaaaaattgtctgtgaagtcttatgatgtggcagatgctgttccgggagttttatattcggaacacgtttattcctcaaagacagggctgtcatctgcacttcaaagaagaagaaactgagcctccaagagcttaagggacttgcccaaggcccttgtgactcaaaagcccaggctcttctctatacactacagtcgttaatgtggccgctatgtgttgcacatactaggaggtcagtgaacacatactgaaggaaaggacacacatgcaccaaatttaacccttctgctagaaaagcatttaagaaaacagaagctttgggagtgagaaaagaaggtataatgatatgatacataggggctcagcaaaataacttcatctcccagattccaataaaacacagacacctttcccctttctggtttcattgaaacagcaatgctgacatggactatttctaatcctgctggaggctggcctcctatcagatgtggctaaatgcaaggtttggcatcttctgcagacaactgtaggattactggggccactgttcacaaagtcggcccagcaaaggacactaacagacaagccacagaaaggaatacaaatgactaaaaaatatgaaatactgcatatgcaacttgagtaattaaagcattgcaagttgagataaggagttgccatttttttaacctattgatttggcaaaaatttttacaaactggtaatacttgttatggtctctcactgttgatagaaatataaagtgatacaacctttccagaaagccttaaaagtgtttatactctttgacccattatttccactttttttttttttttttgagacggagtctcactctttttgcccaggctggagggcaatggcatgatcttggctcaccgcactctctacctcccgggttcaagcgattctcctgcctcagcctctcaattagctgagattacaggcatgtgccaccatgcccagcaaatttggtatttttagtagagatggggtttctccatgttggtcaggctggtctcgaattcccgacctcaggtgatctgcctgcctcgggctcccaaagtgctgggattacaggcgtgagccactgcacccggctcattatttctacttttaataatctagccaaaggccaggcacaggagatcatgcctgtgatcccaacactttgggaggcttaggtgggcagatcacttgagcccaggagttcaagaccagcctgggcaacatggtgaaaccccgtctctactaaaaaaaaaaaaaaaattactaaaaattagcatggtggtatgcagctgtagtcccagctacctgggaggctgaggtgggagatcacctgagcttgggaagtcgaggctgcagtgagccatgatcatgccactgtactccagcctgggcaacagagtaagaccctgtcccaaaaagagaaaaaaaaaagaatctatccaaaggaaataaataatcagatgtaaatatgtatgtacaaaaatgttcaccagagtgttatataattacaaaaattagaaaaatctaaacagttaacaaaggattagttgagtactttgtgctgtatgatgtttctatgtagaaacactatacatctataaaaaatgatactcacctgcctagcactgcctgcccaacactgcccacccagtgcctgtccccagactatggcccagccccctttgcccttgtccatcaaaggtgccgccagcatgtctgacaaactgccctacaaagttgctgacatcggcctggccacctggggacacaaggccctagacattgtggagaatggatgccgggtttgatgggcatgcaggagctttactcggcctccaggccactgaagggtgcctgcattgctgactgcctgcaaataactgtggagacggccatcctcattgagacccttttctccctgggtgttcaggagcagtggtctagctgcagcatcttctccacccaggaacatgcagtggctgtctttgccgaggctggcatgccagtgttcacctggaagggcaaaatgaaagaggggtacccgtggtgcattgaacagacactgtacttcaaggacgggcccctcaacatgattctggatgatgggggtgaccttaccaacmtcatccacaccaagtacgtacccacagctcatgtcgggcatctgaggcatctctgaggagaccaaaaccggggtccacaacctacacaagatgatggccagtgcaatcctgaaggtgcctaccatcaacgtcaatgactccgtcaccaagagcaaaatttgacaacctctatggctgccaggagtcccttatagatgrcaccaagtggaccaagacgtgatgattgccagcaaggtagcagtggtagcaggctatggtgrtgtgggcaagggctgtgcccaggccttgcagggttttggggcctgcrtaatcatcaccgagactgaccccatcagtgcactgcaggctgccatggaaggctatgaggtgaccaccatggacgaggcctgtcaggagggcaacatctttgtcaccaccacaacctgtgtcaatatcatccttggccggcactttgagcagatgaaggatgatgccatcttatgtaatactgaacaatttgacgtggagatcgatgtcaggtgcctcaacaacaatgctgtggagaaggcaaacatcaagcccaggcggactggtactggctgaagaatgggtgccacatcatcgtgctggctgagggttggctggtcaacctgggctgtgctatgggccgccccagctttgtggggagtaactccttcaaccaggtgatggtgcagattgcgctgtggacccacccagacaagtaccccattggggttcacttcctgcccaagwagctggatgaggcagtggctgaggcgcccccctgggcaagctgaacgtgaaattgaccaagctaactgagaagcaagcccagtagctgagcacgtcccgtgatggccccttcaagccggatcactactgctgctgagagtcaggcctgcccttcactttccagctgctgtccttgctcaggccccgcctcttctccctaagagcaaatggcaccaactttgtgattggttggttagtgtcccccatcgatggggctggtcactcagtttttggcctctgctgcatccctaacactatatcaagtgtggcggggaaattgagaggcccctcctcaagccctggtcatgatggaggtacaagggaggcatccacaaggaaccatgagttgagtggtcttggaactgctcactaagtcagtccttccttttttttttttttttttttggtatttttggtagagacggggtttcaccatgtgggccaggatggtctcgatctcttgccctcatgcctcggcctcccaaagtgctgggattacaggcatgagccactggcgcccagtcagtccttccttagtttggaagttggtagtggagtcacaaagcccatgtaccttaccattcaggtaaggttcctggtctgtggacttataccgtgttcctggtctgtggacttatacccgtggtttacaggttcagtggttccccagcccatgacagatgagaaggagctatattgaaaggcaaagaggaactgttgtttgaattttcctgagagcctggcttagggctgggccttctcttaaacctcataacaatgaggatggtacttttagtccctgttttacaggggtcagaatagactgtaaagggataactgagaaaggacagagaagtgacagccagaggggctataaaaacataaaagcaagcatagatctgctactactttgtaacaagatggttcctatcacaaccctggttcaaaaagagaataatatggttttaatgttaaaagaaagcaggaaggtgggtaaataaaaatcttggtgcctgaaaaaaaaaaaaaaaaaaaaagatgatactcaagcacagtggctcatgcctataatcctgacactttgggaggcccaggcgggtggattgcttgagctcaggagttcgagaccagcctggcaaaatggtgaaaccccatctctaccaaaaatacagaaaaattygcctggcatcgtcgttgcacctgtagtttgagctactctagaggctgaggtggaagaatcacttaaacccgggaggtggaggttgcagtgagtggagatggtgccactgcactccagcctgggtgacagagtgagaccctgtctcaaaaaaaaaaaaaaaaaaaaaaaaaaaagatacttatgaaggaaattcttataaaattgtggaaaaaatcattaatataactatttatgccatgattcccaaattgtgtaaatgataatatgtgcagagaataaaataccaaaaggaaatacaccaaaatgttaacattctttttttctgagtgactgcattatggatatttaacttttttctccttcatagttttctacattttccagtttttttaatagtgagcacttattactctcaaaatcaataacaatcaacaacagaattcatttgaatctgaagatatgtctctgccaaccacatccctgacctgccttcatggtatctcaagatgatgagaggaaggaaggctcaagttgtaaacctacattaaatgcaaggcaccatccccaaacaatgaagctaaatgttgaaatcctgcttcaaaggccctctgatgctaaaataagcccagaaaagcatttgctgcagttcttggagatctactgaaggacgtcattcacagtgggcaccaagtcaaaccctcactcgtcatcagtgttggctgcaatacaaagaatttgaaccatttgggggaggaatagggttagaccttcacaaataactctatcccttaggttgctatcattgtaataaaggggattactgacaggtgcacagcacagagctttcccaggcatcatctcatgtgaacttggcaacaactctggaggaaagacgttgatagtaacaacaacaataacaacaatgatggagacttaacatttactgaatacttattatgtgtcaggaatcaattctaaacacttcacatacattgtgcctcttaattaaaaagcaaacacaaaacaaaacaaaaacagggacttgctctgtcacccaagcttaattgcagtgacataatcatagctcactgcagcctcaaactcctaggcttaagtgatcctcctgcctcaaactcccgagtagctgggactacaggtgcacattaccttttaaaatttttttgtagagttggggtcttgctatgttgcccaggctggtcttcaactcctggtctcaagcaatcttcccctcagcctcccaaagtgttgggatttcaggcttgaaccactgtgcattccccttttaatctttttagccttatctgtgaagtagaaagagtgattacccccactttgcaagccagtatgttgtcactcaaagtagtcaaatgacttgtccgagatcgccacgctaacaaacgaaagcatagaacttgtagtcatttgtttagacctcaggtccagatttccacaactgcctactatagttcctcaactttgagtattttttattgctgtcgttattagaggagacagtagtttagcagtaaagaatgccgggttcaaatctggtctttctagctgtataatcttggacaagtcactttagctctgtgtctcaatttcctcctctgtaaaatggggatcataaaatttatctcataggcctcaaagtcaaatgaatataaagcattgagccaaagtctgccccataatgaacactcaaaagaccttggtacatgtctgattttcctataccttgccttctcacatagtcagtcaaggtcaggagggtacaatgtccttgtgttcaatgcccagaacttctagattttcagaagagtcatactctctgatttccatggcctcagcccttttgaagagcctcctttgctggagtgtgtgcctgtcagagggtagcttctaggactgagagagtacttggcaggaatgagtacttgactccttctgagaaatccttaggcctttaggactatgatgccctttgttgaactatttgaggtaggcatgttgatttcttgctggcttctgggggctcgataataaggaaatccacttctagaagagcaactgtttccctgaaaagaccacaaaaatggcaactatcacagctggaaggggacttggcatcagtcccttcaaacatgtccttgtacagataattaaccaagaaccacagaagtaaagcatcttgataagatcccacactgtcaagagccagggtcatattcaaaccctctgactcccaggccaccatcagacccaaatcagtcagtacaaaggaggcagctaagggccagtgagaggcctagaggctactggctggacaccgatggaccttcccaccttctgactctggttcaaggctctctttatgtccccaggctccctctccaggaatttccctcctagaatcacagaaatggcaccctgctgccagcttcttatcaatggccatggcaagattttaaataatgacaatactgaggcgggcggatcatctgaggtcaggagttcaagaccagcctggccaacatggtgaaaccccgtctctacaaaaattagccaggcatgatggcaggtgcctgtaatcccagctactcaggaggctgaggcagaagaatcatttgaacccaggaggcggaggttgcagtgagccgagatcatgccattgcactccagcctggatgacagagcgagactccgtctctaataataataataataataataataataataataataataaaatgataataatcaggatctgctctcaggcagcagttgggaccttaggaattacaaaatcttccaaattaggtcacatttgtgtaaaggaattagaaacatctttcccatttcatcaggcccagattagaacagcctctgcagagggtcctagtagatcagtcctcctgtcaggcccatgggtgtgatttcctttctcaaacagccactgaacttttcttatgattatggagtgtttattgggtgtgtgcaatgtgtcaggtgcagtctggaatttggaactgtcacatactggcagcatgacctctttaagaggcaggaacttgttatctctgccatccggtcccatgttggggaactatctatgaatcagccaagatgggttcccagccctccatccatctcccttcaaggcaaaatggtctaatgggaaaagtccatgatctagcatacctggctgctctacttccagcctatgttacttagagcaagaatcacctattttaaccttcagttttgtcagctgtaaaataagcatacaatacctggtctacctattgtgttgctaggaggaatcattcattcattcattcagcagaaatgtgttaaacactgatatagagataccctagtgtacaagacaacaaaaaaggtgcatacaatatagtaagataatcaattaacaaataaatgggtaaataatcaagatatttacagattaagcaagtgctacgagggagataaaaatggtgctgtgacacagaataatatccccttagagtgatgaaggaaagccttgctgagatgtgacattcaacctgaaagcaaaaggagacaactctaccaacactggaaggaacagcaagtgcaagactttgaagttggaaagaaacagaaaggaaaccagaatgggtgaagcatattaagtgaaggagagagtggtacaagctagagggcaggactctgtagccagggaagaagactgggcttcattctaggagcaaagagaagtcagggagcgttttaagcagggagatgagggcagattatagagcagcagggacagaagcacagatagcagccagaaggctgagttgtccaggcgtgagaagatggtggcctggactggcttagaggcagattcagaatctgttttagaagtggaattgtcaagacttgctgttggattggtgtggggtgaaggaaagacagaaataaaaagttactcctagattttggaatccacaggatcactcactcactcatgcattcaacaaacatcaattaagcacatatacctgcctgtctctaggcatggtgttggggataaagatggagatgaagatcacagctttgtcagggaaatggaccagaaaataggcaaatataatgcatttaagtaagtgcagtaaatattaaagaacatcgaactctgctgaggggaaagaatcaaagaaaagtcttcctaggggaggggagtttgagctaagccttgaaggagcaacaggaatagcagaagggctctggggttatagaacagagctctgaaataataacaatcgtagtagtagtagtagtagtagtagcagctgatatttgttaaggcctcacaatgtgctaggtactgttgtaagcataaatgaatcatttaattctcacataagaatcctataaagtagatcctattaccatcatccccactttacagatgaggaagcagaggcacagttaacctcagttacataacttgccccagatcacactcataatgacagagccaggctttaatcgcatgcattttggcgctggaaactatgctccaaacaccgcaagaaactgcctcactgtgggacgtcactgcacatttaggggcggacaacaggtgcaggaggtataaggtgtaggaaggtaggaactgatgggaggtcacgtaaatgacatgaaagtattttgcaaactataaagtgctgtccccaagcagattatcatcactactattataataaataactgcctttcctccctgtgaaaaatgaaggcttctcagcagtatctctgggttattggccttggaaaaaagtggctgcttggagggcctgcccagacagagggaatctcgggaaaggatgggctgacgtgaatctgaccctgagttgggaagcagcagatgtgggctctggtcccagctctgcacctaacttattatgtggtcttgggtgggttacctccccaccctgtctttagtttccccattgctaagatagaaggaggaaagagtggggatttttttttttccagacggagtctcactctgtcacccaggctggagtgcggtggtgcgatcacggcccactgcaacctctgcctcccgggttcaagcaaatctcctgcctcagcctcctgagtagctgggactacaggc

SEQ ID NO: 95430 - DNA, 24157 bp, Homo sapiens
aaaacatttttacagggtctggtttttctgttaacactgcacgtgtgctagactctgaccagccagtgcagggtctgagagtcaagacagcagtgaggtgagttcaggcagcgctcagcaaggtgccttgccccagccagttgggtttaggcagggctgtgcctagaaatgaacagtgttcaccctttaatacctacggatgggtggagacttctggcaggaagtcacttttaggggatggtcccttggatcagatcgaggtcacttctatctaggacatcaactcctgcagtgatgagttacaggaacccagtgcagcccagcagcactgcccctgagcctcctgggcaagaaaagccacctcacccttttctacctgattcctgggagccgatgaaggtaaaggaaaagggacaggtcggctctggagggtggcagaccactgggctgttcccattgtcacagggcaaacccccaaagtaggactcagcctgtgagaccacgtgggttcctggcttcccacgggaaggaactcaaaagtgagccaacagaatgaagtgaaaacaggtttatgaaggaagtaaaggaataaaagcgtgactacgtcataggcagagcagccctgaggggtgccagttggcttttatggtaatttcttaatcgtatgctaaaaaggggtggactgttcatgagttttccaggaaaggggtgggcaattcccggaactgagggttcctccctgtttcagaccacatagggtaactttcaggggtggccatagcatttggagactgtcatggctggtgggagtgtcttttggcagctgatgcgttataattagcatataaggagcagtgaggacaggcggaggctgctttcatcaccatcctgcttttggtggagtttggaggcttctttaccacatcctgttttatcagcgggtctttgtgacctctatcttgtgaaacaagtcctgccaaattcctacctcaccatctcccccacagcaacctcctgagctcacagcgctcctggccagctgggactgcgttgtgtccctccctctctcttgccccagaggtccacacattgagtaagccaacaactatttattgaacacctactgagcattagggaaacagtgggggcgaaacagacatgaccctagcagccgcatttaatggggtgagtagtctccctccccaacgtggaaaccatgtgggaagtgagatgccggtgacagcgaggatgctgagaccaggcataggggtctgtctacctcagtgaccgggagcctcttttcctagacaccttgggggccagggacaaagggcaggcactatagctactgtttagggaactctagagcctggcctgcttgtgcctttccctgtagggcgcttgaacttatcacactgggccttagtgtctccatcagtaaaagaaaaaagatacctatctgcattctctacttatggagataatggaggtttcccataggaacggaaacatttatccagaattttaagcaggggacttgtggatagaaagctaagcgaggctgtcagctctcattttttaagtagatgttatgcatagcacaacagagctacacagagccgacactttaacaaatctggtgcatgactcacaaggcatgttctcaagacacggctgacacgatcctaactgcctaccagtaataaacagaacaaggggtttgggatcctattgatgctagggcatctgctgagcactacataggccatggaaaagcacgcaccatatttcacagcaaaaacctcttctcctgagaggcgctcttgctgctctcctacatgacaaaaacatgagtctcctcccatctattcaccacctacccacactgcgttttctaaagcctttttggcaacagggatgggttttgtggaagacaaatgtattattccattttcatactgctataaagaactgtccgagactgggttatttataaaggaaagaggtttaattgacagttcagcatggcttgggaggcctcaggaaacttacaatcatggcaggaggtgaaggggaagcaaggcaccttcttcacaagatggcaggaagggaaaagtgccaagcaaagggggaagagccccttataaaaccatcagatctcgagacaactatcaagacaacagcatgggggactcatccccgtgattcaattactccacctggcttctccctcgacacgtggggattatagggattatgggattacaattcaagatgagatgtgggtgaagacacaaagtctagccacgtcaacaacttttccacaggtggtggaaaaaaattcttccagagatggatggggtagtggtttcgggatgaaactattccacctcccatcatcaggcattagattctcatgaggagtgcacaacctagatccctcgcatgtgcagttcacaacagggttcacactcctctgagtccagtgctgctgctgacagcaggcagagctcagtttagctcccttgcttgcctcctgctgcaccgcctggttcctaacaggccacagacaggtgctgatactggtccgtggcctggggtttggagattcctgctctaaaaagtggatttaccctcatcatcccagggcccctcagcctctaagaaaagaggcctcttggtcacaaaggtggacagacccattaagctctgggtgagcaaccccgtctccagcacctcatgtcccacaatgtttgtgtgttggggaggggtccatctcacgcgattaatctcaaggcaggagagcccatgtctgttttatgccccattgtttccctagaaagcatcgttcacccagagactgcagcaaacctcagcagctctcatcattgtcacattgtcatagactctgggctaaaaagctactgctccccagaaaagttagagccctttaagatgtgtgttcagacacctggcataaacaacatttccagaaaaatggtgtaaaatgttagatcatctagtcataaaaatatgaaggaaaacaaatctaagcagtttgtggattagattttaactttgaacaaggtgagaggcctggtagctcacacctgtgattccagcactttgagaggctgaggtaggaggatcgcttgagctcctgggctggggccaggatgtacggtcctcagtaaggcttctgaataaaactaactttaattctttaaaagcttaactgtttttctttagtcaacaaggtattttacattcttctcctacgttaagtcattgaaatctgtgtgtattttacgacaaagcgctacagcacggcctggcaaacagtgtgaggcacgaaatgatcctttgtagagtgaggaaggtatcagaacttacattttattcagctttataaatatttaatattttgggtaacaccagcatccttacaaggaatgtttatcagaaggtcaattatctgtcatggataaattctggtgccagaatgagattcactcttggagaaggctgcatttacttgttcacccttgaaatactgcaatccaccgacttcttgataaaaggatgctctggttttctgtttatttttgagatggagtctctgtcgcccaggctggagtgcagtggcgcaatctcggttcactgcaacctccacctccggggttcaggagattctcctgcctcagcctccagagtagctgggactacagacacccgtcaccacggccagctaatttttgtattttttttttagtagagatggggtttcaccattttggccaggctgttctcgaactcctacactcatgatccgtctgcctcggcctcccaaagtgctgggattacaggcgtgagccaccaggcctggccaggatgctctggttttaactaaaattaaccttcataaaaggagagcttttcaagcactcctagaaagaagctgtggattaaagatgtgcccagcgatgcaagccagatttgtgaccataagaaaggacaggaccgggctcatgcctgtaatcccagcattttaggaggctgaagcgggcagatcatgaggtcaggagttcaagaccagcctgaccaacacggggaaaccccatctctactaaaaatacaaaaattagccgggcgtggtggtgcatgcctgtaatcctagctactcaggagggtgaggaaggggagtcgcttgaaccgggaggcagaggttgcagtgagccaagattgcgccactgcactccagcctggggaacagagcgagactctgtcacacacacacacacacacacacacacacacacacaaaatagcggggcgcggtggctcacgcctgtaatcctagcactttgggaagccgaggtgggcggatcatgaggtcaagagatcaagaccatcctggccaacatggtgaaacccggtctatactaaaaatacagaaaattagctgggcgtggtggcgcgtgtctgtagtcccagctatttgggaggctgaggcaggagaatggcgtgaacctgggcgacagaacttgcagtgagctgagatcgcgacactgcactccagcctgggcgaaccgagcaagactccgtcaaaaaaaaaaaaaaaaaaaaaaaaaaaggacagagctggcgctcgtggaaatacaattttcccaaagttaaaaacatgattctcaacagcatgaactgcccttcaaagatgatggagctgcttcaaaaggcgttagaggagctgggtacgaagaagcacttaaagtgtcagataagaaagcggttagtggctgcgcgtggacacctgtggtcccaggtgctctggaggctgaggcgggaggatcgcctgtgctcgggaggtggaggctgcagtgaaccgagatcgcgccatggcactccagcctgggcgacagggccagactgtctcaaaacaaacaaacgaacaaacaaaaagcaggttaagatgcacaactggttaaagttctgctgggcaattaaaaaatgatcccgtctgggttatctttgctgcaggacacgcattagcagcaccgtctactgacaagtggccttcattaagagcaaattgcaggctcagcatgtattttatttataacagctgcttgccgggcacagtggctcatgcctgtaatcccagcactttgggaggccaaggcaggcggatcacctgaggccccgcagttcaagaccagccaggacaaccctaacccccgcctcccccaaccccgtctctacaaaaaaattttaaaaattagccgggcgtggtggcgcgcgcctgaggtcccagctactccagaggctgaggcggaggctacaatgaaccctgatcctaccactgcactccagcctgggcgacggagcgagaccctgtctccaactcaccaggcaaacggtgaagacacacccaggcgcgtcccctaagagggacgccggcttcaggggccctggccctccccagcgcagacccgccggagcccagcgccgcgccggggcccaccaccggcggccgtgagggtttccactcgaatctccccggcgagctgggcgcctccactacgggtctgcgacgcagtccacccactgcgggcccgagagaggacccgtgctcgtcatttttattcgaggcggggctatctggggaccccgcccggagcggaggcccctcgcggccccagcctgtttccagggaattcaggtccacacgccgctcaaagaacctcagcgccccagtccgcgaaatcccgcggccggtacgaaacaccgccaactttagaagtaccaccccctccatccctttcgtaaggaactgggtgccccgccctcaacgagatcccgcgggaactgcatatggcgcgasagcagaaacaccttacttttccctgcggcaaacgcccagttccctttcacgtgacgaagagtgccccgtcccccagaggcgtggccgcgtcgcgcgtacgcacgtacgcacgtacgcacgcacgtctctcgctttcgcatacttaaggcgtctgttctcggcagcggcacagcgaggtcggcagcggcacagcgaggtcggcagcggcacagcgaggtcggcagcggcacagcgaggtcggcagcggcagcgaggtcggcagcggcacagcgaggtcggcagcggcagcgaggtcggcagcggcgcgcgctgtgctcttccgcggactctgaatcatggcgaccacggccacgatggcgacctcgggctcggcgcgaaagcggctgctcaaagaggaagacatgactaaagtggaattcgagaccagcgaggaggtggatgtgacccccacgttcgacaccatgggcctgcgggaggacctgctgcggggcatctacgcttacggtgagcgggcgcgggccgcgggggccagccgggggcgagtcgggggcgagccgggggctgagggccagactggtgactcccgggccggccctgcgctccggaggtcgtggtcagggtcgaggctcgggggccagtgacgtccgacccccacccccacccccgtcctcgccctcacgcctggctgtgtcggcgctttcggtgtgtgtcccccgtgcagagctcggcgctgggtctgtcgggggctgcagccgcttcgaggcacctcagcgtcsttcattcagcagataactgatttctacctattagcttttctaggtactggggttttggcggtaaaccggaagggtttgcgcctttacgggttttgaatttcgtttggggggaaagcatactgtcaggttgcccaggcaacctgaagaacctgaagcggggtaattgaatagagtgggactgggaaggaggagagaattagtaaagcagagaggtaagggggttcgcaggagggggtgccatttgagcagagttctggatgaaggagactgttatgagaagagggaagagcagttggggcagaaggaacagctggtgccagggccttgcagcccttakccagctgcattccaggaactgaaagaagtcccctgtggtgggattttggagagctagtcggggcagatctagcaaagacgtgtagggtgacgaataatttgaatttcatttagaaatctagtgggaagccagtggaaggttttaagtagctatgtgacacgatcacatttacagttttaaagattcttctgggtgtctgtagatttgaggtgaggcgaggcaaggcaggagaggaaacaagagagttgggagcttttgctgcagttcagggaagagaggattgtgctgccttggagatggagtaccagggagctgacagcattggctgatggattgaacgtgagtgacagaaggaggagagttggagtgttttgagtaaccggtggttgatgctgcaaacatttggctaggtaggcagcactccagagagtcagaatcaggagctgtctcttggtatgtttgaaagatgtgaggaagttgagggagagcctggagaagaggttgggttgggcacatagatgggaatgaccagcatctgggataaatggcctgtgtttaatgcttgggacagggacattttttatcctgtagttctcttccttttctttcttccttttccttctgacagtcctgctcttgtcaccaaggctggagtgtagtggcatgatctcagcttattgcaacttccacttctggggctcaagcgattcctttgcctcagcctcccgagtagctgggattataggtgtgggccaccacgtcctactaatttttgtatttttagtagggaggggattttgccatgttgcccaggctggtcttgaactcctgacctcagtgatccaccagcctcagcctcccaaagtgatggcattacaggtgtgagccaccccacctggccgtatcctgtagttcttgatgccacaacagtttggacaaagtgaagcgaagttgctgaggatgcgtggtgaaaaagcatctcaggcagcctcacagtgaggctgacagccccacctggtttcctggcactcaggcagtccctgccctaagacactgttgttagtttcccatctatgtgcttgctcttcatgaagagtttaaatcatctgctatatttgcatttgtgttaagatgggaaattgtgctacattttcttttgtttcttatttttcgctatgccccagaactgagcagagctacatttaagagactaccaaaaaataattgaaatagagtttttgtacataaaattttatttacttgaaaaacacgtggttcttcttcaaaatagcctcaccctttggtgtagtagttgctttgcaagagagatggtgtgatggtgttgtagttagtgagctgcatccagacagaacaacataggacaccctgcagcgtgacccacgcaggttaaacagagttgtagacctgtcagcaacacacagacttaatgctagctagtaggagagaacaatggctagagtgactttcctgtttttttgttgtttttttttttaatttaaaaagtagtataggttgtttgtaatccagtcaaacctaagggagtaattagagtaaaaagtaagtttctttccacccctctactgcagtaactgccaggaacattttggcacttacacttccagatgctgcacacccagatttttttttttttttaaacaaaactgttgtctatattctacaatttggtggttttttwaaaatagagattggtctttacaaataatatcccacgttagtgtagaaatcactcagcccaattcattgagcccctgggttttgagagcttgctatgttgaacactgggttaggctggaggacaggttcaaaaaacaaacmatgtctgcccctgaggagctcacagtacagrgtttctatgctgtcattgtggtgagggctaattttttgtttttatttgcaggttttgaaaaaccatcagcaatccagcaacgagcaatcaagcagatcatcaaagggagagatgtcatcgcacagtaagttgtcctggggtgcggcgcagggctggatgtaaatttgggcagcgcagtgcagttagatgctctgggatgactgtttccctcagcttgtacacgctcagttccaacactttccctgactttagccacagggtttaatacttttttaaatttgtgttctctactgtggaaagctttcattttctttttgagatggagtctcgctctgttgcccaggctggagtgcagtggtgccatctcggctcactgcaacctttgcctctcagtttcaagctattctcctgcctcaccctcccaagtagctgggattacaggcatgcaccaccatgcccgactaattttcakatttttagtagagaygggggtttcaccatgttggtcaggctggtctcaaactcctgacctcaggtgatccaccctccttggcctcctaaagtgctgggatttcaggcatgagttactgcgcccggccaaggctttcattttcttagccagctttgcttagtggtttgctggcatgtggaattgtatataacacaatttcggaaaaacagactgtgcttttcctctgctctcacaccaccacaacagtcatcagcacagaagaagacttctgtgagcagaggtgtggggcttttccagctgggtgtcctccagttcaactcacaccacctgcctggagataggccatatcctgcaggttgacggctcagtccccatgactaccctcttttcagacaccagttataagttcggatctctagaacttctgaccaagcagcttcaagttgggttcccaggatcccctctttaggttggattaatttgctggaacagcagctcaaagaactcagggaaacacatttagtggtttattataaagggtactgcagaggatacagatatggggggaggggtgcagcctccaaggggcgggtggtcacctcccggaacctccttgtgttccactgtctgtgttcagccatctagaagctcttcgaacccagtcctcttgggtttttatggaaaattccatgaggtcagcattctttcccccataagggaatagggcaggagcttttctgggataataccataatgctttttaaaaaaaaatttgaawtttaaattttttacatttttcgagacagggtcttactctgtctcccagactggagtgcagtcgtgtgattacagctcwtagcagcctcaagcgatcctcccacctcaccctcccaagtagctgggactacaggcacacatcaccatgcccaattaatttttgtattttctgtagagacagggttttgttgtgttgcccaggctgctctcaaactcctggcaatctgtctgccttggcttcccaaagccttgggattacaggcgtgagccactgtgcccggcctaaacattttttttgttaagatatggggcctcacttcgtcacccaggcgggaatgcagtggtgcagtcatagctcactgcaacctctaacttcgaggattaaggaatcgtcccgcctcaacctcccaagtagctgggactgccagaatgtgccaccgttcctggttagttttttgttttgtttagaaatggggtctcttgctgtattgcccaggctggtctcgaattcctggcttcaattamtgctgcctctgcgtcccagagtgttgggaatacaggcctgagccaccacgccgtgacatgagggtctttatgactcacaatctgaaaggcagggaagattagagccctgctgtggagcaggtgaaaggagagcagaaggtcagagagattgtttcctgaggcctaacccatcaatttaataagactgtaataagggctatgggagctgtgagccaggaactatggatgaaaacttgtatatagccatatctcctagcaccacaaatcctcttttaatagctttattcctcgtttgcctaatttcaaaaaagactcatttacacaaaaatttctttggaagagagagttagtccaaaatcctagaaggaaaagagttgtatttagataaaggggagtcctccttyttctgacacctatgaaacacctcttgaagttagagagtctgtggctccattgcccccgtgcagaagccatgtctactctctttcttcatggacacttaacaagctgtgacactgggcccgagtcctgcctcctcgcagttaagatgttattaggtacgggggcttgctggaagaaggtacctaagtgcctctggagcccaggccttggagtgcagctgtggcgtggcctgtcctccctctaatcccactgcttttgtttccttgaataggtctcagtccggcacaggaaaaacagccaccttcagtatctcagtcctccagtgtttggatattcaggtaatttgccattcttaaaacaaactgttatgtaattctaggaaatacttgctttttcttctgtaactacagtgttcaaaaagtacaatttaaaatkttctagtatgtattgactcagcaaatttttacacagagtcttagttgtacactaatatatgcactaatattctgtcatgattttctatttaactagaggaagctcttgtctgcagacgaggatgctgacacattaagttattgttggatttgcaatttaaatgacaatatttgctaacctgtaagagatgagaagtatgattaatatgagatagtatttctcatatagatctgagtgtgaattactacaatccactttgataatactgcggattctctattttctgataaattatttcaccaggttcgtgaaactcaagctttgatcttggctcccacaagagagttggctgtgcagatccagaaggtgagatggctaaagatagcggtgtccgattaacaagtactgcttttgtgatttagttgtgaaacaccgacttatttatttaatccaatcctgttttctgatacctcaaaattttcttcctaattarcattttgccattaatcattatataaattgctggtttgtattaagtcatttttggtgtggcttgtgtgctctcggtagttttttacagccttagaaatgtagattttttgcgaaaaatcaattttaataaaaataaattaggtcgaggtgggtggatcacctgaggtcaggagtttgagaccagcctggtcaacatagtgaaaccctgtctctactaaaaatacaaaaaattagctgtgcgtggtggcaggcgcctgtaagcccagctacttgggtggctgagcaggagaatcacttgaacccgggaggcagaggttgcagtgagctgagattgtgccgttgtactctagtctgggcaagaagagtgaaactctgtctcaaaaaaaaaataaattgtacccattttatacttaacgtagtataaagatgtatgtttaaaaagatgtatattaagatgttaatgytggtttcttcggtggatgggattatgaattttatatattcttttctgttaatgatatagcttttgtaataagaaaccagcaggccgggtgtggtggctcacgcctgtaatcccagcactttgagaggctgaggcaggccaattacgaagtcaggagataacgactctctgaatacacatatagggtgcacacagcacggtgtgctaacacggtgaaaccccatctctactaaaaatacaaaaacaaaattagcctggtgtggtggcgggcgcctgtagtcccagctactcaggaagctgaggcgggagaatggcgtgaaccctggaggcggagcttgcagtgagctaagattgcgctgctgccccccagcatgggccacagagtgagactccgtctcaaaaaaaaaaaaaaaaagcaaaattaacttgtttttgtcagagaaaagagcaggagaattttgtggtttcgagataataatggcataaataataatcggtgatcatctcggaggagaaacagtctttctttttggaaaacgtggatgtttctctctcccaccctggacrtgaacctgtgctttgtttcaggggctgcttgctctcggtgactacatgaatgtccagtgccatgcctgcattggaggcaccaatgttggcgaggacatcaggaagctggattacggacagcatgttgtygcgggcactccagggcgtgtttttggtaagcacttttgtcgctaaaaatggtgctgccggtagtatttgtaagaagtgcttaaatggtacaggacagctttcgatttggtaggccgcacggtagacttttgcacctgggtcacttgcaggaggtagagggaaggtctctggaaccctgagaccagtggaatgatgagctctttcttgggagcctcaggtgtgattatttcaaaatctcatagatgtgatttgtcgtaagtatttcaaaatctcatgttatagatatgattcgtcgcagaagcctaaggacacgtgctatcaaaatgttggttttggatgaagctgatgaaatgttgaataaaggtatgagcaacaaaagaattactcttctactgacataattcttagttcttaaattttcacagtgtaaaattgaaacagccagtgactgttctgaatgtgaatagtgttttcatcgtggaaaaacaattgtgccttggcaattatgaacaaaaaattcctaccttgattttatttatttgttcattgtgggtgactcaggccagcctctattgctttttatttggtatctaggactctcggggtgggtttcttgatccctagatcacttcagattgaagaagcaccaaagggaaaccagattccctcaaccagataacactccggtgggcggggagtagggacggagagaaygcgtggatgtggcctggtgctgtaaaaatgagatttcctgtcaaacrtaccttatcaccactctgcctctaacccagtgggaacactgggcgtgcaccttccatttctgggtgtgccgccctaaacatccctcacctgtcttgctccctgtcccaggtttcaaagagcagatttacgatgtatacaggtacctgcctccagccacacaggtggttctcatcagtgccacgctgccacacgagattctggagatgaccaacaagttcatgaccgacccaatccgcatcttggtgaaacggtaggagcccctcttgtcaagtttactaaaacactgggccgcatttataaaggattttatgtcgtaatttcaaaaactttttatagccagagtctggctgtgttgctgaagctcgtgtcaaaacccggacctcaggctatcctcttgcctgagtgtaaaggaattgaaagcatgcaaattcttttaaaattcctgttttaaaaaaccaawtaggctgggcaacatatagagaccgtatctctaccaataataaaaaattagccaggtagggcggcacatgcctatagtcccagctactcaggaggctgtggtgggaggatcgcttgaggtcaggaggctgaggctgcagtgagctttgattgtgccactgtacttcagccagggcaacagagcaagaccctgtctcaaacaaaacaaaacaacccatcttttataatcctcattgtggtttgaaccaataattctaaatttaaaaattaggtgackatttatttatcagtgtttcgtttagaatcgtattccatgtggtgcacattgtgaaatgttaagtaggatacagaatggaggcctgtgtgacggaagtggtgataggatggaggacagggctggggctgctgggtctgcaccagatatcacggtgtgaccttttccaccagggtctccctggatcctggcttggcccaccctcaagtcctagaaggaaggatgagtatgtaacaggatttgtctttgtccttcagtgatgaattgactctggaaggcatcaagcaatttttcgtggcagtggagagggaagagtggaaatttgacactctgtgtgacctctacgacacactgaccatcactcaggcggtcatcttctgcaacaccaaaagaaargtaagaggcactgcacagcatccatgtgctgmagggaaactgcagattgagtctctgaatgacrtaaatcaagatttttcagtaaagggccagtttgtccatattttaagctttcagggtatgtgttctcttgtaaaagcagctgtagacaatatgcaaacggtcagacgtggctgtgaccattaaaacttcatttacagaacagcgatatcagccacccctaaagattcagatttcgttggctgaaggtggaacccaggcctgagtagttttagatccccaggtgatggtaatgtggaggcagacctgagaactgtcggccactttcctgagaaaggaaaggagttgggctacattctaacaagattggaattcaaatttcaaatgagaatgagcacacctggccccctccccccatagagtcattatatggagaaaatgaagtaagagggttttgtgagtgcaccccaacattttctgggaaaaagtttktacatccagttaggatgattctgagttttaagagcagttaccttacgaatattgatactggttctgcaaatgatgcggtaaagtcccgaatgcacatctctgctttggtatactagcttgcagtagcatctgttgattggatttgtaggtggactggctgacggagaaaatgagggaagccaacttcactgtatcctcaatgcatggagacatgccccagaaagagcgggagtccatcatgaaggagttccggtcgggcgccaggtgggtstgctaygctgtggctctgcaggtcagggtttgctagactgtgtctaagcacttcatatgtaccgcctaagtgcaggccccacacccggggggatgccaagcttctgctctgaaagctgaggccctgggtgagcagaaaaccttccagttaaggaggggtccgctgtgctcctgtaatacttaggttgaggtgataactagccttaactagccaggttggtcaccttggttacaagcgtgtgtcttcttttccagtaagtaggggggttttctgttcatygtttcgattagtttaattccacagtggtcagaaagcgtggattgggtggtttcattcatttgaacttgattcagacttccttctttgcccaccttgtggtcagcttaacatatgtgctgtgtgtgtctttttttgtttgtttgtttttgagacagtctcacttcgttacccaggccggagtgcagtggcacaatcttggctcactgcaacctctgcctcctgatttcaagtgactcctgtgtctcagcctcccgagtagctggaatggctaatttttttttttttttttcatttttagtagagatggggtttcaccatgttggccaggctggtctcgaactcctgacctcaggtgatccatctgcctcagcctctggcagtgctgggattacaggcataagccgccgccatgcccggctgaagttaccgtttttaattttttgctaggcaaaagtgaagtatttttcccaattattggtttaggaccgattaaacaagttaaagatagtctagtaaaagatgtctatttttttaatctgatggagcacatgaccgaagtaactaaatccaccaacagcccctctgcacaggggtttctggtgctgtccctgaggcttcacgtttgcagacagactgttgagagaggagaatctcgtatattttggacctgcagccaggattccttaaaattagcaatggaagcaagtccagtcttacacttgtatgagtaatttaatcgcctcaaacactctttctttttgcagccgagtgcttatttctacagatgtctgggccagggggttggatgtccctcaggtgtccctcatcattaactatgatctccctaataacagagaattgtacatacacaggtaaggtgcaagctctcattggcttcacttctgtgacacatttactaaatcttgattgttatatatactaactgtaatattattttattcctgaagaattgggagatcaggtcgatacggccggaagggtgtggccattaactttgtaaagaatgacgacatccgcatcctcagagatatcgagcagtactattccactcagattgatgagatgccgatgaacggtaggaaatcgtccagctctactgtaattgtagagggaacttccctattcttagtttggggcacctgagtttgtttttttgttgttgtgggtttttttgttttgtttttgagacgaagtttcgctctgtcacccaggctggagtgcagtggcgcgatttcggctcactgcaacctctgcctcctgggttcaagcaattctcctgcctcagcctcctgagtagctggaattacagacacgtgcaccatagccagctaatttttgtatttttagtagagacggggtttcaccatgttggccaggctggtctcgaactcctggcctcaaatgatctgcccacctcagcctcccaaagtgctgggattacaggcgtgagccactatgtctggcctgttttttgttttgagaagtctgttgtgaggttttagttaaatttacgttaacaaattttcattttgtttgtgttgttccttaatctgtttctttcttcactttcagttgctgatcttatctgaagcagcagatcagtgggatgagggagactgttcacctgctgtgtactcctgtttggaagtatttagatccagattctacttaatggggtttatatggactttcttctcataaatggcctgccgtctcccttcctttgaagaggatatggggattctgctctcttttcttatttacatgtaaataatacattgttctaagtctttttcattaaaaatttaaaacttttcccataaactctatacttctaaggtgccaccaccttctctagtaacttactgtgtagtcttgggtcatttcactcacttttctttttttcttttctttttcttttttttttttgagacagtctccctctgttgcccaggcaggagcgcagtggcgtgatctcctctcaccgcaagctccacttcctgggttcatgccattctcctacctcagcctcccacgtagctgggagtacaggcggccgccaccatgccaggctaatttttttgtattttcagtagagacggggtttcaccgtgttagccaagatggtctcgatctcctgacctcgtgatccacccacctcggcctcccaaagtgctgggattacaggcgtgagccactgcacccggcccatttcactcacttttctaatctttttttttggaaagagtttcatcgttgatgagttttgctctgctgcccaggctgaagagcagtggcaccatcacaactcattgcagccacaacctcctgggctcaagcgatcctctcacctcaccctcctgagtagctgggactacaggtgcatgccagcacatctggctaatatttaaattttttgtagagacagggtctcactttgtggcctaggctggtctgtcactcatgggtttaagtgattctcccatcttggccttacaaagtgctgggataacaggtgtgagccaccatgcctggcctcatttttctaatttttttttgttgttgtttttttgagagcccaggatctccctgtcgcccaggcaggagtatagtggcaggatcatgacttaccacaatgttgacaaactaaaacagataattatctgtttaaatatttaaattattaaagtatttaagttatctgttgaaatatttaaagtaattacctgtagctttataggcacacagcaccacagctgcccaatttttaattttttaaatgtttttaaagacagggtctccctctgttgaccaggctggtcttaaactcctgacttcaagcagtcctcccgcctcagcctctcaaagtgctgggattacacacatgagccacagaccgggctctaatatttgaaatggaaatgttaaaactggcccctcccttcctgaaattagttgggatgataatctttatttccgggttagggtgagcttggaaataatttttaaatttcatcaggtgattctacttgaaggcatctgaaattctatagtttatgaatggaacttcctttcactgaaactgtgactggacccttgctagccagctggtggctggtagaccagctgcatcatcaggagttggttagaaatgcaagtgctcgggccctgtcctggcttgctgagtgagaacctgcaggtaacaagactcccaggtggcactgctggccgagcgggaggagcacgagactacaggcccaggcagcttaatgagttcctggcaaggaggaaccagatacaggtgtgttcagggcatttgctcagcagcagtggggagtgatgcccaccacagctctggccagtgccagcctcaatgtccgtatctgcaggcgcctgagctcactgaggctcacctggtctcatcaggagctgctgccaggcttgtgttagaggtgaggagtggctcaggtttccacacagtcactccggaggacggaaggcctccattaccagtaagaatgattctagatgaataagcacgtggtgttacagtggaggaggcagcattggtgccttggggaggagatggcaggagaaggggtggggcttaagctaccccacacactgtctaggaaaggtcatcctaaaaggaaaaatacagcacaagtgttcataaaaatgtcaaactgtactgacaaatcagaaatggtatgtgattatccaagatttaaaaaccaccagtcctaaaggttgacaaggaaagtttccagactttctggagagcagcctggcccttgggcagtcagtgatgaaaatgctatttccctttggtggtgtgtggttctgctgtagacagctgactggaatgtggacttctccaggaagttcagcgttgctcctgcctataccagggaaggatgctaagtgctcatggatgggggcatggtgcgggacagggtggaacatttgcagtgatgctgggaagagaaggatacaagaggtagagaactcatggaggttcttgggagggtggtttggggccaggatcctcccagagtccaaatggagtcaagttcaggcagggggtctgctgagccttgctaggtaggtatcactgggcctctggtcaggtggaaaaactggctctagatcctgaggggcttcccaaggtccccagcaactaaatccagatgaaaaacccctgggttatgtacttcattacaaaagtataatctcactgaaaaaaaacatacaaatgcataatttgaaaaagtcatccttaatcctcctacccagatataactcacaatttgatgactgtccatccagtattttaatttatcttgtacatctacctgtacataaagacctttttaagcaaaaattgtaacccactttgccattattaactcaggtttttgcttagtaatgtatcatacatatttcactacgttaaaaaaaaaaaagctacttttccagcctctataccatgcctcctttggaagcagttgaagattaattagaataatcttttatttgtttatttttttgagatggagtttcgctcttgttgcccaggctggagtacaatggtgtgatctcggctcactgcaacctccacctcctgggttcaagcgattctcctgcctcagcctcctgagtagctgggattacaggtgcccaccaccacacctggctaatttttcatatttctaatagagttggggtttcaccatgttggccaggctggtctcaaattcctgacctcacgtgatcctcctgccttggtctcccaaagtgctgggattaggcatgagccactgtgcccacccagaataatctttagaagtgattttcttgatcaaggtacatgtttcaaattaacgttgcagaaagattttccaccaatttatactcctaatggtatattttttttttttttttttgttttttttttttgggtggttgaaatttattcaacaaatacatataggatgccttgtcttaaagccaggcaattttcctaaaagaaaaaccacataaaaagggttctaaccaagagctagagtgtcctgaccctttgaggtatgtctaaagtatagaaatagaatggtaatgttgatgctgttggcatgtttctttgtagtaagattgtttaaaataatacatagacataaaatgtatgacgaaaatagcacagcaccgaagaaaggagtaatggaagtatactgtcaagattcttacactattacttgaaggcagattgtgatgaattaaagatgtgaaacatatataaaagtgttaagcaatttttaggtatgaacctttaaagcaatacaaaaatgtgaaacagaaataaacagccaacgtaggagacaaaataagagttctaaggaatacttaatctaagaatcctgaaaaggaaggaaaagggaacagagaacttacgagatggacaaatacaaaacggtagtaggttgaaaacaaccgtgtcaataattacatttattgcagattgtctgtctcacctcaaactaaaagaaaagcaagctaaacccaaaggaagcagaagaaaggaaataataaagatgagagtagaaataaatgaatagaaaaataatagagaaaatcaacaaaaccaacggttcattctttgaaaagatcaacaaaattgacacatctttagcaagtctaaggaaaaataggttcaaataactaaaatcaagaatgaaagaggtgatggcacagccgactgtacagaatacaaagtatcagtgccatggattgtttgccaacagatgaaccttgataaaatggagaaattcctaggacaaacagattaaatcagtaaccaaactttcaacaaaggaaagccaaggcttgtgaatcctgccaaacttttacagaattatcaccatcacaatttttttttttttttgacgcagagtctcacactgttgcctgggctggtgtgcagtggcacaatcttggcttgctgcaacctccgcctcctgggttcaagtgattcccttgcctcagcctcccagtagctaggattacaggtgcctgccaccacatctggttaattttttgtatttttagtagagacggcgttttactgtgttggccgggctgatctcaaactcctgatcttgtgatctgcccccgtcagattcccaaagtgctggatcacgaaatctttcaaaaaatataaggcagaacatttcccaactcaccctgaggccagcattacctgataccaaaacaaagctaccacaaaaaaaactagatcaatatcatatgaatatagatgtaaaaatcctcaaaaaactggcaaaacaaatccagcaacatataaaaaggattgtacactgacaaagtgggatttatcgcaggaatggaaagttggtttaatatccaaaaatctgtcaatgtaatacaccctatcaatagaataaaggacaaagtccacataatgatttacagatgcagaaaaagcattggacaaaatccagcaccttttcaagatagaaaataagaatggaagggggctgcttcaacctgataaacagcatcgatgaaaaaccacagcattacccgctaaggttgggaacaaaacaagaatgctcttgccacgtctattccaacattgtactggaagttacgagccaggacaattaagcaagaaaagaaataaggcatccagatcggaaaggaagaatcaaaactctctagtcacggatgacatgatttatacctagaaaatcttaaggaatttacacatttaaaaaatcacttatcagaacttataaatgaggtcagcaaggttgcagaatatatgttcaacataggaaagccagtgtttctgtacactagcagtctgaacaacctgaaaatgaaattaagaaaataattccatttacaattgcatcaaaaagagtgaaatatgtaggaataaatttaacaaaagaagggctatacttgttcaccgaaaactacaaatagcttgttgaaaggcattgcaaacctaaatatataaatgtcccaggttcatggattggaagataactttcccaaactgattgatatagttagttaggctttgtgcctccacccagatctcatcttgaattgtaatccccctaatccccacatgtcaagggacagacaaggtggaggtaattgaatcatgggagcagttccccccatgctattcttgtgatagtgagttctcacaagatctgatggttttataaggggctcttcccacttcacttggcacttcttgccaccttgtgaaaaaggttcctgcttcgtcttcgccttccaccatgattgtaagtttcctgaggtctccccagccacactgaactgtgagtcaattaaacttctttcctttttaaagcacccrggctcaggcagttctttatagcaatatgaaaatggactaatatactgctctgcagtgtttaggagaatgtggagaaactggaacccccatacattgctagtgggattgtaaacaggcacagcctttatggaaaacagcttggcagttcctcaaaatgttgaacataggagttgacctagcaattctcctcctaggtctatactcaagagaattaaaaaatctgcacacataaacctaatgtgttcatagcattgttcataagagccaaaaagtggacacaagccagatgttcatcagctgtaagcaaaactggtgaatccacacaatattacttggcaataaaaaggcatgaagtgctgacacactacaacctggatgaacctcggcaatatgctaggtggaagaaggcagacacaaaaggccacacgtggtgtgattccatttacatgaaatgtcctgaacaggtagatccatagagagattagcaggaaaccattcacagtggtttcaggagcttgaggggggaggagggggatgggtgaaacaaggagtggctgaaaatgagtatagggtttcttttgaaggtgattctaatgttctggaattagataatcgtgatggttgtacaagtgtactaacaactgaatt

SEQ ID NO: 95431 - DNA, 23529 bp, Homo sapiens
  misc_feature (1)...(23529): n = A,T,C or G
nnnnnnnnnnnnnnnnnnnnnnnnnnnnnnnnnnnnnnnnnnnnnnnnnnnnnnnnnnnnnnnnnnnnnnnnnnnnnnnnnnnnnnnnnnnnnnnnnnnnnnnnnnnnnnnnnnnnnnnnnnnnnnnnnnnnnnnnnnnnnnnnnnnnnnnnnnnnnnnnnnnnnnnnnnnnnnnnnnnnnnnnnnnnnnnnnnnnnnnnnnnnnnnnnnnnnnnnnnnnnnnnnnnnnnnnnnnnnnnnnnnnnnnnnnnnnnnnnnnnnnnnnnnnnnnnnnnnnnnnnnnnnnnnnnnnnnnnnnnnnnnnnnnnnnnnnnnnnnnnnnnnnnnnnnnnnnnnnnnnnnnnnnnnnnnnnnnnnnnnnnnnnnnnnnnnnnnnnnnnnnnnnnnnnnnnnnnnnnnnnnnnnnnnnnnnnnnnnnnnnnnnnnnnnnnnnnnnnnnnnnnnnnnnnnnnnnnnnnnnnnnnnnnnnnnnnnnnnnnnnnnnnnnnnnnnnnnnnnnnnnnnnnnnnnnnnnnnnnnnnnnnnnnnnnnnnnnnnnnnnnnnnnnnnnnnnnnnnnnnnnnnnnnnnnnnnnnnnnnnnnnnnnnnnnnnnnnnnnnnnnnnnnnnnnnnnnnnnnnnnnnnnnnnnnnnnnnnnnnnnnnnnnnnnnnnnnnnnnnnnnnnnnnnnnnnnnnnnnnnnnnnnnnnnnnnnnnnnnnnnnnnnnnnnnnnnnnnnnnnnnnnnnnnnnnnnnnnnnnnnnnnnnnnnnnnnnnnnnnnnnnnnnnnnnnnnnnnnnnnnnnnnnnnnnnnnnnnnnnnnnnnnnnnnnnnnnnnnnnnnnnnnnnnnnnnnnnnnnnnnnnnnnnnnnnnnnnnnnnnnnnnnnnnnnnnnnnnnnnnnnnnnnnnnnnnnnnnnnnnnnnnnnnnnnnnnnnnnnnnnnnnnnnnnnnnnnnnnnnnnnnnnnnnnnnnnnnnnnnnnnnnnnnnnnnnnnnnnnnnnnnnnnnnnnnnnnnnnnnnnnnnnnnnnnnnnnnnnnnnnnnnnnnnnnnnnnnnnnnnnnnnnnnnnnnnnnnnnnnnnnnnnnnnnnnnnnnnnnnnnnnnnnnnnnnnnnnnnnnnnnnnnnnnnnnnnnnnnnnnnnnnnnnnnnnnnnnnnnnnnnnnnnnnnnnnnnnnnnnnnnnnnnnnnnnnnnnnnnnnnnnnnnnnnnnnnnnnnnnnnnnnnnnnnnnnnnnnnnnnnnnnnnnnnnnnnnnnnnnnnnnnnnnnnnnnnnnnnnnnnnnnnnnnnnnnnnnnnnnnnnnnnnnnnnnnnnnnnnnnnnnnnnnnnnnnnnnnnnnnnnnnnnnnnnnnnnnnnnnnnnnnnnnnnnnnnnnnnnnnnnnnnnnnnnnnnnnnnnnnnnnnnnnnnnnnnnnnnnnnnnnnnnnnnnnnnnnnnnnnnnnnnnnnnnnnnnnnnnnnnnnnnnnnnnnnnnnnnnnnnnnnnnnnnnnnnnnnnnnnnnnnnnnnnnnnnnnnnnnnnnnnnnnnnnnnnnnnnnnnnnnnnnnnnnnnnnnnnnnnnnnnnnnnnnnnnnnnnnnnnnnnnnnnnnnnnnnnnnnnnnnnnnnnnnnnnnnnnnnnnnnnnnnnnnnnnnnnnnnnnnnnnnnnnnnnnnnnnnnnnnnnnnnnnnnnnnnnnnnnnnnnnnnnnnnnnnnnnnnnnnnnnnnnnnnnnnnnnnnnnnnnnnnnnnnnnnnnnnnnnnnnnnnnnnnnnnnnnnnnnnnnnnnnnnnnnnnnnnnnnnnnnnnnnnnnnnnnnnnnnnnnnnnnnnnnnnnnnnnnnnnnnnnnnnnnnnnnnnnnnnnnnnnnnnnnnnnnnnnnnnnnnnnnnnnnnnnnnnnnnnnnnnnnnnnnnnnnnnnnnnnnnnnnnnnnnnnnnnnnnnnnnnnnnnnnnnnnnnnnnnnnnnnnnnnnnnnnnnnnnnnnnnnnnnnnnnnnnnnnnnnnnnnnnnnnnnnnnnnnnnnnnnnnnnnnnnnnnnnnnnnnnnnnnnnnnnnnnnnnnnnnnnnnnnnnnnnnnnnnnnnnnnnnnnnnnnnnnnnnnnnnnnnnnnnnnnnnnnnnnnnnnnnnnnnnnnnnnnnnnnnnnnnnnnnnnnnnnnnnnnnnnnnnnnnnnnnnnnnnnnnnnnnnnnnnnnnnnnnnnnnnnnnnnnnnnnnnnnnnnnnnnnnnnnnnnnnnnnnnnnnnnnnnnnnnnnnnnnnnnnnnnnnnnnnnnnnnnnnnnnnnnnnnnnnnnnnnnnnnnnnnnnnnnnnnnnnnnnnnnnnnnnnnnnnnnnnnnnnnnnnnnnnnnnnnnnnnnnnnnnnnnnnnnnnnnnnnnnnnnnnnnnnnnnnnnnnnnnnnnnnnnnnnnnnnnnnnnnnnnnnnnnnnnnnnnnnnnnnnnnnnnnnnnnnnnnnnnnnnnnnnnnnnnnnnnnnnnnnnnnnnnnnnnnnnnnnnnnnnnnnnnnnnnnnnnnnnnnnnnnnnnnnnnnnnnnnnnnnnnnnnnnnnnnnnnnnnnnnnnnnnnnnnnnnnnnnnnnnnnnnnnnnnnnnnnnnnnnnnnnnnnnnnnnnnnnnnnnnnnnnnnnnnnnnnnnnnnnnnnnnnnnnnnnnnnnnnnnnnnnnnnnnnnnnnnnnnnnnnnnnnnnnnnnnnnnnnnnnnnnnnnnnnnnnnnnnnnnnnnnnnnnnnnnnnnnnnnnnnnnnnnnnnnnnnnnnnnnnnnnnnnnnnnnnnnnnnnnnnnnnnnnnnnnnnnnnnnnnnnnnnnnnnnnnnnnnnnnnnnnnnnnnnnnnnnnnnnnnnnnnnnnnnnnnnnnnnnnnnnnnnnnnnnnnnnnnnnnnnnnnnnnnnnnnnnnnnnnnnnnnnnnnnnnnnnnnnnnnnnnnnnnnnnnnnnnnnnnnnnnnnnnnnnnnnnnnnnnnnnnnnnnnnnnnnnnnnnnnnnnnnnnnnnnnnnnnnnnnnnnnnnnnnnnnnnnnnnnnnnnnnnnnnnnnnnnnnnnnnnnnnnnnnnnnnnnnnnnnnnnnnnnnnnnnnnnnnnnnnnnnnnnnnnnnnnnnnnnnnnnnnnnnnnnnnnnnnnnnnnnnnnnnnnnnnnnnnnnnnnnnnnnnnnnnnnnnnnnnnnnnnnnnnnnnnnnnnnnnnnnnnnnnnnnnnnnnnnnnnnnnnnnnnnnnnnnnnnnnnnnnnnnnnnnnnnnnnnnnnnnnnnnnnnnnnnnnnnnnnnnnnnnnnnnnnnnnnnnnnnnnnnnnnnnnnnnnnnnnnnnnnnnnnnnnnnnnnnnnnnnnnnnnnnnnnnnnnnnnnnnnnnnnnnnnnnnnnnnnnnnnnnnnnnnnnnnnnnnnnnnnnnnnnnnnnnnnnnnnnnnnnnnnnnnnnnnnnnnnnnnnnnnnnnnnnnnnnnnnnnnnnnnnnnnnnnnnnnnnnnnnnnnnnnnnnnnnnnnnnnnnnnnnnnnnnnnnnnnnnnnnnnnnnnnnnnnnnnnnnnnnnnnnnnnnnnnnnnnnnnnnnnnnnnnnnnnnnnnnnnnnnnnnnnnnnnnnnnnnnnnnnnnnnnnnnnnnnnnnnnnnnnnnnnnnnnnnnnnnnnnnnnnnnnnnnnnnnnnnnnnnnnnnnnnnnnnnnnnnnnnnnnnnnnnnnnnnnnnnnnnnnnnnnnnnnnnnnnnnnnnnnnnnnnnnnnnnnnnnnnnnnnnnnnnnnnnnnnnnnnnnnnnnnnnnnnnnnnnnnnnnnnnnnnnnnnnnnnnnnnnnnnnnnnnnnnnnnnnnnnnnnnnnnnnnnnnnnnnnnnnnnnnnnnnnnnnnnnnnnnnnnnnnnnnnnnnnnnnnnnnnnnnnnnnnnnnnnnnnnnnnnnnnnnnnnnnnnnnnnnnnnnnnnnnnnnnnnnnnnnnnnnnnnnnnnnnnnnnnnnnnnnnnnnnnnnnnnnnnnnnnnnnnnnnnnnnnnnnnnnnnnnnnnnnnnnnnnnnnnnnnnnnnnnnnnnnnnnnnnnnnnnnnnnnnnnnnnnnnnnnnnnnnnnnnnnnnnnnnnnnnnnnnnnnnnnnnnnnnnnnnnnnnnnnnnnnnnnnnnnnnnnnnnnnnnnnnnnnnnnnnnnnnnnnnnnnnnnnnnnnnnnnnnnnnnnnnnnnnnnnnnnnnnnnnnnnnnnnnnnnnnnnnnnnnnnnnnnnnnnnnnnnnnnnnnnnnnnnnnnnnnnnnnnnnnnnnnnnnnnnnnnnnnnnnnnnnnnnnnnnnnnnnnnnnnnnnnnnnnnnnnnnnnnnnnnnnnnnnnnnnnnnnnnnnnnnnnnnnnnnnnnnnnnnnnnnnnnnnnnnnnnnnnnnnnnnnnnnnnnnnnnnnnnnnnnnnnnnnnnnnnnnnnnnnnnnnnnnnnnnnnnnnnnnnnnnnnnnnnnnnnnnnnnnnnnnnnnnnnnnnnnnnnnnnnnnnnnnnnnnnnnnnnnnnnnnnnnnnnnnnnnnnnnnnnnnnnnnnnnnnnnnnnnnnnnnnnnnnnnnnnnnnnnnnnnnnnnnnnnnnnnnnnnnnnnnnnnnnnnnnnnnnnnnnnnnnnnnnnnnnnnnnnnnnnnnnnnnnnnnnnnnnnnnnnnnnnnnnnnnnnnnnnnnnnnnnnnnnnnnnnnnnnnnnnnnnnnnnnnnnnnnnnnnnnnnnnnnnnnnnnnnnnnnnnnnnnnnnnnnnnnnnnnnnnnnnnnnnnnnnnnnnnnnnnnnnnnnnnnnnnnnnnnnnnnnnnnnnnnnnnnnnnnnnnnnnnnnnnnnnnnnnnnnnnnnnnnnnnnnnnnnnnnnnnnnnnnnnnnnnnnnnnnnnnnnnnnnnnnnnnnnnnnnnnnnnnnnnnnnnnnnnnnnnnnnnnnnnnnnnnnnnnnnnnnnnnnnnnnnnnnnnnnnnnnnnnnnnnnnnnnnnnnnnnnnnnnnnnnnnnnnnnnnnnnnnnnnnnnnnnnnnnnnnnnnnnnnnnnnnnnnnnnnnnnnnnnnnnnnnnnnnnnnnnnnnnnnnnnnnnnnnnnnnnnnnnnnnnnnnnnnnnnnnnnnnnnnnnnnnnnnnnnnnnnnnnnnnnnnnnnnnnnnnnnnnnnnnnnnnnnnnnnnnnnnnnnnnnnnnnnnnnnnnnnnnnnnnnnnnnnnnnnnnnnnnnnnnnnnnnnnnnnnnnnnnnnnnnnnnnnnnnnnnnnnnnnnnnnnnnnnnnnnnnnnnnnnnnnnnnnnnnnnnnnnnnnnnnnnnnnnnnnnnnnnnnnnnnnnnnnnnnnnnnnnnnnnnnnnnnnnnnnnnnnnnnnnnnnnnnnnnnnnnnnnnnnnnnnnnnnnnnnnnnnnnnnnnnnnnnnnnnnnnnnnnnnnnnnnnnnnnnnnnnnnnnnnnnnnnnnnnnnnnnnnnnnnnnnnnnnnnnnnnnnnnnnnnnnnnnnnnnnnnnnnnnnnnnnnnnnnnnnnnnnnnnnnnnnnnnnnnnnnnnnnnnnnnnnnnnnnnnnnnnnnnnnnnnnnnnnnnnnnnnnnnnnnnnnnnnnnnnnnnnnnnnnnnnnnnnnnnnnnnnnnnnnnnnnnnnnnnnnnnnnnnnnnnnnnnnnnnnnnnnnnnnnnnnnnnnnnnnnnnnnnnnnnnnnnnnnnnnnnnnnnnnnnnnnnnnnnnnnnnnnnnnnnnnnnnnnnnnnnnnnnnnnnnnnnnnnnnnnnnnnnnnnnnnnnnnnnnnnnnnnnnnnnnnnnnnnnnnnnnnnnnnnnnnnnnnnnnnnnnnnnnnnnnnnnnnnnnnnnnnnnnnnnnnnnnnnnnnnnnnnnnnnnnnnnnnnnnnnnnnnnnnnnnnnnnnnnnnnnnnnnnnnnnnnnnnnnnnnnnnnnnnnnnnnnnnnnnnnnnnnnnnnnnnnnnnnnnnnnnnnnnnnnnnnnnnnnnnnnnnnnnnnnnnnnnnnnnnnnnnnnnnnnnnnnnnnnnnnnnnnnnnnnnnnnnnnnnnnnnnnnnnnnnnnnnnnnnnnnnnnnnnnnnnnnnnnnnnnnnnnnnnnnnnnnnnnnctggcgcgcacgtgaccggggtcggggcagggggcggggccgagcgggagaccagagagccggagccggatcccgatcccgagtccgagccgccgccgccatgagctgccccgtgcccgcctgctgcgcgctgctgctagtcctggggctctgccgggcgcgtccccggaacgcactgctgctcctcggtgagtgccggcgccgccccccsacgcccacctgcggtggcccggggaagtggccactggcctcctccccacccgtggtcaatgctgaccctagtgtgccctgcccttgtatcccccgctgccattccctctcgtcctcctctctgtgccgcccccagactcttcacgggtgtctccccagagagggcagcaagggctggaggagtgagccccagcatccagcacccctacacttacctcgtgccgcctgtcccaccctcctctgaccctgcccagccagggctcaggggtccacggatctcaaatccctcttgggaggggatcccagaggaggggctggtgctccggtccccagagactgcagacagggtgccctcctggctctcatttccgaccccagagcctgtgtctcagctgtcttttcccttatcccaagggcacagccctccaccacccacccaccaccgtctcccccaaccccagtccctctcagaaaccccaggttcctccagagcaagcaccgtgctgctcacaagacttccggtttaggtaatcaaggctctggctcatgacaagtgacaaggccaaacccaaggcctgcgattctttccccttctgaggtctggcgccctgccagttgccctctttctgattaattttgtggtctctgggcgggggttcggctcactgtaacataaacagctctcctgccaactcctcgcctcccagaaacacagcagagaatctgcatggaccctcacctgcggatcaggattcctacaggaggctgtcagagtccaggctatgcggcccctgggctagggcctttcttagcacggactgccatggatcggcttaaacagaaatgtatttctcacagttctgtgggctgaaaatccaaggtcagggtgccagcttggttgggttccagtgagggtccactttcggcttacaggtggtcaccctctcactgtttcctcacatgacaagcggatgggggtggtctcacttccttttcctttctttttcctttctttccctttttttttttttttttttttttttgtgagacagggtctcactctgtcacccaggctggagcacagtagcacaatcacagctcactgcagcctcaacctcccaggctcaagcgatcctcctgcctcagcctcccaagtagctgggacctcaagtgcacatcaccatgcctggctaatttttgtattttttgtagagacaaggtctcactgtgttgcccagactggtctcgaactcctgggctcaagcaatcttcctgccttggcctcccgggtgctgggcttacgggcatgaaacactgcacccggccctctctttcttttcctttaagtccacagtcctgtcagatcaggatctcatccttatgattcatttacccttaattaaggaccctgtctccagatacagtgatgttgrcgttagggcttcagcatatgaattctgggaggacacagttcagaccatagcaggcccacagccaagtgccgagacactctgggtttggagaagggcagctttcttcctggcctgcgggtacggagcacagcccatcccgctctccctccaggtttaygtggctgccatgtgctcacacctgtgggtactgtggggtggaggatggaagcccarctggaaggtgcccagcctcctctgtccatccatggaccacattgcctctgagggagctggggaaagtgttggtctgggggttcccaccagcctctcctgtggtgcccccagtgtcctctactccagagcagggggaagaagcttggtgtggttgtaggagttcagcggcctgtccctgtttcctgctgcccagtgtgtggccytgggcactgcacctcacctttctgggcctcagctgctttgtgtaggatgaaagggttgaaatagacaacctgcaaggtcactaggcctttgagatggcatcagtgagaagcagcggtgggacgcacacacatagagctttagacgcgccctgggcgaggctctcctgccctctgccccatgcggtttccgctgagcccagaattgcccagcagttctgtggccatgcgctcagccgctgtctgcctaaatgcctagccggctaacacgcccacccaggtagcatgcctgctggggtatcatcaagcttgttgggtcatcatgcctgcatgagtatcttgcccacttgggtaccatgcctgcctgctaacatgcctrtgcaggtaccaggcttgcctgggtaccatgcccatctgcttatacccaccagctatcagtccagcctgtgtaccatgcccacctgccaacatacccaccgggtatcatgcctgcttagggtatcatcaagcttattgtggtatgatgcctgcttatcatgcccacttggataccatgcctgcctgctaacataccaaccacgcatcatccctgctggataccagtctacctgctaacatacccactggtatcaggcctgcctgggtaccatgcctacctgcttatacccaccatctatcagtccagcctccataccatgctcacctgccaacatacccaccatctatcaatcagtccagcctccataccatgctcacctgccaacatacccactgggtatcaggcctgcctgggcaccctgcctgcttgctgatatacccaccaggtattgtgcctactaggtaccatgccttcttgctaacatacccagtgggtatggggtcttctggatacatgcctgcctgctaacatacccaccaagtatgagacctgctaacatgccctctgataccatgcttgcctgatgtacccactcgggtgtcatgcctcctaggtaatggagtgctctgtcacgatagcatttcgcgctgagtgttcacactgagccagtaccatgcccacctgggtgtctcgccttctggcatcacagtcccagcctccctcactcccagtgctgtttctcgtgaccgcagccgaccgtgcactctctgtctcccacctcacgcagcggatgrcggaggctttgagagtggcgcgtacaacaacagcrccatcgccaccccgcacctggacgccttggcccgccgcagcctcctctttcgcaatgccttcacctsggtcagcagctgctctcccagccgcgccagcctcctcmctggcctgccccaggtgaggtgcaaggggcgggaggagggggtgggcagggagtagacaggctgcgtccggggcccaggcctctgccacgtctcccatccctgggatcccggggggtgttgcccactttccctcccacctccaggaggaggcacagcctatggctgtgagtgcagactaggggctccgactcacccgccagccctggctgcactgctgtgtgtggccttgagcaagtcacctacctccttgtgcctcagtttcctcatctgtaagatggtgggtgtaatgagatgccactctagttatggagattggcggsgctaatgctttgtatgtaaacacttagtgcgaggcctggtgggctcactcagcgtgaaccgccatggccacagtgtcccaggaacgccatggtgcagggagcggacaccgttaaggcacacatgctcctattttactgtggtaaaatgcacaaacatcaacattcccatcttagccatttttcagcgcacagttccggggcattaagtgcattcacagtgttatgcagccatcaccaccatccatctccagaacttttccatctacccaaacagaagctctgtcccatgaaacaccagctccacattctccctccccatcccctgtctctatgaatctgactgctccaggggccacataagagtggaatcacacaggactagtcctttttttttttgagttggagtctcactctgtcacccaggctggagtgctgtggtgcgatcttggctcactgcagcctctgcctccccggttccagcgagtctcctgcctcagcctcccgagtagctgggattacaggtgcgcgccaccacgcctgtctaatttttgtatttttagtagagatggggtgtcatcatgttggtcaggctggtttcgaactcctggcctcaagtgatctgcccgcctcgacctcccaaagtgctgggattacaggcgtgagccaccgagcccggccccccttttgtgtccttacttcactcagcacaatgtcctcagggttaaccatatgctgtagcacgagtcagaacttccctcctcttcagggctgactcatattccagtggatggatgggccccgtattttgcttctccatattcatccgtcagtgggcacttgggttgctgctaccctttggctgttgtgaataaagctgctatgaacatgggtgtttaaggacacttgttcttttagtctcactctgttgcccaggctggagtgcagtggtgtgatctcggctcactgcaacctccacctcccagattcaagccattctcctacctcggcctcccgagtagctgggactacaggcgcccgccaccacgcccagctaatttttgtatttttagtagagacgaggtttcaccatgttggccaggctggtctccatctcctgacctcgtgatccacctgcgttggcctcccaaagtgccgggattacaggcgtgagccaccacgcccggccggcrgtctgagtttttaaaatgtacacatcttttacaatataaaataactaggtaataaaacaaggcctgaccctgtctttttcactctgtaacgtgtgatcataacagaagagttcaaaagtacggatacgcaaaaagaacatcaaggccaccctcgtgtcggtgcacgccctgcaggtccccttctttctggcgaagtcctcctttcacgggagggacccatgggcctatcgggcagggagtgggaggtacagccagtgtctctgggtgctggccactcgaagtctaaatcagggccccgagaaggcccctggggatgggagggccrtgggagaacaggtgcggcaggcgggctctggctgtccgggggcccyggacctcatgcgcctttgctggcagyatcrgaatgggatgtacrggctgcaccaggacgtgcaccacttcaactccttcgacaaggtgcggagcctgccgctgctgctcagccaagctggtgtgcgcacaggtgaggaccccgtgccgaggacagggcgtggggtgaggcacagaggccaggccagagcccaggaggttcggcaccttgtaccaaggcacgctcagcccccgtggcctgcccttagctcttgtcccaaaggatctgggcctgggtctcctggctgggctgtgtgtccacgagaacccacagygcgcttagggccgagaggggcagagaagggagcagaaagggttgggaggctgaagggactctggccaggcctctcttcccgcccaggcatcatcrggaagaagcacgtggggccggagaccgtgtacccgtttgactttgcgtacayggaggagaatggctccgtccyccaggtggggyrgaacatcactagaattaagctgctcgtccggaaattcctgcagactcaggatgaccggtatgagtcggggcccctgccccttccccctggcggccggtaccagagcacagcccggagtcttccggcgggatgcatgggcccccacgtggctcgaatgggggcaggggagaaggttccaggtactcgagttagcctggtcagagggagaagggacrtggggaaactgaggcagtgagggtcacaggttgacttccagatacagaggaggaggcagagccgaggggcttcctgtgccacgtggcagtggccccgcagccttggcaatgagcctcctcccgtgcaggcctttcttcctctacgtcgccttccacgacccccacygctgtgggcactcccagccccagtacggaaccttstgtgagaagtttggcaacggagagagcggcatgggtcstatcccagactggaccccccaggcctacgacccactggacgtgctggtaggacggcccctccygtgtttcaggacgcccgtcagccctgggtcggggaccctggcctcctacgagcttgcagccctggccctagatgatgaagaaagaggctctgaccaaatcggattcaggttcccaacctcggggccacagagagaaccgtagrgagacggggtggtccggagtgaggctgttctgggctaacccatttgcaggaggccccggggagaaggctggacaccrctcccccggygyctgttctaagcctggctccccaccgcctgccccaggtgccttacttygtccscaacaccccggcagcccgagccgacctggccgctcagtacaccaccgtcggccrcatggaccaaggtgggcttgcagaaccgggcactggagggggtgccacggccggggtcccccatcctgggccagcgccctcttaggtcacggcataatgtgggtgagggtcccagtgtggcaggccctgtgctgcagctggcagagcccacattgagaggaggggcctgtgggtggcatcaggacccaaccccggggctgccctgatgtggacctgctcctgggctggggccttcgggtgccccagaggttgcgtgaagacttcagatatttccagtcacaggacctgggtcagatttgggggtttggagttccttagcatatgcagatggagatcttgaggtctgtgagttttttgtggttgatggcttacagcaaccaaaatttgtactcccacagttcaggaggccagaagtttgaaatcaaggtgtcagcagggccatgctcccctgaaggcctaggggagaccctgcctttcctcttccaacttctgggggctgtgccagtgctgggcgttcctgggctggcggcagaatcgcccccatccccgctgaagccttcacatggccttttttcctgtgtctcctctttgtgtctccacttcttctttttttttttttttgagactgagtcttgctctgtcacccacgcgggagtgcagtggcgcaatctcggctcactacaaccaccacctcccaggttcgagcgatttttctgtctcagcctccaaagtagctaggactgcaatcgcaccgcacgccaccaygcccagctaatttttatatttttagtagagacggggtttcaccacattggccaggctggtcttgaactcctgacctcgtgatccgcccacctcagcctcccaaagtgctgggattacaggtgtgaggcaccgcgcccggcctgtttccgcttcttataaggaccccgtcgggtttagggcctacctgagcacttcaggatgattttgtcccaagatctttattcgtgaagttcccctttccaaacaagaaccccttcacagattccagcacacatgtcttttggggtcagggacgacaggaggtcaggacctttgccatttccctattggtgccattaattcttagtgagctgggaaggagcgggtatagaggaagccttgtcctctggccccagctgggaaggagcgagtatagaggaagcctcgtcctctggcccctgccctatttgctccatgggacagacacgagattccggagaactcaaaagccggcgggcaccagggagcagctgcctgggggtgacacagaagtgccaagggatggctggagtccctggaggcccattcgaggcctgctcagggaatgggagctgggcggagctgggcaagagctgggcaagagccagggccattgggaagaactacagggtgctttcgaatccggaaagcgctggagcccagcggccggatgcagcagcaggtgggtctacacacaccacccgctgcctccctccgtgtctgcggctgagctctgcttctcggcccctcaccrcaggagttggactggtgctccaggagctgcgtgacgccggtgtcctgaacgacacactggtgatcttcacgtccracaacgggatccccttccccagcggcaggaccaacctgtmctggycgggcactgctgaayccttactggtgtcayccccggagcacccaaaacgctggggccaagtcagcgaggcctacgtgagcctcctaggtatgcctttgtctgtctccgtcaggaaaggtgtgggagtggatctgggacggggccatgacctgtcagatgctgctccacacccattaccwaatgtggctctcatatcatctgggtgaggaagggactgtcactcccactctacagaggaaaagaatgaggctcagagaggtgaagtaagctgctcaggattgcacagctggtaagcactaagctaggattctcgcytggatcctgctgctttcaaaaccattgccttttccccgcctacctccgatgagcttcagaatcacctgggatgcttgttaatatcyaaattgcaaatcccagggtgtccgattcmgtagatcttggcgggctcaagaatttgcatgtctgacaagttcccaggtgatgccgatactgtgggcctggggacccctctctgagcatccgtgcaccccatcctgccttcctgggggacccaaagcacctcatgaccctgctcattcctaaaaagacctaggacatctagtcccatgttatggatgtgcagacaaagacacgggtgcaggaagactttgtgaggggctcggggtgaccccttcggcacagggcagaggctcgtgtgtcctgcccactgcctggcagagcctccaggtggggtgggcccgggacagcaggaaactcaggttccctttccctccgagctcgcggcccacatctctcttggggcccacatctctctctggccccaaatgatgagccaggagcactgtggccacacccaccacaggggctggagtacacgagctaccaaaaaggagacttcttttccagtccatgggattttagaaggatcctaaatgtcaccgaatcagggcctcttgttataccattcaaggcactgaggcccagagagatgacgtggcggtgagaggtgtcggctcgacaaggcacctcccgctgctgattggattggagaagggagccgcccagagtggcgtaggttcggcccttccgagggcagctcctgtgtgctgagggctctgctgctctgagatgccgcgtcccttccagacctcacgcccrccakcttggattggttctcgatcccgtaccccagctacgccatctttggctcgaagaccatccacctcactggccggtccctcctgccggcgctggagsccragcccctctgggccaccrtctttggcagsyagagccaccacdaggtcaccatrtccyaccccatgyrctccgtgcrgcaccggcacttccgcckcrtgcacaamctcaacttcaagatkccctttcccatcgaccaggacttctacgtctcacccaccttccaggacctcctgaaccgcaccacagctggtcagcccacgggctggtacaaggacctccgtcattactactacyrggcgcgctgggagctctacgaccggagccgggacccccacragacccagaacctggccaccgacccgcrctttgctcagcttctggagatgcttcgggaccagctggccaagtggcagtgggagacccacgacccctgggtgtgcgcccccgacggcktcctggaggagaagctctctccccagtgccagcccctccacaatgagctgtgaccatcccaggaggcctgtgcacacatcccaggcatgtcccagacacatcccacacgtgtccgtgtggccggccagcctggggagtagtggcaacagcccttccgtccacactcccatccaaggagggttcttccttcctgtggggtcactcttgccattgcctggagggggaccagagcatgtgaccagagcatgtgcccagcccctccaccaccaggggcactgccgtcatggcaggggacacagttgtccttgtgtctgaaccatgtcccagcacgggaattctagacatacgtggtctgcggacagggcagygcccccagcccatgacaagggagtcttgttttctggcttggtttggggacctgcaaatgggaggcctgaggccctcttcaggctttggcagccacagatacttctgaacccttcacagagagcaggcaggggcttcggtgccgcgtgggcagtacgcaggtcccaccgacactcacctgggagcacggcgcctggctcttaccagcgtctggcctagaggaagcctttgagcgacctttgggcaggtttctgcttcttctgttttgccccatggtcaagtccctgttccccaggcaggtttcagctgattggcagcaggctccctgagtgatgagcttgaacctgtggtgtttctgggcagaagcttatcttttttgagagtgtccgaagatgaaggcatggcgatgcccgtcctctggcttgggttaattcttcggtgacactggcattgctgggtggtgatgcccgtcctctggcttgggttaattcttcggtgacactggcgttgctgggtggcratgcccrtcctctgscttgggytaattcttcggtgacactggcgttgctgggtggcgatgcccgtcctctggcttgggttaattcttggatgacgtcggcgttgctgggagaatgtgccgttcctgccctgcctccacccacctcgggagcagaagcccggcctggacacccctcggcctggacacccctcgaaggagagggcgcttccttgagtaggtgggctccccttgcccttccctccctatcactccatactggggtgggctggaggaggccacaggccagctattgtaaaagctttttattttagtaaaatatacagaagttctttttctgaactcatttatgatgataccaacctgaattctagaacagcttcctgattcttggacactgctgtcaaaatgacattcagtctgcaacagccccaggaggcaggggcaaggccaggtgctggcggacctgggtcctccccgagccctgaaggtggagtaaagatgtttggcccaagaagggctggggtgcaaagccaggtcaggggaaggcagagtccgctgggccttgtacgggggtactggtgccaggcttctctgggacacccccaccgaacaggcacaggggccacggggcacagacccactgaaagtaccgtctccaccacgcagaggctttatttacaagtaaacacactggtctctgtaaactggagttcctgaggcatcgcagcctcagaagctgagaaaaggtggccagcgtcacagcatatgtgggcttctgcctctgccccgggcaagggtggcagcgaccttggggaccacccaggcgccccacccgctgcctctgtgcttttggtcactccaaaagcctttgacacatcaaaatgtaaaagggaagtgcagcccccatagatttgaatcgggcctgcagacaggcggttttccagagaagtccggggcctccggttctagggaaggcatgggaagacgtccctcctgtcccactgcagaaacattctcagggtttccagttcagaccatgccaagcctggtaaagggtgaagatgtttccacagaaaagtgtgcagttacaagtggcttcactgtgtgtgacctgcacgtggtgagggttcaaggttagaccccagccagtggggagagccggcctcatgtgccaaggagcccacagctgtgccaagagggcctgggctgaggaacaggactgcattaacaggcacacagaagcccccacagtcccgggaaggggcacggtgcatcatcgggggctctgctccgtccacaccaccttcttctgctcgtcggcgatggcctggcggacacagctgagcaggccgtccaggtcgctccagccgtcaggagccaggctgctgtatagacagggcgccyggtccaggtctccctcctcctgcctcgcagcctccaggagctgctcctctgaggtgcccaaccgctgtaggcccttcctgcacaggccagagttggggggggcgggctcaggggagagcaagggcccaggagccctggctagggtagtgatgacatgcacccaaacacccctaaacacaggtggcctcgctttgaggggaccttgtaaagaaaataggccccaggccccagtggtgggaggcaggttgtctagaacacagccttgcttcctggagtagaaagggcacagtagcaggacatcttggtctgtccccaggaaaccaagtaatttttttactttttttttttttgtccttagccgacaaggattagattgtgctagccaagcaccagtaagtggagggtcagtggagctgaggccgggtggggttctggccttacaatggtcctctgagctgctcttgggggagggagtgccaatttgttaatttacaactttaaatttcaattataaaatgtcattttccagtgactaggctacttttgcccactgtaaaaggcaccgtcatcctggtatcaagattctggagaggccagatttgaaatcaagtttgtttggtaagcgtgaaatcagagcagttgttgttgttgttgttttgttttgttgagacagagtctcgctctgtcacccaggctggagtgcagtggcgcgatcttggctcaccgcaactccacctcccagttcaagtaattatcatgtctcagcctcccgagtagctgggattacaggcgcccgccgccacacctggctagtttttgtatttttaatagagacagggtttctccatgttggccaggctggtctcgaactgctgacctcaagcaatctgcccaccctggcctcccaaagtgctgggattacaggcgtgagccaccacgcccggccaaaatcaggggaatctcatgagcaatcagcggggcccttgtcccaaagttgtgcggaaacggccctgtcagcgcctcagcttcctgcaaaccgcagagcacactccagaggcacctgccgtgggctttgggggagcccaggagccgcttcgaagcccctgcccagcccccagcgtgcacctacttgagcttctttgccatcttctcgttgacagagacgtggatgacgatggggaagatgtccatcctgtgcagggtgcagacactgtccagctggacgtccaggagggcatgggtgttctttgtgggagggagagaagaagtgagtcaagatcacaggcctcagaggaagcaaagggagccaacgcccaggtcagaagggccctccggacaggctgagggcagggcaggagctgggcagagctgaattttgtagaggagatgagggaatagagcttgccactttcttctctcttttttttatttttattttttatttttttgagacggagtctcgctctgtcgcccaggctggagtgcagtggcgcgatctcggctcactgcaagctctgcctcccaggttcatgccattctcctgtctcagcctcccgagtagctgggactacaggcgcccaccaccacgcctggctaattttttctgtttttagtagagacagggtttcaccgtgttagccaggatggtcttgatctcctgacctcaggtgatctgcccgcctcggcctcccaaagtgctgggattagaggcgtgagccaccgcacccggcccacttttaatttttttagcttttaaatgttttgtagagacgggtgtctcactgtgttgctcaggctggtctcaaattcctgggctcaagcaatcttcccgcctaggcctcccaaagtgtggggattacaggcgcgagccactgtgcccggctactttcttctctttttattttttaattttttttagagacgggtctcactgtgttgctcaggctggtcttgaactcctgggctcaagcgatcctcccacctcsggttcccaaagtgctgggatgacaggcgtgagccccaggcccagctgagtttgccactttctaaatgaggctgtgtgctatgcagtattaagagtttccatccctttgatttttcactgggaaaatctagaaattgtgagctctggggatgaggtgaacttggcatggagctccgccagcccctacaggaggcacgcagatgccagactcggcttcccgtgcctgtgcagacacaaagctgtggttcacggggagctgcttttcacgcgtttgcgccttcaaacgtggagagtgttgttagctcggatttattcattctcgaacaaatatctattaaacatcccccaagctgaggaaactgagattcaaggagttgggagacctcacccacagtcacgtggatcctaactggctgagatgagttttgggctcctgctgggctgttgggacccagaggtcggcgacaaggtcacccaggtctcaggtcggtccctgtacctttatctcatccccctcctctgcattcctgaaacccttcccaggacagctcccctgcccaccccgcccttgacctcaccttttccatgagggactccacagcatggcgggtcacccagcagyggcccccggacacctctccctcctggatgatgtcccctctctggctccaggcctcatactcctcctggctcaagtactctacaggtgacattggacggggccatcatagaccagctgtgtgggggtctgggggagtcccatggtaaacacccctgtccccgtgaaccctgccagcactgggagaagctcttcttaggatgtccactttacaaacctgaccctgcacaccccgctctgtgccctgcacctccatcctgaactatctggacacagcaggtgagtgtgggaatgtgcgtggtgggggagggaaggaggagggaggaaggggaggaaggagggaggaaggggaggagggagggagggaaggtggaaggggtagagggattcccaggcaacagcatacctgccaggcacttcttaaacccttggaggaggcacagtttctcgctcaggatcttcccaaccgccctgggcacgaggagcacaggccggggccgggcgggtcgatggggccrcaccagggtatagggcaccagggtgaggcagctctcggcccagaagcacgtgctggagcctgtggaggagaggatcctgagggtgggtgaggctgcggcagcccccagccagcctaccctgccccgggagggactgggtctgctttgctcactgcagcagccccagcacctagaattccaggggcacaggctcagcggtcacaggactcactcccagttccatagcccctggctgagcggctcctttgcacgggggttacacagctctgtggctctccagggactgctttgcagcctgcaacttaatcctgtttcctataggcccaagggaggatggcggaagccagggttttcttccttccaaaggatctgggagagtggcacccttctcctcagccatcctccagggcacagggtcctagccctccctctgtcctgtactcctctcctgaaattttttttttttcctgagacagagttttgctcttattgcccaggctggagtgcaatggcaccatctcggctcactgccacctctgcctcccgggttcaggcgattctcctgcctcagcctcccgagtatctgggattacaggtgtgcgccaccacacccagccccatgattcttgaagaccagatcctggcctaaatgagtggcatccccctgccccagctgaccaactagcagcagctcccaaagcccctcacccrcttggagccagyggcccctgtgccagctcaccaggcctcaccctccatcctgctggggtccaactggcccctgtcaaaggacaaacgcagagggctggccttggctttgtccatactgacgatgcggaccagcttctgtggtcccccagaagatggctaaaggagggacagagaaaggatgaggaggagctgttgaagccatcaacaggaatgggaattcaggggagatgattggcactagggcgacctgggagtgatgcagaggcgcagatgctctgagaacagcctgaggtgtgtctgcacttgtgcaagagcctgcaggctgggcaggggctgcagaccctgccctggtttgaaggggtgcagaggagagacaggtggggttaccctccaatcagcagcccactctccacacagtgcctcctgccaccctgccagcaccgagcccctcttccagcccaccccagtggggtccaggcccctccctggagcctcaccttgcgggtcacggtgyactgctgagtcatgtcctggatgagggctatgagctgctgctgagccctgcagagaccagcagaggccctgacccagctgcctcctgccaggtgagcagggcaggggagagccgagcaggggagagtgggggagatggccgggtgggagagaagggcctccacctagagctccacacatccctttgctgcaggctggagcgctccatcctggcggccatgccagtctccagagctttcaaaagactccagggcctcggcccacccctggagatgctgatttacttgtcctggggcgggacccagggggtgctgttgagcagccagcgtacagggccccactccaggacctcaatattcatggtgggtccctggcctgcagcctggagtcaccgagagagctgttagaaatgcagagtgccaggcctctccctggacctgctggctccgatccccaggggacttgagtttgcaatgagtgatgggggtgctgagctcaacactcctgctttctagcactgtgcgttccgtgcacttgaaacttggagcctcccataggctgatctagaacaatggtttccttttctttttttttttttttgagacagagtctcactctgtcgcccaggctggagtgcaatggctcaatcccggctcactgcaacctctgcctccggggttcaagtgattctcctgcctcagcctcctgagtagctgggattacaggcacctgccaccacgcccagctaagttttttgtatttttaatagagacagggtttcaccaggttacccaggctggtctcgaactcctgacctcagatgatccacccgcctcggcctcccaaagtgtttggattacaggtgtgagccaccatgctcggcctagagcagtggttttcaatggagcaaggcagggggcaatgtcactccccagggagggtgaccagctgtccctgcttgcccaggaccgaggggcttccctgcaagtggggctttcag

SEQ ID NO: 95432 - DNA, 29880 bp, Homo sapiens
  misc_feature (1)...(29880): n = A,T,C or G
accatcctcactaacagggtgaaaccctgtctctactaaaaatacaaaaaattagccagttgtggtggcgggctcttgtagtcccagctacttgggaggctgaggcaggagaatggcatgaacccgggaggcggagcttgcagtgagccgagatcacgccactgcactccagcctgggcgacagagcgagactccatctcaaaataaaaaaaataaaaaataaaaaagtttgctcgacttggaaaacaaaacagaaaggaacagcaatattttatgcaaaaagtcgtaaaaagattatttcagtctttcattagtctatacaattaatttctgttttgctcaatatttaagaacacattagctttccaaaagagtcttggaagcttttttttcctctctattttaatggcacactttccaaagttatcagacactcgcatttaagagtaattgtcagcatcctatagctggttataaaccttcttttgaagaggattaaaacaagacaataattgtctctgaatgacaaaaaagtcttaggatagccacagtcaaagatgcaattgacaaggaaatttcattacttctgtagcatacaattttacataacaattataattattactgataacatacactaagtcaccaataacatacactaggtcattataggaatttcccataattttagaatgcataccaataatatatttatacaaatatggtctaaagaaagccaaacaccatttcatacttgataatgcttcctgtatgattttaatataccaaataagccaaataagtctcttttggactttagggtttttaccatctaaaatgattaatcaggtcagaaaaagacatatttagaatctgattttggaaagttcgtcaaatatcaaaagtttaaaacacttgatattataacataaaattccaggtcactgtaagtcatttatttagccaaaatgttaactcaacaatttaaaaaaggcaaaaggctttactcattgatagagggaagatttagctcttcaaacaatcttttctttcccttctttctcctgtagtttatttaaaaggtaaacaaaaatctttcattatcttttaatattacatgaaaatcttgttcaagagagaaagccaaatttcatctttgcatgagtgtactattgatgtcaaattcaattcctagtaaaactttacagacaaattttcctaacttcaatcagtttgaccataatgtaagattttcataaagcttttataaccctttacaattttttttgttaaagagtagaccaatgctctaagaaaaccctgttgtgcttttattccaatgttcaatttatggaaaaaccaaataatactcctttaactttagccaatatgttaacacagagaattgcttttacaagattagactttcacaaaccttccacgacttgcttagaccttccgctttctcctatctaagaacaactctttaaacttccaaaccaggcaaaaacaccctgccttcccatgccttcttataatcttttaccaaacacacattatactttccttacacactgtgcatgtaaaagtgttcctccagtaacctcagttacatatggtacaatgttaactcttagcaacttttatttttggcgaaaaatttggtaagtgattttatttgtgtaccaggtgtagagcttggggcaccagacaaaagtgcagataaggtctgaccccttccagcatagctaggggcatggctaactccatatgttcccaggccttacatagacgctaatggctccaaagaaggtaaattgaacaattatcaaaagtcagagaagtagtttagtaaacctagtatctgacctgcctaatttagaccaaatgtctaaatttcaaagacatttttattttaccaataatctttaaaactgccttgcttttccaaagatgactaaagtcatgtgaacaaaaaggcattagcattttaatttttctggcaaaatattttatttaagtgcttatttttatttaagccaattaaatagagctcttttatatattttggttgtaaaacatgactcacagggatggtacagaccaagagaaaatacccctccatggtcacaagtcaagctcccaaggacataaaacaagacgagggggaatcctcatccagtttttgtttcagtgacctgaagcaaagttgtcaactgaccagtttgctgggccagcttgaatagtgggcttacaggggtcctagggccacattctatcctatgataccccttttatgacagaatgacacagaaagccaaattcatagcacaaagtacaccagattcatcacagcctaagactagcctcacaaatcctttttcccattcatcaaaaccttgcagaggagacagtgatttttaccattcactcaactggtttgcatagagagagagagaccaaaggcctgactggtaagaaattcttacccttttgccagcatgccaggtttctgggatccctttccctaagcagccctcgtgaccctgctcacagcaccataactgtgggggccaagccacatcgcaaagcaaaaatcacccttttccatttcatggaaccataggaaaagcctctcaattttgcaagatgctacacaacaagttgcatggaggaatcgaatcaacattttccattctggccagaacaaagtgcacttgacaaaacacagacactagccacccccctcagcacccaatatcgacctggcaaggctcaaaacttcccccattggcccctgtagtgtttaatccattcaaagtgggggcggaatgactgccaaccaggagtttcaacaggtggtttttgggcaagatggaagagtagatcatcacccagagtgacagagaagacagacaagggaaaggcgagaacgagagagaggaaagggaagggagaagagtgttgcctgtggtgggttgcagaggtgaggagctcacagaagccagagaaagacccatccatcacagtgacactgaatcaaaagttcagacagctgcttgtcaaaaagggatcttttccagcagtcccatcagctctcaagttttcccctttgggggaggaaaaaaagctccccaggtcccatgatcctgcacatgcctaatcttgtcacccacagccatcagcaaagagggcatggcaaattaatccaaatagaatggcggttaacatcctgcagtgctgaatccatttttaaccaagagggctcttactaagggtggcctctaacattctgaagttgagccttcaacccaagtttgaacaagcattcttgttctttacaaagaggggcctctaactccctgtgtcttaggagggactctaactctcctaatttgggcctctaacccaattccatccattaccctggataaaataccccaccatgtacccaaagttggtcaactggtgctgaagtctatttcccttgggtcagaggtctctccagtgttgtcccttcatggtttctcagcaagatgttatcagaaaggggttccagtccaggccccaagagagggttcttggattttccacaagaaagaatctggggcaagtccgcagagtaaagtgaaagcaagtttatgaagaaagtaaagcaataaaagaatggctactccatgggcacagcagccacaagggctgctggttggctatttttatggttatttctcgctcatatgataaacaaggggtggattattcatgagttttctgggaaaggggaggagatttccttggaactgagggttcttccccgttagaacatctagggtaacttcctgacgttgccatggcatttgtaaatcatcatggtgctggtgggagtgtctttcagcatgctaatacattataattagggtataattagcagcaaggacagccagaggtcactttcattgccatcctggatttggagggttttgaccagcttctttactgcatcctgtttcatcagcagggtctctgtgacccgtatcttgtaacctcctatctcatcctgtgactaagaatgcctaatttcctgggaatgcagcccagcaggtctcatttacccagcccttattcaagatggtgttgctctggttcgaaggcctctgagagagccactggatctcgcaattatagcatacaaggtgtatgtcatgttataaaggttaaaatagacagaattaaacaatatattgtttagggatacatacctatgtgctaaaattataaagtaaggcaacagaatgattaacacaacattcagtattgtggctaccacctcttgggggtagcagggagtacagaacaggaagaacctggagagttttaaagatgcaggaataatgtgttatttcttaagctggaaggcacatgtggatcttttagaaaataaaagattcaaatataattgtcacatgcgtccatgtgaagagattccaccaacgggccttgtgtgagcaacaagactgtttatttcacctgggtgcaagtgggcggagtccgagaaaggagtcagcaaagagtagtgggattatcattagttcttataggtttgggataggtggtggagttaggagcaattttttgtgggcagggggtggatctcacaaagtacattctcaagggtgggaaaaatattacaaagtaccttcttaagggtgagggaatatcacgaagtacattatcctaagggtggggagggtgtattgtcataaggtcaattgatcagtgagggtggggcaggaacagatcacaatggtggaatgtcatcttttgtggttcttcagttgcttcaggccatctggatgtatatgtgcaggtcacaggggatatgatggcttagcttgggctcagaggcctgacaataatgagtattatgtgagacatggttgggactcagtttagcatgacaagaaacattaatgaattcaagaaaggtttgtctcctctccaaaatcaaaaaccaaaagtgcataacagtgtttagcacatttctatttagttaaaggtaatttaagatacgtgtttatgacttgtttggataccatataacatctagtgatcgcctctgggcagggaatacagaacggcaatgggaggcttatttttcattgcgtaccatttatataatttgaattcctcctcttgtgtatcttttactgaacggaaggttttgagagagctgggggaagtagctggtatcaagcaggaaagctgaaggtgcagatgggcagggggctggtgcacccttctgccaagctctcctgccagaggctccacggccaccaggcctttctcagaactttgggatggaggagggcggggccggggaagccttttaacagagtgccctaaaatatctcgggggctagggctacggaggggaaaggagaaatcagagacccttgtttggcaggtttgtcaactgcagattttttgcagggaaacaccccaccgtccccaccccaggacactacagccttagacctccctgatcctggctttggcaactggtcagcagcactctggaggcggctgttttgaagggccaaggagaggggctgcctgagaatgaggatggcagaaaggggcccacggttttccgcctcccaagactacgagggtcgggaggcccatgtaagggggccctcgctcggagaatgagaacttccctccctagtagccttcacccccctcaatgcctcccaccccaaaagatctgctgggcccacgttccagcgcaacgcggtggaagacggccctcatgtgccagtgcggaccctcgcgcccctccagcctgcagccagccggccgctcctccagcgcgcaggcgcaggacggaaaaaaaaaacacaaaaaaacaacaaaaaaaaaacccaaaaaaacacaaaccacagctcccagcagccctcgcgccgtccgcgcgcagccgcagagcagaggctgccgggaacgcgggcccagaggcggggcgagcgcgcgcggggcggaagtcggccaccttcctccgtcccggccgttagcccagccaagcccagccaagcccagccaagccccgccgatcgcgggcaccggagccagccccgcagcgggtgagtgactgcgcccgcggccgccggcgccctgccccagccacgggcccggacccccgtcccggagcctgccgccgccctccgaccctgccgcgtcccgccccctgacccgtcaggcccccttcccgtcccacccgtgcgggatctctgccccctgactcgcagactgggctgggactctgccctctgacctgtgggaaagtccccttcttccgacaggcggtggacaccaccccctctgacttttgggacacctcatccctgggactagcgtggggaccattaccctctggttagtgtgggcacccctcctctctaattagtgtggggaccattcccctctgattagtgtgggcacctcccccctctgattatgtgactcctccccgctctgattagtgtgggacaccccccttctaattagtttggggaccatccccctctgattactgtggggcacctccccgctctgattagtgtggggaccacccccctctgattcatgtggggcacctccccctctggttagtgtggggaccatccccctctgattagtgtgggacgcctccccgctctggctagtgtggggcacccctcctgggaatgaccccctcccaccaccttctgacttcaaatacccctcctctggtctatgcagggtctccttggactgataagggaattttctccctctgactggcacttggtcaaacctgtaacaggccaaccttccccaccccatcccagtccttgctctccctgccctcatccaatttggagccttcctccaggcacacagctcactctcatcttcctgcatgcaaatgattcgccctccccaccatacctgtctcacacccctactgccatccggtctggattctctcatccttggagactggtacctccttgccagtccatgttgcctggtgcctttgcttctccctccgaatggtctttcccttgccctctgtgtaccctaggcttggcacagagcacctgtgaccactcttccatcagcagacacatctctctcccaaacacctttcccccttagtgacccctggaaaagccgtctcttagtgtcccagctccatttctyattttattcttgaggttgtatgccctatggcctttcctaccacattttcaacaaagcagaggtttggaaatgtgaggctcttggtgtcaagtgaatccggctagctctccagtgtaagggcccaaacttgaaacaagtgtcaggtcgtagaaggctcctaaaaggaagcgggtgccgcagcccttcaggatccgctatctcccagctcttcctccctctccctctgaggagctttgctgagaaaggtccctccaggcctggaccacagaccctccctgcagccccaccscaggcctctcagcaggacagtctggctggagcctgtggaacggcagtggggctcctcccaggtgctcctccctgctggcctcaatgagccctctatcctagcacacgccccygctgaaaggcacactgaaggagccaaccctctcccctctggacgtggcaagggtttcctgtcggggcagccccaggcatcttcacggccaggactcaggtgaagcatggatttgtccaggcactgtcatgaggccaccgcagcagtgtggggaccaacttctagtgtcactttttcatgtccaaattaacgtgatcacaaaagagaatgacatgtcacaaggtggtagagggaaccctccactcgcagcgggataggacccctggaccctgggacacctcgctggaggggcacatctgaggcttgacgcttctgattgccagaggtctcctttcttccccttaggctataaccatattttcctagcccatggcagcttagtaaatgtgttggtgtaaaagctcttggtactccagaacgttttcactcacccgtcactgtgcacctggtctgcaggacccccctgagctgcagagtacgtgaggagacccagggtgtggtagcagcagttctcctggccctgtgggtgtttttaccctgccacctggatgtggctttcgaggtgtgtgtgcctgtgcaggctcccccaagtacatatggcccgtcctcggagtctcggtactttctggcaaccgtataggtagataggtagatgtataaatgctgtagtgttttctctttcaaaaacagaagatctgagacttggaactattgtccaggtcctgaaatgggtcagtactatcacaaggaggtcatttttctattgtttgttgaatggtaccagggatgccaaggacacacagcattcattcttttcactcagtgcactctgaactatcgagatttcctggaaagctcttatgaaatgccaatatcaagggaattaraaacttttatattaattcttaagaatgttyatgttgattttccttttactttaatcaagatggttaattaggaaaaaatcatcctggcagtagagaagtctgtttggggagacgttctgttttttgttttggaccctgctcgtctttgtcatgcgtgcagtggtcatgtggagcgcctggttcccaggcaggacgctgctccccgcgttcctctgggatggttttatgggaagtgaagaaggcgttgaagtctggcttaagacttaagacagtgcgtgatgccaccatgtgggagtggggcagaggtgagactgggaccccccagaatggctctgagggtgttgccgggttgagtgaaagtcctggcgattcggcctttgtgtcccgggagccgagcctggaggaaagcgtgaggagagaaggtggcagtaagcaggtgggctcgtgcaggtgccaccgcggtgtggaaggcagccctgatccaggtccatggggcgatgatcccatcccgttattttcacacactctggaaaaggacaccttcccagatgtgtggtgccatttggaatgtgcctttcaactgagaaggtcgcyttttggctaaaattcctccaggtgtaacatcgatgatacaaattaagcagacacagcctctttacaaggcagtaactgcaaaccgtagagggttctgaagctgtgcgcccacaccatagacagtgactggtcctggcccttggaaaaacctggaggctctttcccctcttcctcctgtgattggtggaggaacagctccccgagatgtccacgtcctaccttctgagcctgtgaatatgttacattacatggcaaaggggaattaaggttgctgatcagccggccttaaagtagtgagatgatcctggattttcccagggagcccagtgtaatcacagggtccttaagaacagaagagggaagcagaagagccrgagggagatgatggccaagagccttggggaagtgcagtgggcgggctttggagggggaggaggggccaccaggcagggaatgtgggtgcctccagaagctggaagaggcatgagaatggagccatggcccgtgtgaggcttctgtcccacaggacggtgcctgctgcctgccgtgtgctggatactaggggcggggacaggtgcagaagtcagtcagatcctgagcttgacctttaaggagcgtgctgtctgtggaggcaggatggcctaaccagactccctgtgaccttcttcctttctggtttccttgtactgcccacccccgaggagatttgccgtggaatttgcaggtacaatagttagccttgcaagtgccaaagcaggaatcaggtaacgttttcaaggagtctggcccatagcaggcattaataagtgtttctttgagatgcgccacccgtgttctctcaggcgctgttagcaygagtgtgtgaaggccttggcttctgccttggcygtgctgaagagtctgtaggtcagtggggtttgctctttaccatggcagtgaacacagtgggcactctgaggcctgcctgcctgctctctgggtgtgggaagggaaaggaaggtagctcttctccagagataaggggttggcgcacctgccacctgcctacccgtcccttccaaggaggtgggggctaggatgtggcggcctcttaacaggatgatgtggcttcctgccctgcctggatcctgaaagggaggagcctggcagccctcagtaaacctgctggttctgccacctgtcctattccactcctgcaggaagctggagaaacaaaccctcttggctgtctgctgtccagggagtcgccactcccttcattatagccttgctcagagtgcagcggcaggcctggggatggcctcgggaggtaggtggcccctgagcccttctcctgggaaagggcagcagcagggagacgcctcctgggtgtgcacagagaaaagcacagtttccctaactccccgctccctaactcctcgctctttaactctcacctccctaactcccccctccctaactcccttctccctaactcccctctccctaactcccttccctaactcccctctccttaactcctctccctaactcccccctccctaaatcccctctccctaactcccttctccctaacccccctctccctaactcccctccctaactcccccttccctaacccccctctccctagctcccctctccctaactcccttctccctaactcccctccctaactcccctctccctaacccccctctccctaactcccatctccctaactcccccctccctaactccttgctccataactcccccccagctcccctctccctaactcccctccctaactcccctctccttaactcctctccctaactcccccctccctaaatcccctctccctaactcccctccctgaactcccctccctaactcccccttctctaacccccctctccctagctcccctctccctaactcccttctccctaactcccctccctaactcccctctccctaacccccctctccctaactcccatctccctaactcccccctccctaactccttgctccataactcccccccagctcccgctctccctaactcccctctccctaactcccctccctaactcccctctccttaactcctctccctaactcccccctccctaactcccctctccctaactcccctccctaactcccttctccctaacccccctctccctaactcccccctccctaactcccctctccctaactcccctccctaactcccctctcctgtaacgtcctctccctaactcccccctccctaactcccctctccctaactcccctccctaactcccttctccctaacccccctctccctaacccccctctccctaactcccctccctaacctccctctccctaactcccctctccctaactcccctccctaactcccccctccctaactcctctccctaactgtcctctccctagctcccctctccctaactctcctctccctaactcccctccctaacctccctctccctaactcccctctccctaacccccctctccctaacacccctccctaactcccccccaactcctctccctaactcccctctccctaactcccctccctaactcccctccctaactcccctctccctaactccccctccctaactccccactcactaactcccctctccctaactcccctcttcctaactcccctccccaattcccccctccctaactcccccccaactccctactccctaactccccgctccctaactcccagctccctcactggtggctcccctgcgctctgggagtgtcctgtgggatggacagatgcctccgtggtgccttgcaagccttgcaggtggttattcctcctgtgagtgctcctgtgagtgctctccaggcagcagcaggggtcctgtccctgtaggcccctgagtctgggagatagctggtttgcagccccactgaacaggagagcctggctggccacagaacccatgactttgctgtagtccctgagtcctcttgttgctgattatctaaaatcaaaccattactctgcaggcactgggtttgtcaatcttttcacaataaagcgagcatttaaactgcttaagctttgaggggtgtagggagaagcctcacacgagccccttctggaaaggactttgtccatcttgtgtcttaccctcgccggttcatttctgttgtttctggctggcaacaaacaaaagagcccccccaccccccacccccgaaaaagaacccagctttttaaagaacatgcaaactcttgcctgcagcaggcgccggcagccaggcaccccggcagccagtggtagctcatacaccagcatgggctgtggcaaaggcatctgatttgaaatttttttgcaaaataaaataattccttggggtcctgaaggagagatgaagcccaagggaaggtgttctggtgctgaagttaaaggaattttctggaaggtacacagagttctcttgtcactagaagcagtcccttgtttaaccaaaggtggctgaggcctctggagtctctgctgatgaactacttgcagtcgaactcgatcatcgnnnnnnnnnnnnnnnnnnnnnnnnnnnnnnnnnnnnnnnnnnnnnnnnnnnnnnnnnnnnnnnnnnnngaggagagggggcggggaacacaggggccgcggacagaaggaagacggacaagacgaccggacgaaagggcgccgcaagcggagacgcggacaggcacctctgggtccatgtggtcagaggacatgagcctcccgggtggggagcgtgtgccacggtgtagatgccaggagtctggaataggaaggcgtgcagtgttgcacagcgacctgggagaggtcctgctcctgggagtgcagggggaaaaacccactgaggctttctctgcaggctgagaygtttgtccttcagatggaaggcattgggatctactagacttggaatccagacttgctttttggaaaaattattctgtcagttttgtggagggtgatttgagatggtcttgaccagggatctgtcgagggacagggagtcagtattttcagcctccacagtctgttgcgaccactcaacggtgcagccagactcagcatgccagggaggagtcctagctggctttaatcagccacatctacacaccaggacgtgactacacagcaggccgcgtctacgcaggccgcgtctacacaccaggcagagtctacacaccaagctgcaaccacataccaggccacacaggccgcatctacacactaggcgggagactgcatttggcccacgggtggtagtttgcaaccctcccagcaggcgagagggtacttgtagagtgagtgagaagcagtagcagtcagcccctgtgcacagttctctaaccccatcagcatggctccgggaagtaaactgaggccaagggaagtcccttggctgagcccagatggtctatatcaggggtgtccaatcttttggcttccctgggccacattggaagaagaattgtcttgggccacacataaaatccattgatagctgatgagcttaacaaaaaatctcatctcatcatgttttaagaaagtttacgaatttgtgttggaccacatgttggacaagcttggtctagatcattagaccragactctgagagtcatcagggtgagatggaactggagccgaggctgtgtggatggggagaagggaagcgagtctcaagctgggtgggacacgtggggctggggagggaggagggttaggacgaattgcttcctgggatggctcctgagggccggcactgccaggacagggagttcctgaggaggacctggtttgcggtgcctgtgggtatcggatgaggaggctcagagactaggtcaggctagaaaggcgtgggggtcttcaccttagagggcaggccctgggagaggtcagtgggctgccagcagtgggggccgagaagacctgcctgggaggaggcccacagagagtgcccccctgcctcgaggagggacactgacaatgtgctcactgggtttgccactggtgaaggcttcaggtggctgcttctgaggattagccagagggaaggagagggtgtaggtgtgggtgctcttgtaccatggtgggcgagggggcctgggcgggggtgggaagggacagaggtgccggggactcagggaagggttttccttcattaacagattcgccatttattcagcagcagttgagtgtctgtgggagtgtggggtctggaggtaaaatggtgacaaggtgggcgacttggggcagcctgtggatggaagggaggaaccagaagagcaggtgcccggcggctggggggactgacctgagtggcaggtgtgagccccacccagrggcctcggctgctgaagttggccacagagtggtctcctgggagaagtgggccggagatttgacaggaatggtgaaggtgaggacagtggctctccggagtgctgagggagttgaacagggaagaacatgggggttccaggggctggtgacgacgacacctcacgatgtctgacagcagtctatgcaggcaccgttgttctgtgctggcaagcaccgtcttcccgggcctgcagctcagwtgtggcagctgagcagctcgatctttggggtgcttgatccaggttgtgggttcataatatgcctaaggtggggcccccggtagagtgcagaggggctgttgaagaagtggctaatggctcacctggcatctctttcccttcagccaatgcgtgcagactgtctgctccctgcctggcagtgcgtcaggtgctggggctgtgacagtggccagatccctgccccaggagcagaaataatcacctagccaggcagggacggtgggagagccggagcggcatgggagggagggcgagtgggcaagtcttcccagggagctgatgccccgtaggagagaccgagctgctggtgcgaagagcaggcccgactgttccaggcagggggaactgcaggctctgccagggccagtgtggtcaggggacagaaggaggtctaygtagccagccggcaggcagaggagatggtacagtgtgagggctgagcgggagcagagtgggttcaccccaggacctgaggaagccgctgaagctgggagtgtgccatctgatggatgctacttcatggcaggtggcgagggagtgtcaggggatgttggtggggggcagctggcagggcaacttcatggcggggggtatgggagtgtcaggggcggagaggcaggaggggtggagggaggcagccggcatggcatggtgaggaagggccatggaagaggacagaacctgtccacggagtcaatgctgaggaaggaagacggaggatgaggccagtcaggtttttcgtggtggcagtgccttatgtttttatcgaagtgtatattcacacagaaaagcacatctcccaggatcctgagagagcttgaaccagaccactgtggacacggtggccacccgtcaccactacccttcccaaggggagacgaggagcaagtaggcttgagggaaaagctgcacaggactcgtgtcttgaaatgtctaagacgcatgtcagaaatgcaggtaagggggggtgcgggtgctcgcacctgtgatcccagcactttgggaggctgaggcaggaggatcacttgagcccaggagttcaagactggcctggacaatataacgaggcctcatctctataaaaaaaattaaaaattagctgtgccccaggtgtgttggctcacacctgtaatcctggcactttgggaggccaaggcaggtggatcacctgaggtcaggagttcaagaccagcctgaccaacatggagaaactgcatctctactaaaaatacaaaattagacgggcgtggtggtgcatgcctgtaatcccagctactagggaatctgaggcaggagaatcacttgaacccaggaggcggaggttgcagtgagccgagatcgtgccattgcactccagcctaggcaataagaggaaaactctgtctccaaaaaaaaaaaaaaaaaaaaaaaaaaattcgctgtgcgtggtggcacacgcctgtagtcccagctacttgggaggctgaggtgggaggatcgcttgagcctcagaggttgaggctgcagtgagcgtgatcactgttgcctgggcaacagagcgaggccctatctcagaaaaacaaaaaaagaaatgtaggcgggattggcatagcaggtaagatagagtaattcgagctcagtggagacttcttgggcctggctggggttttgaggccttgggactagaaaaggggcagggcctggatgcagtcagaggaggatgtccagcacggggaaccccagccctgctgccgggaaggccccggtgatcagccctgtgaccacctcagggggtcctgagaggcctgccccttaaagggagcatggagtcttccctgcgggcctggaggaactgctggcagcccccctgtgctgttaggaggatcactctgagcagcaggttccacgtatgtgccttgttcactccttgaacctcaccctggggctaaaacctaggactgtccgaaagttccatgtggaattgtcaccctgtttttgtatcttctcagcccagcaggctgcggcgtggagaagggggtgtctctggtgggggtgtctgttgctggctgccgtgcaccagggcctcgtggtccacatatttggggcccagaattgcacggagccactggagtccccaagcccttcccaggcgccctggcagggaggacagcgtctgcccataaaggcacatgtttgctgctttgttgttttctcaaggaggacccagccagggaagcttctcaggccgggattcactgagctatagttggagggcagagatatggaacctctgcccagggccagtgttctcgatcgragcaccgggagctgtctccccacgccccactgtggcacttggcggctgtccagagacaggcagctctcaccaaggcggcgcagacgtgggcctggtgccccatggctgcactgagccatcatgctgtatgcccgggaagtgggcttggcgacagcagtgaagggctgcagttcctggccgccaccagcaccctgaccctggggctctgccacagagccacgcctggggtggagggtgagctgggagaggcctgcggccgagccaggccccgcagtgagccgagcagttctttggcgccaaggcacagacacgctggcctccaggcagtcagggcagcgcagactctggtmcctgcagtcatttgcattaatagaaaggcgccaggggacagacactgccaaaaacaacaacagatacraaaaagaaggagtgtttttatttggtttggatgtgtttggtattccaatgctgcargagcctaacccagaggaagtggagactcctttactgcacatctgtctgctccaggccaggcactgttctaggagccaggatacagaggtggagacagaaacaaacaaaccgataactgtatacaatactctaacgtcaggtggggacaagggccaaggacccagggacggagggtgatgtctgcagcagggcagtcagggagggcttcctggatgaggtggcatttgagtaaaatacagacctgtaccctgtctatgatcctatcccacttcaccccgtcagccttcccctcccacctgactctcctgcgcttctctctttagagggaccacagagcaccagcctgcatggaacttccttcctcactcagcttyccacgttgccagctgggacaggggagatggagtaattttgctgtggaaagacttcacgtcttgccgaatgaaagtaagcaaagatactgctagagtcrggaatctagagtcgggaattcattaagccaagggagtaagaatggccacagagtagtgaaatactgtttcttctggaaaagtcagcctccagcgcctgcagcttccggaactaagatgtgactgggcttgcggaggcgctgactcctctcctccctccctggctgtgcaggtcccgcctgtctgtcacgctgatgcccgtgcagctgtctgagcacccggaatggaatgagtctatgcactccctccggatcagtgtggggggccttcctgtgctggcgtccatgaccaaggccgcggacccccgcttccgcccccgctggaaggtgatcctgacgttctttgtgggtgctgccatcctctggctgctctgctcccaccgcccggcccccggcaggccccccacccacaatgcacacaactggaggctcggccaggcgcccgccaactggtacaatgacacctaccccctgtctcccccacaaaggacaccggctgggattcggtatcgaatcgcagttatcgcagacctggacacagagtcaagggcccaagaggaaaacaccyggttcagttacctgaaaaagggctacctgaccctgtcagacagtggggacaaggtggccgtggaatgggacaaagaccatggggtyctggagtcccacctggcggagaaggggagaggcatggagctatccgacctgattgttttcaatgggaaactctactccgtggatgaccggacgggggtcgtctaccagatcgaaggcagcaaagccgtgccctgggtgattctgtccgacggcgacggcaccgtggagaaaggtaactggaccctgaggttttatggaggtgtgggtggggagtgggagctcagggcctggctggcaaacacaggcacatggtaaagaattcacacacctagaagccagggatgtggtgagggagcacgtctccctcttgctctgacctgcggcccccttacccttagccaggagcatagcctactgtcacttcacactgagcagtttctaggaggaagagcttatcgctagaggcctgtgggagacgtggggaatctctccaagatgttttcggctgtatccgctgctgctctcggagcctctgggaacacgccctttttacaccttcaaaggttctcaagaccacgctaggatgtgcctaccaggagccttgccctgaaagccatggggacagatggttctcactcaaaacccagactttggtttcatgttactgaagggtaaactgctgcccagccctcctctccctgaaccccagcagggggagggcatgtgtgagctgtgccaacccccctggagtggagcctgatgccagcctttttgttcaccagaaaggaggtgctrcttccacagggcagggacaggctttggggaggcacggtggccagtgtcttcctccagagaggagctggggaggtgccaaggacgctggcagaggagctgccagctcctctgagctccgtttgtctgagctggcggtggatccccaccttctagaaagctaaatgccaccgcaggctttctgaggtcaaggaggaactgcactaaacaacggcccacacagttcatggccggccaggccctccccacacccggtgataaaatcttcagtgtttgcccagggctgggcaggggacggacctcacctgaggtatcaactgaggcgttggtcgcctacttcctgcctcgcacttgtcagggttttaggcaaccctagtgtagttctgtccttcccttggatagggaggaaagcggggtacagggagctctggggttgggctgtactcaggtcatccgggagggatggaagaccctggcatggagaatgtctcatcgcacaagcagaccaggagaccgcaggtccctccagggccctgcagagaagctactacagtctcgggcagttcagagggcacagctccagctctcaggggcaagaagctggcaaaatttggggaaagcaaacagaagttagaacaccagggtgtagggatgataagaatacacggtagaacacaggctcccacacagcctgaactgtggcagccttcaaagttaggcttattttaaataaatcagtttaaaaaaagcaaaaacagcttctgaacaaatccattgaaaggaagactgggagccccagcaccaagcccctctccggccactggagttagagtgatgctcggtgagacctcaggtgtggccgagggcagcacccgcactcccctgggacacacgtgccccttcagagtgctgtcacttttcagcttttctagcctttaaggataatcctaaggttggggttacagcttgaggagcggggagttggggatcagaggagacttgagagtggtcactgaaccttcaggagctgaggggagggcagccggccggccctgggcgggagccaggtgcgggccggaggggaggcagktgtggrgccgggcgggagtcaggtgcggggtctaaggacaggtgcggggccgggtgggagccaggtgcaggggtgcggcgggagctgggtgcggggcctaaggacactctgcttggccaggcttcaaggccgaatggctggcagtgaaggacgagcgtctgtacgtgggcggcctgggcaaggagtggacgaccactacgggtgatgtggtgaacgagaacccggagtgggtgaaggtggtgggctacaagggcagcgtggaccacgagaactgggtgtccaactacaacgccctgcgggctgctgccggcatccagccgccaggtaagagacgcctgccccagcccacagtgtggcttccacagcccagtcgctgggaacctgcttcctcctgcatttgcctccaaaaccgttttttattttagacatagtcttgctctgtcaccccggttagagtgcagtggcacgatctcagctcactgcaacctccacctcctgggttcaaacgatttttctgcctcagcctccccagtagctgggactacaggtgtgcaccaccacgcccagctaattgtatttttagtggagacagggtttcaccatgttgcccaggatggtctcgaactcctgacttcgggtgatctggtgatccacctgcctcggcctcccaaagtgctggcattacgggcgcgagccaccacacccagcctccaaggccgtttcttgcttgattttagtgattttggttgcctctgatggtggcttccctcaggccagtggattctggcggcaaatgagctgttttctctttcctgccccactcgccctggcagctggcctcctagcatcccagcctgtggcccggttgtctgcactggtgggtcaggccctgtccctacccctggcgctgggccgtggtgttccacaccaacatagggccagcagcactttggcctccccctagtcaggatggagtaggccttaggtgcctgaggttcaggaggaagtgactgagtctgtgcctggggccccagacgctgtctcctcttccttgcagcctcaaggcagcctccccgccgatgcctccccacatccaatgggggtttgttccctttccttgggttcctctggatcagccccgaggaggctccgatgagcccaaatccctgatgcagctcacaggcagctctcggtggaacgggaggaggcttcaagggagsgggtgctgcaggttccctgcatgggataaccgagaacacagaaccttccagaatcctggagagcagggaggggcgggttgctgtgagctggtgggccctggtggtcgcagccccttgcctgctactgcgcacggcctgatggtgtggggctgggcacaccaggccgcatgcgtgtctgacccgcggtcacccggttcccaggctacctcatccatgagtctgcctgctggagtgacacgctgcagcgctggttcttcctgccgcgccgcgccagccaggagcgctacagcgagaaggacgacgagcgcaagggcgccaacctgctgctgagcrcctcccctgacttcggcgacatcgctgtgagccacgtcggggcggtggtccccactcacggcttctcgtccttcaagttcatccccaayaccgacgaccagatcattgtggccctcaaatccgaggaggacagcggcagagtcgcctcctacatcatggccttcacrctggacgggcgcttcctgttgccggagaccaagatcgraagcgtgaaatacgaaggcatcgagttcatttaactcaaaacrgaaacactgagcaaggccatcaggactcagcttttataaaaacaagaggagtgcacttttgttttgttttgttctttttggaactgtgcctgggttggaggtctggacagggagcccagtcccgggccccatagtggtgcgggcactggacccccgggccccacggaggccgcggtctgaactgctttccatgctgccatctggtggtgatttcggtcacttcaggcattgactcaaggcctgcctaactggctgggtcgtttcttccatccgacctcgtttcttttctttcctatgttcttttgttcagtgaatatccctagagctcctaccatatgtcaggccctatgcctcaccctgagaacgcagtgagcatgaggtggacctgtttgctgggaaccccaggtcacccccttttcttcctactctgtgcctggagcatcatgtccacccctgcagatccttggaaaagaaaatgtttatgttgcagggtattgcatggtcacgagtgagggcaggcccctggggacacatctgcccacagctgcacaggccagggcgcaggcacatctgttggttctcaggcctcagataaaaccatctccgcatcatatggccagtgaccgctttctcccttcaagaaaattctgtggctgtgcagtactttgaagttttaattattaacctgctttaattaaagcagtttcctttcttataaagtggaatcaccaaatcttatcacacagagcacagtcctgtagttacccagcccgctccagcagtgcgggagattgtaaggaagcggtggcggctggtgaagcaagtctcacatgtcggygttcttggccaatggatacaaagataaagaaaatgttgcctttttctaggaactgtcagaaatcctcatgcctttcaagacttctgtgaatgacttgaattttttattccctgcctagggtctgtgaacgaggcctgtctcttccctggggtttctttccatggcctttatttctcctcttccagtgggagttttgcaggctcttctctgtggaaacttcacgagcgttggctgggcctcggcttcgctggagtgtactccagggtgaaggcagagtgggatttgagacccaggttaggcacgacccaggctgagaagggacgtttccatcattcacagtgccctccccacagcactacctcaccccgacccccaccctcactcmtaccccaccccgcgatcgtcaggggtgccacggtgggccggagggtgccggctctggctgtccctgtgccggtccctcacaaacctctccccctttgaaactcaagcacagctgcgaggagggcagcgaggagggacccctctctcatggttgtctctttcccccgctatgtcataggtagtggaggaagcgaaggaagtgaacgctraatgtgacgcatttctgaagagctcagctgtcaccgggcatagcctggaagccccaagtctgttctgactttgcctggctgtctccttgacccgcctcctagatcattgtccttgatgtccaggctgggtcatttaaaatagagatgcaatcaggaaggttgggggacttgggactgtggctgaattgagaccttgctgatgtattcatgtcagcacctgagtcacagcccaggtgcccggaagcagcctcttcgcataggcagtgatttgcgattactttaaagctcaccttttttcttcccctctctgttcgctgctgtcagcataatgattgtgttccttccctatgggatccatctgttttgtaaacaataaagcgtctgagggagtgtagttttctgtctcccggtctgtgctgactgtttgcagaggcctggccacgagagcgcctgcgcaggatgctgggcatgcgcacgggagtcgcccgccagggcatcccatctggaaactgcgtcctccagtccgccttgtcccactatctcaaggcgctccaagagcacgagcgctgtggtcagaaaggtggggtctgaagccactgcaagcccgatcctggctctgtccccatccagctgcatgtccttaggcaaatgacctaactttcctgtgcttcagtgtcctcgtctgcaaaaggatgctcatcgcagagctcatcccggggctgcagtgaacggtaagtgactgggtacgcgcaaggggcttagaacatcacctgacgtgtgctgggcacccacgtgcccgttttgttgctgctcatccctggggagccatctggatgacttggtaaggaggcgctcaggtgagaggtcagggctgagctggtgtctttagtgtgtcagtgagtccacaggaacagacgaggtcgctccaagtgacgcatggaagaatccccatcactgaaaccacaggcgccagggaggcaggcactggccaagaaagacctcaactagagacaggacaggggcggccagagagggacagaaaaccgggagagcggaatcagaaagggcaattgcacccacatcgaccccttacccttcagacccactctccttccccgcctcctccgggtcccagacccagtgaacctcctcagtgccctctgggatggcccctggggagtccctgactctctctggcactcgcctctcaaggcagccccctggtgccactcccagtgtctgggctgagtcccctcccctggtctcttctggcctgggagtgtgacatgggagtgacagctccactgttagcagctccagatgctacagcggcccctcgtgccgcccgcacgccctgctgtctcatccgtggtaaatggtcccttcactgaagcctccttagatgatcttcattcgggtgtcgtcttttcctgctgggagcctgaccaagacagcgctgcagggaggcggcctctgcagaaggaccagcgcggcagcggggtccccagagagactccatgactgagcagcaaggagaactgggcgttctcggcgaggatccacagaacaacagttccagaaaaagccagggcgcatcgggccgcggcgggttgggataaggaaccgcatgtaagctcttgaccatctgtttaagaagctgtgacatgcgggactcgtggggcagtgactgccggctccacactcatgggtccggcacacagctcatctgcaaatggaagactctccagtcacctcaactggacaaaaaaacgagattcagtttctttcattccacgtgttaatcctgtattccagtatactttttttcttttcttttttttattttggggggatggagtcttgctctgtctcccaggctgaagtgcagggacacgatcttggctcactgtaacctccatctcccaggttcaagcaattcttctgcctcagcctcccaagtagctgggattacaggcgtgcgccaccacgcccggctaatttttgtgtttttagtagagatggggtttctccatattggccaggctggtctcaaactcctgatctcaagtgatccatccgccttgacctcccaaagcgttgggattacaggcgtgagccactgcacccagccatggtacactattttattttattttattattttattttattttatttattttattttattttatttattttattttatttattttattttattttattttaagacggagtctcgctctttcgcccaggccagactgcagtggcactatctcggctcactgcaagctccgcctcccgggttcacgccattctcctgcctcagcctcacgagtagctgggactacaggctcccgccaccgtgcccggcaaattttttgtatttttagtagagacggggtttcaccatgttagccagtttggtctcgatctcctgaccttgtgatctgcccgcctcggcctcccaaagtgctgggattacaggtgtgagccaccgcgcccggcccacggtacactttaaattgataaatctcaaggtaagttatcccttcatgctgttaaaagagttaaagcaaaaataaaataccgtcacactgtgaaaacccctggcccagatggcttcacttttgaattgtaccaaacatgtaagggagaaataatacgaaagcaacacaaaatcttccatgattctgggagttgggaaacttttccaactcattttatgagggcaccactatactgataccaaaaccagaaaaatacattacaaaaaaaaaaaaatacagaccagtatccctcatgaacatagatgtaaaaatcctggccaggagcagtggctcacgcctgtaatcccagcactttgggaggccgaggcgggtagatcacgaggtcaggagattgagagcatcctggctaacacagtgaaaccccatctctactaaaaaatacaaaaaagttagccgggcacagtggcgggcacctgtagtcccagctactcgggaggctgaggcaggagaatggcatgaacccaggaggcagagcttacagtgagtcgagatcgcgccactgcactccagcctgggtgacagagcgagactccgtctcaaaaaaaaaaaataaataaaaataaaaaataaaaaaagaatccttagcacagattagcaagccaaattcagcaataatcaaaaattagaatgttaccggaaaggggtctgattcaggtcaccaagagagggttcttggagctcacacaagaaataattctgggcacgtccatagagtaaagtgacagcaagtttattaagaaagtaggccaggtgcggtggctcacgcctgtaatcccaacactttgggaggctgaggcaggcaaatcacgagatcaggagttggagaccagcctgaccacatggtgaaaccccatctctactaaaaatataaaaatcagctgggcktggcggtgcatgtctgtaatcccagctactcaggaggctgaggcaggagaatcgcttgaacctgggagatggaggttacagtgagccgagatcgcgccactgcactccagcctgtgcgatggagtgagactccatctcaaaaaaaaaagtaaaggaataaagaatagcaactctaaaggcagagtagctccagggctgctgactgtccctttttatggttatttcttgaggatatgctaaacaaggggtggattcttcatgcctcccgtttttagaccatagagggtaacttcctcatgttgccatggcatttatcatggtgcttgcaggagcatagcagtgaggacagccagaggtcactctcatcgccgcttgattttggtgggttttagccggctttactgcagcctgttttgttgttgttgttgtttttgagatggagtctcattctgttgcccaggctggagtgcagtggcacaatctcagcgcactgcatcctccgactcccaggttcaagcgattctcctgcctcagcctcccgagtagctgggattacagtcgtgcgccacaacaccctgctaatttgtatatttttagtagagatggggtttcaccatgttggccaggctggtctcaaactcctgacttcgcgattcgcctgcctcggcctcccaaagtgctgggattacaggtgtgagccactgcgcccggccagcctgttttatcagcaaggtatgacctgtatcttgtgccaaccttctgtctccagtgactaagaatgccttaacctcctgggaatgcagcccagcaggtctcagccgtaatttacccagacctggttcaagatggagtggctctggttcaaacgtctctgacaagaatacttcacgataggtgtggtttattctaggaatacagggttagttcagtattctgaaatcaatcaatgaaattcatatgaagactaaaaaggggcagggtgtggtggctcatgcctgtaatcccagcactttgggaggctgaggtgggcatttgaggtcaggagttcgagaccagcctggccaacatggtgaaaccccgtctctactaaaaacacgaaaaattagctgggggtggtggggcgcacctatagtcccagctacttgggaggctgaggcaggagaatcgcttgaacctgagaggcggaggttgcagtgaaccgacatcatcccattgctctccagcctgggcgacagagcgagactccatctcaaaaaaaaaaaaaaaaaaaaaaaaagactaaaaagggggaaaagcatgataatctcaaaagatagagaaaaagcatttgacagaatctaacagccattcacccaatccaattctaaacaaaaagccaaaaaacccgttagggaacatccttaacccgatgaagggctccggtgagaagtccacagctaagctcctacttcacggtcagacactgaatgccttccccctgaggaacaacgcaagagtgtctgctttcaccactttcttccccaccattttttcctttgaaataaaattttgaaccacacagaagttgcaaaaatacagtaggtcctatgaaaggaaaataaaaaccgcaatgcacccttccaataggaaaaaacaggaagctgagagctgagtcatgcaagcagctgcctttcctcttgttcctaagcagagagcgacagaggaaaggctaaagacctcggcaggtagctactgtgctcaccttatcttatgtgaagtgccaatttactgagcaccagatgaatacacgattgactgttcccctgcctgcttctcttctcttgcaacccgtggcggcagcactaggaccggaccctcccacttccccctccagcctgcttttcccctttaaatatggaagccctcaaagtcacctttggagaaaggcacagaccacagactgtttcagcgattccgtgttttgtcacgttttgttttgcctccctggccttatccttgaccttggcaaaattaactggttgagaacagtctcagatactttttggttcatatcccccttctgtgggggatacattccaagacccgcagtggatgcctgaaaccatagataatgtggaatttactgttctacattcatacctgcgataaagcttaattcataaattaggcacagtaagagattaacagtaacatagtaaatagaacaattagaacaatagtctaaaataagagttatgtgcatgtggtctctctctaaatatcttagtgtactgtactcgcccttgtgatgaagaagggaaagagcaggatgacacaatatttcatcccactaggaacagtatgcaatttaaaacttatgaattatttctggaatcttccatttaatattttcagacctcagttgaccgtgggtaactgaaactgcagtaagtgaaactgcagataagcggggccagcagtcgtgtttctgtgcagcattcatgtggctccctccagtgtactgattacctaagcacagtacatttaccaaacccaggaaactgacattgctctcatcacttttattcctcatcctattggtgcaaaagaaaaaaaaaggaagttattcagatttgaaaagaaggaatagaactatctttattcgccagtgacaagctttgactagctagacaagcctaagaaatct
